United States Patent Application Publication US 2018/0126003 A1 - sequence listing, part 80

SEQ ID NO: 145808 - DNA, 2933 bp, Artificial Sequence
  derived and/or modified sequence
atttttagctctaaagccaccatcctcacgagactctggggccccccaggctcccagacctttgagcaaccttcaccgcacagaaacccagccgcgccctgcaattcccaccgcggaaggtgccgaccaacccccaggatggcggaagctcaccaggccgtggccttccagttcacggtgaccccagacggggtcgacttccggctcagtcgggaggccctgaaacacgtctacctgtctgggatcaactcctggaagaaacgcctgatccgcatcaagaatggcatcctcaggggcgtgtaccctggcagccccaccagctggctggtcgtcatcatggcaacagtgggttcctccttctgcaacgtggacatctccttggggctggtcagttgcatccagagatgcctccctcaggggtgtggcccctaccagaccccgcagacccgggcacttctcagcatggccatcttctccacgggcgtctgggtgacgggcatcttcttcttccgccaaaccctgaagctgcttctctgctaccatgggtggatgtttgagatgcatggcaagaccagcaacttgaccaggatctgggctatgtgtatccgccttctatccagccggcaccctatgctctacagcttccagacatctctgcccaagcttcctgtgcccagggtgtcagccacaattcagcggtacctagagtctgtgcgccccttgttggatgatgaggaatattaccgcatggagttgctggccaaagaattccaggacaagactgcccccaggctgcagaaatacctggtgctcaagtcatggtgggcaagtaactatgtgagtgactggtgggaagagtacatctaccttcgaggcaggagccctctcatggtgaacagcaactattatgtcatggaccttgtgctcatcaagaatacagacgtgcaggcagcccgcctgggaaacatcatccacgccatgatcatgtatcgccgtaaactggaccgtgaagaaatcaagcctgtgatggcactgggcatagtgcctatgtgctcctaccagatggagaggatgttcaacaccactcggatcccgggcaaggacacagatgtgctacagcacctctcagacagccggcacgtggctgtctaccacaagggacgcttcttcaagctgtggctctatgagggcgcccgtctgctcaagcctcaggatctggagatgcagttccagaggatcctggacgacccctccccacctcagcctggggaggagaagctggcagccctcactgcaggaggaagggtggagtgggcgcaggcacgccaggccttctttagctctggaaagaataaggctgccttggaggccatcgagcgtgccgctttcttcgtggccctggatgaggaatcctactcctatgaccccgaagatgaggccagcctcagcctctatggcaaggccctgctacatggcaactgctacaacaggtggtttgacaaatccttcactctcatttccttcaagaatggccagttgggtctcaatgcagagcatgcgtgggcagatgctcccatcattgggcacctctgggagtttgtcctgggcacagacagcttccacctgggctacacggagaccgggcactgcctgggcaaaccgaaccctgcgctcgcacctcctacacggctgcagtgggacattccaaaacagtgccaggcggtcatcgagagttcctaccaggtggccaaggcgttggcagacgacgtggagttgtactgcttccagttcctgccctttggcaaaggcctcatcaagaagtgccggaccagccctgatgcctttgtgcagatcgcgctgcagctggctcacttccgggacaggggtaagttctgcctgacctatgaggcctcaatgaccagaatgttccgggagggacggactgagactgtgcgttcctgtaccagcgagtccacagcctttgtgcaggccatgatggaggggtcccacacaaaagcagacctgcgagatctcttccagaaggctgctaagaagcaccagaatatgtaccgcctggccatgaccggggcagggatcgacaggcacctcttctgcctttacttggtctccaagtacctaggagtcagctctcctttccttgctgaggtgctctcggaaccctggcgtctctccaccagccagatcccccaatcccagatccgcatgttcgacccagagcagcaccccaatcacctgggcgctggaggtggctttggccctgtagcagatgatggctatggagtttcctacatgattgcaggcgagaacacgatcttcttccacatctccagcaagttctcaagctcagagacgaacgcccagcgctttggaaaccacatccgcaaagccctgctggacattgctgatcttttccaagttcccaaggcctacagctgaaggttggagaaatgccagctgccctttcgtccccacactgtggaggaagggacctgtggcagctcacaggcatgaggggtggccgtgcacaggtgcccaggctccaaggacagctccggcagcaggtcctcgctgggcagatgctgctccctgagggcccaggtggtggaggtggggttggagcaggaagggaattttgatttttttttttcttgatagatactaataaaaataaggctgtgtaattttctctcagcccttaggtacctgtgttttgtttgggaactcggaggccctccccctcccccagctcagaccacagaggtggcaagagaagggctgaagctggaagactgttcatgagggacttgtgtgacctgctttgaaatgtgtgactctgctgagtgacgtaggctctgagatagctgtccacgcccacgtgtttgcttggaataaatacttgcctcagaaccttc

SEQ ID NO: 145809 - DNA, 2662 bp, Artificial Sequence
  derived and/or modified sequence
aggcctgaaggacgtggggacacgggccagagtggctggccccacgcacggacaggagtgaacccgagctgtgccgaccaacccccaggatggcggaagctcaccaggccgtggccttccagttcacggtgaccccagacggggtcgacttccggctcagtcgggaggccctgaaacacgtctacctgtctgggatcaactcctggaagaaacgcctgatccgcatcaagaatggcatcctcaggggcgtgtaccctggcagccccaccagctggctggtcgtcatcatggcaacagtgggttcctccttctgcaacgtggacatctccttggggctggtcagttgcatccagagatgcctccctcaggggtgtggcccctaccagaccccgcagacccgggcacttctcagcatggccatcttctccacgggcgtctgggtgacgggcatcttcttcttccgccaaaccctgaagctgcttctctgctaccatgggtggatgtttgagatgcatggcaagaccagcaacttgaccaggatctgggctatgtgtatccgccttctatccagccggcaccctatgctctacagcttccagacatctctgcccaagcttcctgtgcccagggtgtcagccacaattcagcggtacctagagtctgtgcgccccttgttggatgatgaggaatattaccgcatggagttgctggccaaagaattccaggacaagactgcccccaggctgcagaaatacctggtgctcaagtcatggtgggcaagtaactatgtgagtgactggtgggaagagtacatctaccttcgaggcaggagccctctcatggtgaacagcaactattatgtcatggaccttgtgctcatcaagaatacagacgtgcaggcagcccgcctgggaaacatcatccacgccatgatcatgtatcgccgtaaactggaccgtgaagaaatcaagcctgtgatggcactgggcatagtgcctatgtgctcctaccagatggagaggatgttcaacaccactcggatcccgggcaaggacacagatgtgctacagcacctctcagacagccggcacgtggctgtctaccacaagggacgcttcttcaagctgtggctctatgagggcgcccgtctgctcaagcctcaggatctggagatgcagttccagaggatcctggacgacccctccccacctcagcctggggaggagaagctggcagccctcactgcaggaggaagggtggagtgggcgcaggcacgccaggccttctttagctctggaaagaataaggctgccttggaggccatcgagcgtgccgctttcttcgtggccctggatgaggaatcctactcctatgaccccgaagatgaggccagcctcagcctctatggcaaggccctgctacatggcaactgctacaacaggtggtttgacaaatccttcactctcatttccttcaagaatggccagttgggtctcaatgcagagcatgcgtgggcagatgctcccatcattgggcacctctgggagtttgtcctgggcacagacagcttccacctgggctacacggagaccgggcactgcctgggcaaaccgaaccctgcgctcgcacctcctacacggctgcagtgggacattccaaaacagtgccaggcggtcatcgagagttcctaccaggtggccaaggcgttggcagacgacgtggagttgtactgcttccagttcctgccctttggcaaaggcctcatcaagaagtgccggaccagccctgatgcctttgtgcagatcgcgctgcagctggctcacttccgggacaggggtaagttctgcctgacctatgaggcctcaatgaccagaatgttccgggagggacggactgagactgtgcgttcctgtaccagcgagtccacagcctttgtgcaggccatgatggaggggtcccacacaaaagcagacctgcgagatctcttccagaaggctgctaagaagcaccagaatatgtaccgcctggccatgaccggggcagggatcgacaggcacctcttctgcctttacttggtctccaagtacctaggagtcagctctcctttccttgctgaggtgctctcggaaccctggcgtctctccaccagccagatcccccaatcccagatccgcatgttcgacccagagcagcaccccaatcacctgggcgctggaggtggctttggccctgtagcagatgatggctatggagtttcctacatgattgcaggcgagaacacgatcttcttccacatctccagcaagttctcaagctcagagacgaacgcccagcgctttggaaaccacatccgcaaagccctgctggacattgctgatcttttccaagttcccaaggcctacagctgaaggttggagaaatgccagctgccctttcgtccccacactgtggaggaagggacctgtggcagctcacaggcatgaggggtggccgtgcacaggtgcccaggctccaaggacagctccggcagcaggtcctcgctgggcagatgctgctccctgagggcccaggtggtggaggtggggttggagcaggaagggaattttgatttttttttttcttgatagatactaataaaaataaggctgtgtaattttctctc

SEQ ID NO: 145810 - DNA, 2647 bp, Artificial Sequence
  derived and/or modified sequence
gtcgcggactggctgggggcgtctcggcgcggctggcggcggggccggcctaagcgcgcccgcgcacccatctgcccccgtcctaggtgccgaccaacccccaggatggcggaagctcaccaggccgtggccttccagttcacggtgaccccagacggggtcgacttccggctcagtcgggaggccctgaaacacgtctacctgtctgggatcaactcctggaagaaacgcctgatccgcatcaagaatggcatcctcaggggcgtgtaccctggcagccccaccagctggctggtcgtcatcatggcaacagtgggttcctccttctgcaacgtggacatctccttggggctggtcagttgcatccagagatgcctccctcaggggtgtggcccctaccagaccccgcagacccgggcacttctcagcatggccatcttctccacgggcgtctgggtgacgggcatcttcttcttccgccaaaccctgaagctgcttctctgctaccatgggtggatgtttgagatgcatggcaagaccagcaacttgaccaggatctgggctatgtgtatccgccttctatccagccggcaccctatgctctacagcttccagacatctctgcccaagcttcctgtgcccagggtgtcagccacaattcagcggtacctagagtctgtgcgccccttgttggatgatgaggaatattaccgcatggagttgctggccaaagaattccaggacaagactgcccccaggctgcagaaatacctggtgctcaagtcatggtgggcaagtaactatgtgagtgactggtgggaagagtacatctaccttcgaggcaggagccctctcatggtgaacagcaactattatgtcatggaccttgtgctcatcaagaatacagacgtgcaggcagcccgcctgggaaacatcatccacgccatgatcatgtatcgccgtaaactggaccgtgaagaaatcaagcctgtgatggcactgggcatagtgcctatgtgctcctaccagatggagaggatgttcaacaccactcggatcccgggcaaggacacagatgtgctacagcacctctcagacagccggcacgtggctgtctaccacaagggacgcttcttcaagctgtggctctatgagggcgcccgtctgctcaagcctcaggatctggagatgcagttccagaggatcctggacgacccctccccacctcagcctggggaggagaagctggcagccctcactgcaggaggaagggtggagtgggcgcaggcacgccaggccttctttagctctggaaagaataaggctgccttggaggccatcgagcgtgccgctttcttcgtggccctggatgaggaatcctactcctatgaccccgaagatgaggccagcctcagcctctatggcaaggccctgctacatggcaactgctacaacaggtggtttgacaaatccttcactctcatttccttcaagaatggccagttgggtctcaatgcagagcatgcgtgggcagatgctcccatcattgggcacctctgggagtttgtcctgggcacagacagcttccacctgggctacacggagaccgggcactgcctgggcaaaccgaaccctgcgctcgcacctcctacacggctgcagtgggacattccaaaacagtgccaggcggtcatcgagagttcctaccaggtggccaaggcgttggcagacgacgtggagttgtactgcttccagttcctgccctttggcaaaggcctcatcaagaagtgccggaccagccctgatgcctttgtgcagatcgcgctgcagctggctcacttccgggacaggggtaagttctgcctgacctatgaggcctcaatgaccagaatgttccgggagggacggactgagactgtgcgttcctgtaccagcgagtccacagcctttgtgcaggccatgatggaggggtcccacacaaaagcagacctgcgagatctcttccagaaggctgctaagaagcaccagaatatgtaccgcctggccatgaccggggcagggatcgacaggcacctcttctgcctttacttggtctccaagtacctaggagtcagctctcctttccttgctgaggtgctctcggaaccctggcgtctctccaccagccagatcccccaatcccagatccgcatgttcgacccagagcagcaccccaatcacctgggcgctggaggtggctttggccctgtagcagatgatggctatggagtttcctacatgattgcaggcgagaacacgatcttcttccacatctccagcaagttctcaagctcagagacgaacgcccagcgctttggaaaccacatccgcaaagccctgctggacattgctgatcttttccaagttcccaaggcctacagctgaagcccttaggtacctgtgttttgtttgggaactcggaggccctccccctcccccagctcagaccacagaggtggcaagagaagggctgaagctggaagactgttcatgagggacttgtgtgacctgctttgaaatgtgtgactctgctgagtgacgtaggctctgagatagctgtccacgcccacgtgtttgcttggaataaatacttgcctcagaaccttca

SEQ ID NO: 145811 - DNA, 2753 bp, Artificial Sequence
  derived and/or modified sequence
tccatcctccaggcatccatgtccaccatagaatttggttacttggactatgcccagtctcggttccagttctacttccagcagaaggggcagctgaccagtgtccactcctcatcctgactccaccctcccactccttggatttctcctggagcctccagggcaggaccttggagggaggaacaacgagcagaaggccctggcgactgggctgagcccccaagtgaaactgaggttcaggagaccggcctgttcctgagtttgactctaaagccaccatcctcacgagactctggggccccccaggctcccagacctttgagcaaccttcaccgcacagaaacccagccgcgccctgcaattcccaccgcggaaggtgccgaccaacccccaggatggcggaagctcaccaggccgtggccttccagttcacggtgaccccagacggggtcgacttccggctcagtcgggaggccctgaaacacgtctacctgtctgggatcaactcctggaagaaacgcctgatccgcatcaagaatggcatcctcaggggcgtgtaccctggcagccccaccagctggctggtcgtcatcatggcaacagtgggttcctccttctgcaacgtggacatctccttggggctggtcagttgcatccagagatgcctccctcaggggtgtggcccctaccagaccccgcagacccgggcacttctcagcatggccatcttctccacgggcgtctgggtgacgggcatcttcttcttccgccaaaccctgaagctgcttctctgctaccatgggtggatgtttgagatgcatggcaagaccagcaacttgaccaggatctgggctcttccagacatctctgcccaagcttcctgtgcccagggtgtcagccacaattcagcggtacctagagtctgtgcgccccttgttggatgatgaggaatattaccgcatggagttgctggccaaagaattccaggacaagactgcccccaggctgcagaaatacctggtgctcaagtcatggtgggcaagtaactatgtgagtgactggtgggaagagtacatctaccttcgaggcaggagccctctcatggtgaacagcaactattatgtcatggaccttgtgctcatcaagaatacagacgtgcaggcagcccgcctgggaaacatcatccacgccatgatcatgtatcgccgtaaactggaccgtgaagaaatcaagcctgtgatggcactgggcatagtgcctatgtgctcctaccagatggagaggatgttcaacaccactcggatcccgggcaaggacacagatgtgctacagcacctctcagacagccggcacgtggctgtctaccacaagggacgcttcttcaagctgtggctctatgagggcgcccgtctgctcaagcctcaggatctggagatgcagttccagaggatcctggacgacccctccccacctcagcctggggaggagaagctggcagccctcactgcaggaggaagggtggagtgggcgcaggcacgccaggccttctttagctctggaaagaataaggctgccttggaggccatcgagcgtgccgctttcttcgtggccctggatgaggaatcctactcctatgaccccgaagatgaggccagcctcagcctctatggcaaggccctgctacatggcaactgctacaacaggtggtttgacaaatccttcactctcatttccttcaagaatggccagttgggtctcaatgcagagcatgcgtgggcagatgctcccatcattgggcacctctgggagtttgtcctgggcacagacagcttccacctgggctacacggagaccgggcactgcctgggcaaaccgaaccctgcgctcgcacctcctacacggctgcagtgggacattccaaaacaggcggtcatcgagagttcctaccaggtggccaaggcgttggcagacgacgtggagttgtactgcttccagttcctgccctttggcaaaggcctcatcaagaagtgccggaccagccctgatgcctttgtgcagatcgcgctgcagctggctcacttccgggacaggggtaagttctgcctgacctatgaggcctcaatgaccagaatgttccgggagggacggactgagactgtgcgttcctgtaccagcgagtccacagcctttgtgcaggccatgatggaggggtcccacacaaaagcagacctgcgagatctcttccagaaggctgctaagaagcaccagaatatgtaccgcctggccatgaccggggcagggatcgacaggcacctcttctgcctttacttggtctccaagtacctaggagtcagctctcctttccttgctgaggtgctctcggaaccctggcgtctctccaccagccagatcccccaatcccagatccgcatgttcgacccagagcagcaccccaatcacctgggcgctggaggtggctttggccctgtagcagatgatggctatggagtttcctacatgattgcaggcgagaacacgatcttcttccacatctccagcaagttctcaagctcagagacgaacgcccagcgctttggaaaccacatccgcaaagccctgctggacattgctgatcttttccaagttcccaaggcctacagctgaagcccttaggtacctgtgttttgtttgggaactcggaggccctccccctcccccagctcagaccacagaggtggcaagagaagggctga

SEQ ID NO: 145812 - DNA, 2436 bp, Artificial Sequence
  derived and/or modified sequence
atttttagctctaaagccaccatcctcacgagactctggggccccccaggctcccagacctttgagcaaccttcaccgcacagaaacccagccgcgccctgcaattcccaccgcggaaggtgccgaccaacccccaggatggcggaagctcaccaggccgtggccttccagttcacggtgaccccagacggggtcgacttccggctcagtcgggaggccctgaaacacgtctacctgtctgggatcaactcctggaagaaacgcctgatccgcatcaagaatggcatcctcaggggcgtgtaccctggcagccccaccagctggctggtcgtcatcatggcaacagtgggttcctccttctgcaacgtggacatctccttggggctggtcagttgcatccagagatgcctccctcaggggtgtggcccctaccagaccccgcagacccgggcacttctcagcatggccatcttctccacgggcgtctgggtgacgggcatcttcttcttccgccaaaccctgaagctgcttctctgctaccatgggtggatgtttgagatgcatggcaagaccagcaacttgaccaggatctgggctatgtgtatccgccttctatccagccggcaccctatgctctacagcttccagacatctctgcccaagcttcctgtgcccagggtgtcagccacaattcagcggtacctagagtctgtgcgccccttgttggatgatgaggaatattaccgcatggagttgctggccaaagaattccaggacaagactgcccccaggctgcagaaatacctggtgctcaagtcatggtgggcaagtaactatgtgagtgactggtgggaagagtacatctaccttcgaggcaggagccctctcatggtgaacagcaactattatgtcatggaccttgtgctcatcaagaatacagacgtgcaggcagcccgcctgggaaacatcatccacgccatgatcatgtatcgccgtaaactggaccgtgaagaaatcaagcctgtgatggcactgggcatagtgcctatgtgctcctaccagatggagaggatgttcaacaccactcggatcccgggcaaggacacagatgtgctacagcacctctcagacagccggcacgtggctgtctaccacaagggacgcttcttcaagctgtggctctatgagggcgcccgtctcctcagcctctatggcaaggccctgctacatggcaactgctacaacaggtggtttgacaaatccttcactctcatttccttcaagaatggccagttgggtctcaatgcagagcatgcgtgggcagatgctcccatcattgggcacctctgggagtttgtcctgggcacagacagcttccacctgggctacacggagaccgggcactgcctgggcaaaccgaaccctgcgctcgcacctcctacacggctgcagtgggacattccaaaacagtgccaggcggtcatcgagagttcctaccaggtggccaaggcgttggcagacgacgtggagttgtactgcttccagttcctgccctttggcaaaggcctcatcaagaagtgccggaccagccctgatgcctttgtgcagatcgcgctgcagctggctcacttccgggacaggggtaagttctgcctgacctatgaggcctcaatgaccagaatgttccgggagggacggactgagactgtgcgttcctgtaccagcgagtccacagcctttgtgcaggccatgatggaggggtcccacacaaaagcagacctgcgagatctcttccagaaggctgctaagaagcaccagaatatgtaccgcctggccatgaccggggcagggatcgacaggcacctcttctgcctttacttggtctccaagtacctaggagtcagctctcctttccttgctgaggtgctctcggaaccctggcgtctctccaccagccagatcccccaatcccagatccgcatgttcgacccagagcagcaccccaatcacctgggcgctggaggtggctttggccctgtagcagatgatggctatggagtttcctacatgattgcaggcgagaacacgatcttcttccacatctccagcaagttctcaagctcagagacgaacgcccagcgctttggaaaccacatccgcaaagccctgctggacattgctgatcttttccaagttcccaaggcctacagctgaagcccttaggtacctgtgttttgtttgggaactcggaggccctccccctcccccagctcagaccacagaggtggcaagagaagggctgaagctggaagactgttcatgagggacttgtgtgacctgctttgaaatgtgtgactctgctgagtgacgtaggctctgagatagctgtccacgcccacgtgtttgcttggaataaatacttgcctcagaaccttc

SEQ ID NO: 145813 - DNA, 2319 bp, Artificial Sequence
  derived and/or modified sequence
atggccgaggcccaccaggccgtggccttccagttcaccgtgacccccgacggcgtggacttcagactgagcagagaggccctgaagcacgtgtacctgagcggcatcaacagctggaagaagagactgatcagaatcaagaacggcatcctgagaggcgtgtaccccggcagccccaccagctggctggtggtgatcatggccaccgtgggcagcagcttctgcaacgtggacatcagcctgggcctggtgagctgcatccagagatgcctgccccagggctgcggcccctaccagaccccccagaccagagccctgctgagcatggccatcttcagcaccggcgtgtgggtgaccggcatcttcttcttcagacagaccctgaagctgctgctgtgctaccacggctggatgttcgagatgcacggcaagaccagcaacctgaccagaatctgggccatgtgcatcagactgctgagcagcagacaccccatgctgtacagcttccagaccagcctgcccaagctgcccgtgcccagagtgagcgccaccatccagagatacctggagagcgtgagacccctgctggacgacgaggagtactacagaatggagctgctggccaaggagttccaggacaagaccgcccccagactgcagaagtacctggtgctgaagagctggtgggccagcaactacgtgagcgactggtgggaggagtacatctacctgagaggcagaagccccctgatggtgaacagcaactactacgtgatggacctggtgctgatcaagaacaccgacgtgcaggccgccagactgggcaacatcatccacgccatgatcatgtacagaagaaagctggacagagaggagatcaagcccgtgatggccctgggcatcgtgcccatgtgcagctaccagatggagagaatgttcaacaccaccagaatccccggcaaggacaccgacgtgctgcagcacctgagcgacagcagacacgtggccgtgtaccacaagggcagattcttcaagctgtggctgtacgagggcgccagactgctgaagccccaggacctggagatgcagttccagagaatcctggacgaccccagccccccccagcccggcgaggagaagctggccgccctgaccgccggcggcagagtggagtgggcccaggccagacaggccttcttcagcagcggcaagaacaaggccgccctggaggccatcgagagagccgccttcttcgtggccctggacgaggagagctacagctacgaccccgaggacgaggccagcctgagcctgtacggcaaggccctgctgcacggcaactgctacaacagatggttcgacaagagcttcaccctgatcagcttcaagaacggccagctgggcctgaacgccgagcacgcctgggccgacgcccccatcatcggccacctgtgggagttcgtgctgggcaccgacagcttccacctgggctacaccgagaccggccactgcctgggcaagcccaaccccgccctggccccccccaccagactgcagtgggacatccccaagcagtgccaggccgtgatcgagagcagctaccaggtggccaaggccctggccgacgacgtggagctgtactgcttccagttcctgcccttcggcaagggcctgatcaagaagtgcagaaccagccccgacgccttcgtgcagatcgccctgcagctggcccacttcagagacagaggcaagttctgcctgacctacgaggccagcatgaccagaatgttcagagagggcagaaccgagaccgtgagaagctgcaccagcgagagcaccgccttcgtgcaggccatgatggagggcagccacaccaaggccgacctgagagacctgttccagaaggccgccaagaagcaccagaacatgtacagactggccatgaccggcgccggcatcgacagacacctgttctgcctgtacctggtgagcaagtacctgggcgtgagcagccccttcctggccgaggtgctgagcgagccctggagactgagcaccagccagatcccccagagccagatcagaatgttcgaccccgagcagcaccccaaccacctgggcgccggcggcggcttcggccccgtggccgacgacggctacggcgtgagctacatgatcgccggcgagaacaccatcttcttccacatcagcagcaagttcagcagcagcgagaccaacgcccagagattcggcaaccacatcagaaaggccctgctggacatcgccgacctgttccaggtgcccaaggcctacagctag

SEQ ID NO: 145814 - DNA, 1704 bp, Artificial Sequence
  derived and/or modified sequence
atggagctgctggccaaggagttccaggacaagaccgcccccagactgcagaagtacctggtgctgaagagctggtgggccagcaactacgtgagcgactggtgggaggagtacatctacctgagaggcagaagccccctgatggtgaacagcaactactacgtgatggacctggtgctgatcaagaacaccgacgtgcaggccgccagactgggcaacatcatccacgccatgatcatgtacagaagaaagctggacagagaggagatcaagcccgtgatggccctgggcatcgtgcccatgtgcagctaccagatggagagaatgttcaacaccaccagaatccccggcaaggacaccgacgtgctgcagcacctgagcgacagcagacacgtggccgtgtaccacaagggcagattcttcaagctgtggctgtacgagggcgccagactgctgaagccccaggacctggagatgcagttccagagaatcctggacgaccccagccccccccagcccggcgaggagaagctggccgccctgaccgccggcggcagagtggagtgggcccaggccagacaggccttcttcagcagcggcaagaacaaggccgccctggaggccatcgagagagccgccttcttcgtggccctggacgaggagagctacagctacgaccccgaggacgaggccagcctgagcctgtacggcaaggccctgctgcacggcaactgctacaacagatggttcgacaagagcttcaccctgatcagcttcaagaacggccagctgggcctgaacgccgagcacgcctgggccgacgcccccatcatcggccacctgtgggagttcgtgctgggcaccgacagcttccacctgggctacaccgagaccggccactgcctgggcaagcccaaccccgccctggccccccccaccagactgcagtgggacatccccaagcaggccgtgatcgagagcagctaccaggtggccaaggccctggccgacgacgtggagctgtactgcttccagttcctgcccttcggcaagggcctgatcaagaagtgcagaaccagccccgacgccttcgtgcagatcgccctgcagctggcccacttcagagacagaggcaagttctgcctgacctacgaggccagcatgaccagaatgttcagagagggcagaaccgagaccgtgagaagctgcaccagcgagagcaccgccttcgtgcaggccatgatggagggcagccacaccaaggccgacctgagagacctgttccagaaggccgccaagaagcaccagaacatgtacagactggccatgaccggcgccggcatcgacagacacctgttctgcctgtacctggtgagcaagtacctgggcgtgagcagccccttcctggccgaggtgctgagcgagccctggagactgagcaccagccagatcccccagagccagatcagaatgttcgaccccgagcagcaccccaaccacctgggcgccggcggcggcttcggccccgtggccgacgacggctacggcgtgagctacatgatcgccggcgagaacaccatcttcttccacatcagcagcaagttcagcagcagcgagaccaacgcccagagattcggcaaccacatcagaaaggccctgctggacatcgccgacctgttccaggtgcccaaggcctacagctag

SEQ ID NO: 145815 - DNA, 2076 bp, Artificial Sequence
  derived and/or modified sequence
atggccgaggcccaccaggccgtggccttccagttcaccgtgacccccgacggcgtggacttcagactgagcagagaggccctgaagcacgtgtacctgagcggcatcaacagctggaagaagagactgatcagaatcaagaacggcatcctgagaggcgtgtaccccggcagccccaccagctggctggtggtgatcatggccaccgtgggcagcagcttctgcaacgtggacatcagcctgggcctggtgagctgcatccagagatgcctgccccagggctgcggcccctaccagaccccccagaccagagccctgctgagcatggccatcttcagcaccggcgtgtgggtgaccggcatcttcttcttcagacagaccctgaagctgctgctgtgctaccacggctggatgttcgagatgcacggcaagaccagcaacctgaccagaatctgggccatgtgcatcagactgctgagcagcagacaccccatgctgtacagcttccagaccagcctgcccaagctgcccgtgcccagagtgagcgccaccatccagagatacctggagagcgtgagacccctgctggacgacgaggagtactacagaatggagctgctggccaaggagttccaggacaagaccgcccccagactgcagaagtacctggtgctgaagagctggtgggccagcaactacgtgagcgactggtgggaggagtacatctacctgagaggcagaagccccctgatggtgaacagcaactactacgtgatggacctggtgctgatcaagaacaccgacgtgcaggccgccagactgggcaacatcatccacgccatgatcatgtacagaagaaagctggacagagaggagatcaagcccgtgatggccctgggcatcgtgcccatgtgcagctaccagatggagagaatgttcaacaccaccagaatccccggcaaggacaccgacgtgctgcagcacctgagcgacagcagacacgtggccgtgtaccacaagggcagattcttcaagctgtggctgtacgagggcgccagactgctgagcctgtacggcaaggccctgctgcacggcaactgctacaacagatggttcgacaagagcttcaccctgatcagcttcaagaacggccagctgggcctgaacgccgagcacgcctgggccgacgcccccatcatcggccacctgtgggagttcgtgctgggcaccgacagcttccacctgggctacaccgagaccggccactgcctgggcaagcccaaccccgccctggccccccccaccagactgcagtgggacatccccaagcagtgccaggccgtgatcgagagcagctaccaggtggccaaggccctggccgacgacgtggagctgtactgcttccagttcctgcccttcggcaagggcctgatcaagaagtgcagaaccagccccgacgccttcgtgcagatcgccctgcagctggcccacttcagagacagaggcaagttctgcctgacctacgaggccagcatgaccagaatgttcagagagggcagaaccgagaccgtgagaagctgcaccagcgagagcaccgccttcgtgcaggccatgatggagggcagccacaccaaggccgacctgagagacctgttccagaaggccgccaagaagcaccagaacatgtacagactggccatgaccggcgccggcatcgacagacacctgttctgcctgtacctggtgagcaagtacctgggcgtgagcagccccttcctggccgaggtgctgagcgagccctggagactgagcaccagccagatcccccagagccagatcagaatgttcgaccccgagcagcaccccaaccacctgggcgccggcggcggcttcggccccgtggccgacgacggctacggcgtgagctacatgatcgccggcgagaacaccatcttcttccacatcagcagcaagttcagcagcagcgagaccaacgcccagagattcggcaaccacatcagaaaggccctgctggacatcgccgacctgttccaggtgcccaaggcctacagctag

SEQ ID NO: 145816 - protein, 137 aa, Artificial Sequence
  derived and/or modified sequence
MPNFAGTWKMRSSENFDELLKALGVNAMLRKVAVAAASKPHVEIRQDGDQFYIKTSTTVRTTEINFKVGEGFEEETVDGRKCRSLATWENENKIHCTQTLLEGDGPKTYWTRELANDELILTFGADDVVCTRIYVRE

SEQ ID NO: 145817 - DNA, 414 bp, Artificial Sequence
  derived and/or modified sequence
atgcccaacttcgctggtacttggaaaatgcgcagttccgagaatttcgatgagctactcaaagccctcggggtgaacgcaatgctgagaaaagtcgccgtggctgctgcctccaaaccccatgttgagataagacaagacggcgatcagttctacataaagacaagcacgaccgtccgtacgaccgagatcaattttaaagtgggagaggggttcgaggaggagacggtggacggtcgcaagtgccgatccctggccacttgggaaaacgagaacaagattcattgtacacagactctcctcgaaggtgatgggcccaagacttactggacgcgcgagctggccaacgacgaactcatcctgacattcggagctgatgacgtcgtctgtactagaatatacgtgcgcgagtag

SEQ ID NO: 145818 - DNA, 414 bp, Artificial Sequence
  derived and/or modified sequence
atgcccaactttgctggcacctggaagatgaggagcagcgagaactttgatgagctgctgaaggccctgggcgtgaatgccatgctgaggaaggtggccgtggccgccgccagcaagccccacgtggagatccggcaggatggagaccagttctacatcaagaccagcaccaccgtgaggaccacagagatcaacttcaaggtgggggagggctttgaggaggagaccgtggatggcaggaaatgtcgcagcctggccacctgggagaatgaaaacaagatccactgcacccagaccctgctggagggagatggccccaagacctactggacccgggagctggccaatgatgagctgatcctgacctttggagcagatgatgtggtgtgcacccgcatctacgtgcgggagtag

SEQ ID NO: 145819 - DNA, 414 bp, Artificial Sequence
  derived and/or modified sequence
atgcccaacttcgccggcacctggaagatgcggagcagcgagaactttgacgagctacttaaagccctaggcgtgaacgctatgctccgaaaggtagccgtcgcggccgcatcaaaaccacacgtagaaataaggcaggatggcgatcagttctacattaaaacaagcactacagtgcggacaaccgagattaacttcaaagtaggcgaaggattcgaagaggagacagtggatgggcgcaagtgccgctctctggcaacttgggagaacgaaaacaagatccactgcacccaaaccctgcttgagggtgacggccccaaaacctactggacgagagaactggctaatgatgagttgattcttactttcggcgcagacgatgtggtttgtacgcgcatatacgttagagagtag

SEQ ID NO: 145820 - DNA, 414 bp, Artificial Sequence
  derived and/or modified sequence
atgcctaacttcgcgggaacctggaagatgaggtcgtcagagaatttcgacgaactgctgaaagccctgggagttaatgcaatgctgcgaaaggtcgcagtggcagccgcttctaaacctcacgtggaaatccgccaggatggagatcagttttacatcaaaacgtcaacaaccgtaaggactaccgagatcaacttcaaagtcggggaggggttcgaagaagagaccgtggacggcaggaaatgtagatctctggctacctgggaaaacgagaataaaatccattgcacacagaccctgctggagggcgacggccctaagacctactggacccgcgaactggctaatgatgagctgattctgactttcggcgcagatgacgtcgtgtgtaccagaatttatgtgcgtgagtag

SEQ ID NO: 145821 - DNA, 772 bp, Artificial Sequence
  derived and/or modified sequence
aaggcgcgcagcgctgggcgcaaagcgccagtctccgccttgcgagctcagagtgtgcccgctgcgccgccgctgtccgtacctgccgccgccgccaccgccaccatgcccaacttcgccggcacctggaagatgcgcagcagcgagaatttcgacgagctgctcaaggcactgggtgtgaacgccatgctgaggaaagtggccgtagcggctgcgtccaagccgcacgtggagatccgccaggacggggatcagttctacatcaagacatccaccacggtgcgcaccactgagatcaacttcaaggtcggagaaggctttgaggaggagaccgtggacggacgcaagtgcaggagtttagccacttgggagaatgagaacaagatccactgcacgcaaactcttcttgaaggggacggccccaaaacctactggacccgtgagctggccaacgatgaacttatcctgacgtttggcgccgatgacgtggtctgcaccagaatttatgtccgagagtgaaggcagctggcttgctcctactttcaggaagggatgcaggctcccctgaggaatatgtcatagttctgagctgccagtggaccgcccttttcccctaccaatattaggtgatcccgttttccccatgacaatgttgtagtgtcccccacccccaccccccaggccttggtgcctcttgtatccctagtgctccatagtttggcatttgcacggtttcgaagtcattaaactggttagacgtgtctcaaccttt

SEQ ID NO: 145822 - DNA, 414 bp, Artificial Sequence
  derived and/or modified sequence
atgcccaacttcgccggcacctggaagatgagaagcagcgagaacttcgacgagctgctgaaggccctgggcgtgaacgccatgctgagaaaggtggccgtggccgccgccagcaagccccacgtggagatcagacaggacggcgaccagttctacatcaagaccagcaccaccgtgagaaccaccgagatcaacttcaaggtgggcgagggcttcgaggaggagaccgtggacggcagaaagtgcagaagcctggccacctgggagaacgagaacaagatccactgcacccagaccctgctggagggcgacggccccaagacctactggaccagagagctggccaacgacgagctgatcctgaccttcggcgccgacgacgtggtgtgcaccagaatctacgtgagagagtag

SEQ ID NO: 145823 - protein, 2442 aa, Artificial Sequence
  derived and/or modified sequence
MAENLLDGPPNPKRAKLSSPGFSANDSTDFGSLFDLENDLPDELIPNGGELGLLNSGNLVPDAASKHKQLSELLRGGSGSSINPGIGNVSASSPVQQGLGGQAQGQPNSANMASLSAMGKSPLSQGDSSAPSLPKQAASTSGPTPAASQALNPQAQKQVGLATSSPATSQTGPGICMNANFNQTHPGLLNSNSGHSLINQASQGQAQVMNGSLGAAGRGRGAGMPYPTPAMQGASSSVLAETLTQVSPQMTGHAGLNTAQAGGMAKMGITGNTSPFGQPFSQAGGQPMGATGVNPQLASKQSMVNSLPTFPTDIKNTSVTNVPNMSQMQTSVGIVPTQAIATGPTADPEKRKLIQQQLVLLLHAHKCQRREQANGEVRACSLPHCRTMKNVLNHMTHCQAGKACQVAHCASSRQIISHWKNCTRHDCPVCLPLKNASDKRNQQTILGSPASGIQNTIGSVGTGQQNATSLSNPNPIDPSSMQRAYAALGLPYMNQPQTQLQPQVPGQQPAQPQTHQQMRTLNPLGNNPMNIPAGGITTDQQPPNLISESALPTSLGATNPLMNDGSNSGNIGTLSTIPTAAPPSSTGVRKGWHEHVTQDLRSHLVHKLVQAIFPTPDPAALKDRRMENLVAYAKKVEGDMYESANSRDEYYHLLAEKIYKIQKELEEKRRSRLHKQGILGNQPALPAPGAQPPVIPQAQPVRPPNGPLSLPVNRMQVSQGMNSFNPMSLGNVQLPQAPMGPRAASPMNHSVQMNSMGSVPGMAISPSRMPQPPNMMGAHTNNMMAQAPAQSQFLPQNQFPSSSGAMSVGMGQPPAQTGVSQGQVPGAALPNPLNMLGPQASQLPCPPVTQSPLHPTPPPASTAAGMPSLQHTTPPGMTPPQPAAPTQPSTPVSSSGQTPTPTPGSVPSATQTQSTPTVQAAAQAQVTPQPQTPVQPPSVATPQSSQQQPTPVHAQPPGTPLSQAAASIDNRVPTPSSVASAETNSQQPGPDVPVLEMKTETQAEDTEPDPGESKGEPRSEMMEEDLQGASQVKEETDIAEQKSEPMEVDEKKPEVKVEVKEEEESSSNGTASQSTSPSQPRKKIFKPEELRQALMPTLEALYRQDPESLPFRQPVDPQLLGIPDYFDIVKNPMDLSTIKRKLDTGQYQEPWQYVDDVWLMFNNAWLYNRKTSRVYKFCSKLAEVFEQEIDPVMQSLGYCCGRKYEFSPQTLCCYGKQLCTIPRDAAYYSYQNRYHFCEKCFTEIQGENVTLGDDPSQPQTTISKDQFEKKKNDTLDPEPFVDCKECGRKMHQICVLHYDIIWPSGFVCDNCLKKTGRPRKENKFSAKRLQTTRLGNHLEDRVNKFLRRQNHPEAGEVFVRVVASSDKTVEVKPGMKSRFVDSGEMSESFPYRTKALFAFEEIDGVDVCFFGMHVQEYGSDCPPPNTRRVYISYLDSIHFFRPRCLRTAVYHEILIGYLEYVKKLGYVTGHIWACPPSEGDDYIFHCHPPDQKIPKPKRLQEWYKKMLDKAFAERIIHDYKDIFKQATEDRLTSAKELPYFEGDFWPNVLEESIKELEQEEEERKKEESTAASETTEGSQGDSKNAKKKNNKKTNKNKSSISRANKKKPSMPNVSNDLSQKLYATMEKHKEVFFVIHLHAGPVINTLPPIVDPDPLLSCDLMDGRDAFLTLARDKHWEFSSLRRSKWSTLCMLVELHTQGQDRFVYTCNECKHHVETRWHCTVCEDYDLCINCYNTKSHAHKMVKWGLGLDDEGSSQGEPQSKSPQESRRLSIQRCIQSLVHACQCRNANCSLPSCQKMKRVVQHTKGCKRKTNGGCPVCKQLIALCCYHAKHCQENKCPVPFCLNIKHKLRQQQIQHRLQQAQLMRRRMATMNTRNVPQQSLPSPTSAPPGTPTQQPSTPQTPQPPAQPQPSPVSMSPAGFPSVARTQPPTTVSTGKPTSQVPAPPPPAQPPPAAVEAARQIEREAQQQQHLYRVNINNSMPPGRTGMGTPGSQMAPVSLNVPRPNQVSGPVMPSMPPGQWQQAPLPQQQPMPGLPRPVISMQAQAAVAGPRMPSVQPPRSISPSALQDLLRTLKSPSSPQQQQQVLNILKSNPQLMAAFIKQRTAKYVANQPGMQPQPGLQSQPGMQPQPGMHQQPSLQNLNAMQAGVPRPGVPPQQQAMGGLNPQGQALNIMNPGHNPNMASMNPQYREMLRRQLLQQQQQQQQQQQQQQQQQQGSAGMAGGMAGHGQFQQPQGPGGYPPAMQQQQRMQQHLPLQGSSMGQMAAQMGQLGQMGQPGLGADSTPNIQQALQQRILQQQQMKQQIGSPGQPNPMSPQQHMLSGQPQASHLPGQQIATSLSNQVRSPAPVQSPRPQSQPPHSSPSPRIQPQPSPHHVSPQTGSPHPGLAVTMASSIDQGHLGNPEQSAMLPQLNTPSRSALSSELSLVGDTTGDTLEKFVEGL

SEQ ID NO: 145824 - DNA, 10197 bp, Artificial Sequence
  derived and/or modified sequence
ctgcggggcgctgttgctgtggctgagatttggccgccgcctcccccacccggcctgcgccctccctctccctcggcgcccgcccgcccgctcgcggcccgcgctcgctcctctccctcgcagccggcagggcccccgacccccgtccgggccctcgccggcccggccgcccgtgcccggggctgttttcgcgagcaggtgaaaatggctgagaacttgctggacggaccgcccaaccccaaaagagccaaactcagctcgcccggtttctcggcgaatgacagcacagattttggatcattgtttgacttggaaaatgatcttcctgatgagctgatacccaatggaggagaattaggccttttaaacagtgggaaccttgttccagatgctgcttccaaacataaacaactgtcggagcttctacgaggaggcagcggctctagtatcaacccaggaataggaaatgtgagcgccagcagccccgtgcagcagggcctgggtggccaggctcaagggcagccgaacagtgctaacatggccagcctcagtgccatgggcaagagccctctgagccagggagattcttcagcccccagcctgcctaaacaggcagccagcacctctgggcccacccccgctgcctcccaagcactgaatccgcaagcacaaaagcaagtggggctggcgactagcagccctgccacgtcacagactggacctggtatctgcatgaatgctaactttaaccagacccacccaggcctcctcaatagtaactctggccatagcttaattaatcaggcttcacaagggcaggcgcaagtcatgaatggatctcttggggctgctggcagaggaaggggagctggaatgccgtaccctactccagccatgcagggcgcctcgagcagcgtgctggctgagaccctaacgcaggtttccccgcaaatgactggtcacgcgggactgaacaccgcacaggcaggaggcatggccaagatgggaataactgggaacacaagtccatttggacagccctttagtcaagctggagggcagccaatgggagccactggagtgaacccccagttagccagcaaacagagcatggtcaacagtttgcccaccttccctacagatatcaagaatacttcagtcaccaacgtgccaaatatgtctcagatgcaaacatcagtgggaattgtacccacacaagcaattgcaacaggccccactgcagatcctgaaaaacgcaaactgatacagcagcagctggttctactgcttcatgctcataagtgtcagagacgagagcaagcaaacggagaggttcgggcctgctcgctcccgcattgtcgaaccatgaaaaacgttttgaatcacatgacgcattgtcaggctgggaaagcctgccaagttgcccattgtgcatcttcacgacaaatcatctctcattggaagaactgcacacgacatgactgtcctgtttgcctccctttgaaaaatgccagtgacaagcgaaaccaacaaaccatcctggggtctccagctagtggaattcaaaacacaattggttctgttggcacagggcaacagaatgccacttctttaagtaacccaaatcccatagaccccagctccatgcagcgagcctatgctgctctcggactcccctacatgaaccagccccagacgcagctgcagcctcaggttcctggccagcaaccagcacagcctcaaacccaccagcagatgaggactctcaaccccctgggaaataatccaatgaacattccagcaggaggaataacaacagatcagcagcccccaaacttgatttcagaatcagctcttccgacttccctgggggccacaaacccactgatgaacgatggctccaactctggtaacattggaaccctcagcactataccaacagcagctcctccttctagcaccggtgtaaggaaaggctggcacgaacatgtcactcaggacctgcggagccatctagtgcataaactcgtccaagccatcttcccaacacctgatcccgcagctctaaaggatcgccgcatggaaaacctggtagcctatgctaagaaagtggaaggggacatgtacgagtctgccaacagcagggatgaatattatcacttattagcagagaaaatctacaagatacaaaaagaactagaagaaaaacggaggtcgcgtttacataaacaaggcatcttggggaaccagccagccttaccagccccgggggctcagccccctgtgattccacaggcacaacctgtgagacctccaaatggacccctgtccctgccagtgaatcgcatgcaagtttctcaagggatgaattcatttaaccccatgtccttggggaacgtccagttgccacaagcacccatgggacctcgtgcagcctccccaatgaaccactctgtccagatgaacagcatgggctcagtgccagggatggccatttctccttcccgaatgcctcagcctccgaacatgatgggtgcacacaccaacaacatgatggcccaggcgcccgctcagagccagtttctgccacagaaccagttcccgtcatccagcggggcgatgagtgtgggcatggggcagccgccagcccaaacaggcgtgtcacagggacaggtgcctggtgctgctcttcctaaccctctcaacatgctggggcctcaggccagccagctaccttgccctccagtgacacagtcaccactgcacccaacaccgcctcctgcttccacggctgctggcatgccatctctccagcacacgacaccacctgggatgactcctccccagccagcagctcccactcagccatcaactcctgtgtcgtcttccgggcagactcccaccccgactcctggctcagtgcccagtgctacccaaacccagagcacccctacagtccaggcagcagcccaggcccaggtgaccccgcagcctcaaaccccagttcagcccccgtctgtggctacccctcagtcatcgcagcaacagccgacgcctgtgcacgcccagcctcctggcacaccgctttcccaggcagcagccagcattgataacagagtccctaccccctcctcggtggccagcgcagaaaccaattcccagcagccaggacctgacgtacctgtgctggaaatgaagacggagacccaagcagaggacactgagcccgatcctggtgaatccaaaggggagcccaggtctgagatgatggaggaggatttgcaaggagcttcccaagttaaagaagaaacagacatagcagagcagaaatcagaaccaatggaagtggatgaaaagaaacctgaagtgaaagtagaagttaaagaggaagaagagagtagcagtaacggcacagcctctcagtcaacatctccttcgcagccgcgcaaaaaaatctttaaaccagaggagttacgccaggccctcatgccaaccctagaagcactgtatcgacaggacccagagtcattacctttccggcagcctgtagatccccagctcctcggaattccagactattttgacatcgtaaagaatcccatggacctctccaccatcaagcggaagctggacacagggcaataccaagagccctggcagtacgtggacgacgtctggctcatgttcaacaatgcctggctctataatcgcaagacatcccgagtctataagttttgcagtaagcttgcagaggtctttgagcaggaaattgaccctgtcatgcagtcccttggatattgctgtggacgcaagtatgagttttccccacagactttgtgctgctatgggaagcagctgtgtaccattcctcgcgatgctgcctactacagctatcagaataggtatcatttctgtgagaagtgtttcacagagatccagggcgagaatgtgaccctgggtgacgacccttcacagccccagacgacaatttcaaaggatcagtttgaaaagaagaaaaatgataccttagaccccgaacctttcgttgattgcaaggagtgtggccggaagatgcatcagatttgcgttctgcactatgacatcatttggccttcaggttttgtgtgcgacaactgcttgaagaaaactggcagacctcgaaaagaaaacaaattcagtgctaagaggctgcagaccacaagactgggaaaccacttggaagaccgagtgaacaaatttttgcggcgccagaatcaccctgaagccggggaggtttttgtccgagtggtggccagctcagacaagacggtggaggtcaagcccgggatgaagtcacggtttgtggattctggggaaatgtctgaatctttcccatatcgaaccaaagctctgtttgcttttgaggaaattgacggcgtggatgtctgcttttttggaatgcacgtccaagaatacggctctgattgcccccctccaaacacgaggcgtgtgtacatttcttatctggatagtattcatttcttccggccacgttgcctccgcacagccgtttaccatgagatccttattggatatttagagtatgtgaagaaattagggtatgtgacagggcacatctgggcctgtcctccaagtgaaggagatgattacatcttccattgccacccacctgatcaaaaaatacccaagccaaaacgactgcaggagtggtacaaaaagatgctggacaaggcgtttgcagagcggatcatccatgactacaaggatattttcaaacaagcaactgaagacaggctcaccagtgccaaggaactgccctattttgaaggtgatttctggcccaatgtgttagaagagagcattaaggaactagaacaagaagaagaggagaggaaaaaggaagagagcactgcagccagtgaaaccactgagggcagtcagggcgacagcaagaatgccaagaagaagaacaacaagaaaaccaacaagaacaaaagcagcatcagccgcgccaacaagaagaagcccagcatgcccaacgtgtccaatgacctgtcccagaagctgtatgccaccatggagaagcacaaggaggtcttcttcgtgatccacctgcacgctgggcctgtcatcaacaccctgccccccatcgtcgaccccgaccccctgctcagctgtgacctcatggatgggcgcgacgccttcctcaccctcgccagagacaagcactgggagttctcctccttgcgccgctccaagtggtccacgctctgcatgctggtggagctgcacacccagggccaggaccgctttgtctacacctgcaacgagtgcaagcaccacgtggagacgcgctggcactgcactgtgtgcgaggactacgacctctgcatcaactgctataacacgaagagccatgcccataagatggtgaagtgggggctgggcctggatgacgagggcagcagccagggcgagccacagtcaaagagcccccaggagtcacgccggctgagcatccagcgctgcatccagtcgctggtgcacgcgtgccagtgccgcaacgccaactgctcgctgccatcctgccagaagatgaagcgggtggtgcagcacaccaagggctgcaaacgcaagaccaacgggggctgcccggtgtgcaagcagctcatcgccctctgctgctaccacgccaagcactgccaagaaaacaaatgccccgtgcccttctgcctcaacatcaaacacaagctccgccagcagcagatccagcaccgcctgcagcaggcccagctcatgcgccggcggatggccaccatgaacacccgcaacgtgcctcagcagagtctgccttctcctacctcagcaccgcccgggacccccacacagcagcccagcacaccccagacgccgcagccccctgcccagccccaaccctcacccgtgagcatgtcaccagctggcttccccagcgtggcccggactcagccccccaccacggtgtccacagggaagcctaccagccaggtgccggcccccccacccccggcccagccccctcctgcagcggtggaagcggctcggcagatcgagcgtgaggcccagcagcagcagcacctgtaccgggtgaacatcaacaacagcatgcccccaggacgcacgggcatggggaccccggggagccagatggcccccgtgagcctgaatgtgccccgacccaaccaggtgagcgggcccgtcatgcccagcatgcctcccgggcagtggcagcaggcgccccttccccagcagcagcccatgccaggcttgcccaggcctgtgatatccatgcaggcccaggcggccgtggctgggccccggatgcccagcgtgcagccacccaggagcatctcacccagcgctctgcaagacctgctgcggaccctgaagtcgcccagctcccctcagcagcaacagcaggtgctgaacattctcaaatcaaacccgcagctaatggcagctttcatcaaacagcgcacagccaagtacgtggccaatcagcccggcatgcagccccagcctggcctccagtcccagcccggcatgcaaccccagcctggcatgcaccagcagcccagcctgcagaacctgaatgccatgcaggctggcgtgccgcggcccggtgtgcctccacagcagcaggcgatgggaggcctgaacccccagggccaggccttgaacatcatgaacccaggacacaaccccaacatggcgagtatgaatccacagtaccgagaaatgttacggaggcagctgctgcagcagcagcagcaacagcagcagcaacaacagcagcaacagcagcagcagcaagggagtgccggcatggctgggggcatggcggggcacggccagttccagcagcctcaaggacccggaggctacccaccggccatgcagcagcagcagcgcatgcagcagcatctccccctccagggcagctccatgggccagatggcggctcagatgggacagcttggccagatggggcagccggggctgggggcagacagcacccccaacatccagcaagccctgcagcagcggattctgcagcaacagcagatgaagcagcagattgggtccccaggccagccgaaccccatgagcccccagcaacacatgctctcaggacagccacaggcctcgcatctccctggccagcagatcgccacgtcccttagtaaccaggtgcggtctccagcccctgtccagtctccacggccccagtcccagcctccacattccagcccgtcaccacggatacagccccagccttcgccacaccacgtctcaccccagactggttccccccaccccggactcgcagtcaccatggccagctccatagatcagggacacttggggaaccccgaacagagtgcaatgctcccccagctgaacacccccagcaggagtgcgctgtccagcgaactgtccctggtcggggacaccacgggggacacgctagagaagtttgtggagggcttgtagcattgtgagagcatcaccttttccctttcatgttcttggaccttttgtactgaaaatccaggcatctaggttctttttattcctagatggaactgcgacttccgagccatggaagggtggattgatgtttaaagaaacaatacaaagaatatatttttttgttaaaaaccagttgatttaaatatctggtctctctctttggtttttttttggcgggggggtggggggggttcttttttttccgttttgtttttgtttggggggaggggggttttgtttggattctttttgtcgtcattgctggtgactcatgcctttttttaacgggaaaaacaagttcattatattcatattttttatttgtattttcaagactttaaacatttatgtttaaaagtaagaagaaaaataatattcagaactgattcctgaaataatgcaagcttataatgtatcccgataactttgtgatgtttcgggaagatttttttctatagtgaactctgtgggcgtctcccagtattaccctggatgataggaattgactccggcgtgcacacacgtacacacccacacacatctatctatacataatggctgaagccaaacttgtcttgcagatgtagaaattgttgctttgtttctctgataaaactggttttagacaaaaaatagggatgatcactcttagaccatgctaatgttactagagaagaagccttcttttctttcttctatgtgaaacttgaaatgaggaaaagcaattctagtgtaaatcatgcaagcgctctaattcctataaatacgaaactcgagaagattcaatcactgtatagaatggtaaaataccaactcatttcttatatcatattgttaaataaactgtgtgcaacagacaaaaagggtggtccttcttgaattcatgtacatggtattaacacttagtgttcggggttttttgttatgaaaatgctgttttcaacattgtatttggactatgcatgtgttttttccccattgtatataaagtaccgcttaaaattgatataaattactgaggtttttaacatgtattctgttctttaagatccctgtaagaatgtttaaggtttttatttatttatatatattttttgagtctgttctttgtaagacatggttctggttgttcgctcatagcggagaggctggggctgcggttgtggttgtggcggcgtgggtggtggctgggaactgtggcccaggcttagcggccgcccggaggcttttcttcccggagactgaggtgggcgactgaggtgggcggctcagcgttggccccacacattcgaggctcacaggtgattgtcgctcacacagttagggtcgtcagttggtctgaaactgcatttggcccactcctccatcctccctgtccgtcgtagctgccacccccagaggcggcgcttcttcccgtgttcaggcggctccccccccccgtacacgactcccagaatctgaggcagagagtgctccaggctcgcgaggtgctttctgacttccccccaaatcctgccgctgccgcgcagcatgtcccgtgtggcgtttgaggaaatgctgagggacagacaccttggagcaccagctccggtccctgttacagtgagaaaggtcccccacttcgggggatacttgcacttagccacatggtcctgcctcccttggagtccagttccaggctcccttactgagtgggtgagacaagttcacaaaaaccgtaaaactgagaggaggaccatgggcaggggagctgaagttcatcccctaagtctaccacccccagcacccagagaacccactttatccctagtcccccaacaaaggctggtctaggtgggggtgatggtaattttagaaatcacgccccaaatagcttccgtttgggcccttacattcacagataggttttaaatagctgaatacttggtttgggaatctgaattcgaggaacctttctaagaagttggaaaggtccgatctagttttagcacagagctttgaaccttgagttataaaatgcagaataattcaagtaaaaataagaccaccatctggcacccctgaccagcccccattcaccccatcccaggaggggaagcacaggccgggcctccggtggagattgctgccactgctcggcctgctgggttcttaacctccagtgtcctcttcatcttttccacccgtagggaaaccttgagccatgtgttcaaacaagaagtggggctagagcccgagagcagcagctctaagcccacactcagaaagtggcgccctcctggttgtgcagccttttaatgtgggcagtggaggggcctctgtttcaggttatcctggaattcaaaacgttatgtaccaacctcatcctctttggagtctgcatcctgtgcaaccgtcttgggcaatccagatgtcgaaggatgtgaccgagagcatggtctgtggatgctaaccctaagtttgtcgtaaggaaatttctgtaagaaacctggaaagccccaacgctgtgtctcatgctgtatacttaagaggagaagaaaaagtcctatatttgtgatcaaaaagaggaaacttgaaatgtgatggtgtttataataaaagatggtaaaactacttggattcaaa

SEQ ID NO: 145825 - DNA, 7329 bp, Artificial Sequence
  derived and/or modified sequence
atggccgagaaccttcttgatggtccccccaacccaaagcgagccaaattgtcctcccctggcttcagtgctaacgacagcaccgatttcggttctctatttgacctggagaatgatctaccggatgagctgatcccaaatggaggagaactcggacttttgaacagcggaaacctggtccccgatgccgcctctaagcacaagcagctgagcgagctacttaggggcggatcagggagttcaatcaatcccggcatcgggaatgtgagtgcaagctcccctgtgcagcagggccttggaggtcaagcccaaggccaaccgaacagtgccaacatggcatccttgagcgctatggggaaatccccactcagccagggcgacagctcagccccttctctgcccaagcaggctgctagcactagtggccccactccagcagcctcccaggcgctgaaccctcaagcccagaaacaggttggtttggccacatctagccccgctaccagtcaaacgggcccaggcatctgcatgaacgcgaatttcaaccagacccacccggggctgctgaattcaaacagcggccacagcctgatcaaccaggcgagtcagggccaagcacaagtgatgaatggcagcctaggcgccgctggccgaggacggggtgccgggatgccgtatccaactcccgccatgcaaggggcctccagcagtgttctcgctgagaccttgacacaagtgtctcctcaaatgacagggcatgctgggctgaatacagcacaagccgggggtatggctaagatggggattacaggtaacaccagcccattcggacagccattctctcaagctggcggccagcccatgggcgccaccggcgtaaacccacagttagccagcaaacagagtatggtaaactcactgcccacctttcccaccgatatcaagaacacgtctgttaccaatgtccccaatatgtctcaaatgcaaaccagtgttggaatcgtgcccacccaggcaatcgctacaggaccaactgcagatcccgaaaaaaggaaacttattcagcaacagctcgttctgttactgcatgcgcataagtgccagaggagggaacaggccaatggcgaggtcagagcttgttctctccctcactgtcgcactatgaagaatgtgctgaatcatatgacacattgccaggctggaaaggcttgccaggttgcccactgcgcttcatcccgccagattatttcccactggaagaattgcacaaggcacgactgcccagtgtgtctgcccctgaagaacgcatcggataaacggaatcagcaaaccatactgggatcgcctgccagcggcatccagaacacaatcggaagcgtaggtaccgggcagcagaacgccacttcgctcagcaaccccaaccccattgatcctagtagcatgcagcgcgcctacgccgccctcggtctaccttacatgaaccagccacagactcagctccagcctcaggtcccagggcagcagcctgctcagccccaaacacaccagcaaatgcgcaccctgaatcctttgggtaataacccaatgaacatacccgctggagggatcacgactgaccagcagcccccaaatctgatctccgagagtgctcttcccacaagcctgggagcaacgaatcccctgatgaatgatggcagtaatagcggcaatataggtactctgagtacaatacctaccgcagcgcccccatctagtaccggggtgcggaagggctggcatgagcacgtcacccaggatctcaggtctcacctcgtacataaactggttcaggccatattccctacgcccgatcctgccgccttgaaggaccggaggatggagaatctcgttgcctacgccaaaaaggtggagggcgacatgtatgagtcagccaactcccgcgacgagtactatcacctcctggcagaaaagatctataaaatccaaaaagaactggaagagaaacggaggagtcggttgcacaaacagggtattctggggaatcagcccgccctaccagcaccaggcgcccagcctccggtgataccgcaggcacagccggtacgccctcctaacgggcccctgagtctgccggtgaatagaatgcaagtgagtcagggcatgaattcctttaatcccatgagcctgggcaatgtacaactgccacaggcgcccatgggaccacgtgcagccagcccaatgaatcactctgttcagatgaatagcatgggctccgtcccaggaatggctatttcaccatccaggatgccccaaccaccaaacatgatgggcgcccacacaaacaacatgatggcgcaggcaccagcccagtcacagtttctgcctcagaatcagttcccaagcagctctggcgcaatgtccgtcggcatgggtcagcctcccgctcagaccggggtcagccagggacaagtcccgggtgccgccctgcccaaccccctaaatatgctagggccccaagcctcccaactgccttgccccccagttactcagtctcccctgcaccctaccccccctcccgcgtctacagctgccggcatgccctctctgcagcatacgaccccccctgggatgaccccacctcagcccgcagcacctactcagcccagcacacctgtctcctcatctggacagacccctacgcccacaccaggctcagtcccctctgcaactcagactcagagcacgccaacggtgcaagccgccgctcaggctcaggtaacaccccagcctcaaactccggtgcagccgccttctgtggctactcctcagtctagccagcagcagcccactcccgtgcacgcgcaacctccaggtacacccttaagtcaggccgctgcaagtatcgataacagagttccaactccatcatccgtggctagcgccgaaaccaacagccaacagcccggaccagacgttccggttctggagatgaagactgaaacgcaggcggaagacacagaaccagatcctggtgagagcaagggcgagccccgctccgagatgatggaagaggatctgcagggggcatcacaagttaaggaagagactgatatcgctgaacagaaatcggagcccatggaagtggatgagaagaagcctgaagtgaaggtggaggtgaaggaagaagaagaaagctccagtaacgggactgcttctcaatccacttctccttcccagcccagaaagaagatattcaagcctgaagaacttaggcaggcgctgatgcctactttggaagccttataccgccaggatccggaaagcctcccatttaggcaaccagtggatcctcagctgctaggaatcccagattattttgacatagtgaagaatcctatggacctttcaactattaagagaaaactcgacacaggtcagtatcaggagccctggcaatacgtggacgatgtgtggctcatgtttaataacgcttggctatacaacaggaaaaccagtagggtgtacaagttttgcagcaagctggccgaggtgttcgagcaggagattgatccagtcatgcaatcactgggttactgctgtggccgcaagtacgagttctccccacagactctctgttgctacgggaagcagctgtgcaccataccacgcgacgcggcctactactcataccaaaaccgctaccacttttgtgagaagtgcttcaccgagattcagggtgaaaatgtcaccctgggagacgatccatctcaacctcagactacaatcagcaaggatcagtttgaaaaaaaaaagaatgacacacttgatccagagccttttgtggattgtaaagagtgcggccgtaagatgcaccagatctgtgtgcttcattatgacattatctggcctagtggcttcgtttgcgataattgtctgaagaaaaccggccggccccgcaaagagaataagttctctgcaaagaggctacagacaaccagattaggtaaccatcttgaagaccgcgttaataagtttttacgcagacagaaccatcctgaagctggggaggtcttcgtgcgggtcgtggcaagctctgataagacggtggaggtcaaaccaggaatgaaatctaggttcgttgacagcggggaaatgagcgaaagctttccttatcgcaccaaggcactctttgcttttgaggagatcgacggcgtggacgtgtgcttcttcggcatgcacgttcaggaatatggatccgattgccctccccccaatactcggcgggtgtacattagttacctggacagcatccacttcttccgcccgcgatgcctgcgaacagcggtgtatcatgaaattcttatcggctatctcgagtacgtaaaaaagctcggatatgtgacaggacatatctgggcttgtccgccctccgagggggacgattatatctttcactgtcaccctcctgaccagaagatccccaaaccgaagaggttgcaggaatggtacaagaaaatgttagataaggccttcgctgaaaggatcattcatgattataaggatatcttcaaacaggctacagaagataggcttacatcagcaaaggaactgccttacttcgaaggtgatttctggcccaacgttctggaagagagtataaaggagctggagcaggaagaagaggagaggaagaaggaggagtcgacagccgcctccgaaacgactgagggctctcagggcgacagcaagaatgcaaaaaaaaagaacaacaagaaaactaataagaataagagctctatttcacgggccaataagaaaaagccgtcaatgcccaacgtgtccaacgacctgtcccagaagctttacgccacgatggaaaaacataaggaggtattttttgttattcacctgcacgccggcccagtgattaacaccctcccccccatcgtggaccctgaccctctccttagttgcgacctcatggacggacgggacgcgttcttgaccctagcccgggataaacactgggagttttcttcccttagaaggtccaagtggtctactctgtgcatgttggttgaactccatacacagggccaggaccgatttgtctacacatgcaacgagtgcaaacaccacgtcgaaaccaggtggcactgtacagtctgcgaagactacgacctgtgcattaactgctataacacaaagtcccatgcacacaaaatggtcaagtggggcctgggcctagatgacgagggaagctcacagggcgagcctcagtcaaagagcccccaggaaagtcggcggttatctatccagcgttgcattcagtctttggtgcatgcgtgccaatgtagaaacgccaactgtagcctcccgtcgtgtcagaaaatgaagagggtggtgcaacacactaaggggtgcaaaagaaagaccaacggtggatgtcccgtgtgtaaacagctcattgcgctgtgttgttaccacgctaagcattgccaggagaataaatgccccgttcccttctgtctgaacattaagcacaaactgcggcagcagcagattcaacatagactgcaacaagcccaacttatgcgacgtaggatggccaccatgaacacgcgcaatgtgccacagcagtccttgccaagccccacatccgccccacctggaactccaacacagcagccatcgacccctcagaccccccagccccctgcacagcctcagccttcccctgtttccatgagtcctgctggctttccctccgtggcccgcacccagccgccaactacagtgtctacaggcaagcctacctctcaagtcccagccccaccacctcccgctcagccaccaccggccgcagtcgaagccgctcggcagatcgagcgtgaggcccagcaacagcagcatctataccgggtcaacattaataactcaatgcctccagggcgtaccggcatgggcacacccgggagccagatggctcctgtgagtctcaatgtccctaggcccaatcaagtgagcggcccagtaatgcctagcatgccaccaggacagtggcagcaggcacctttgcctcagcagcagccaatgccgggactaccacgccctgtcattagtatgcaggcccaggcagcagtggcagggccccggatgcctagcgttcagccccctagaagcattagcccttctgccttgcaagacctgctccggaccctgaagtctccctcatctccacaacagcagcagcaggtgctgaacatcttgaagtcgaacccgcaactcatggccgccttcatcaagcaaaggaccgctaagtacgtggccaaccagcctggcatgcagccccagccaggactacagtcccagccagggatgcaaccacagcccgggatgcaccaacagccctcactccaaaacctgaatgctatgcaggccggcgtacccagaccaggcgtacccccccagcagcaggccatgggaggattgaatcctcagggacaagcgctgaacattatgaatccagggcacaaccccaatatggcttccatgaatcctcagtatcgcgaaatgcttcggcggcagcttctgcaacagcagcagcaacaacagcagcagcagcagcagcaacagcagcagcagcagggcagtgctggcatggccggagggatggctgggcatggccaatttcagcagccccagggacctggtggctaccccccggccatgcaacaacagcagcggatgcagcagcatcttcccctgcagggaagttcaatgggacagatggccgctcaaatgggacagcttgggcagatgggccagccgggccttggggccgacagtacaccgaacatccagcaggcccttcagcagcggatacttcaacagcagcagatgaaacagcagataggctcacccgggcaaccaaatccaatgtccccccagcagcacatgctgtcgggacaaccgcaagcaagccatctgcctggtcagcagattgctactagtttatccaatcaggtaaggtctcccgccccagtacagtctcctcggccacagtcacagcctcctcactcatcaccctccccccggatccagcctcagcctagcccgcaccacgtgtccccacagaccgggagcccgcaccccggactcgctgttactatggcatcctctattgatcagggtcatctgggtaaccctgagcaaagcgccatgctgccacagttaaacaccccatcccgctctgcattaagctctgaactttcactagtgggtgataccactggcgacaccctggaaaagttcgtagagggtttgtag

SEQ ID NO: 145826 - DNA, 7215 bp, Artificial Sequence
  derived and/or modified sequence
atggccgagaacctgctcgacggcccgccaaacccaaaaagggccaaactctcatcccccgggttctctgctaacgactccaccgacttcggtagtctgtttgatcttgagaatgatctccccgatgagcttatccctaatggaggggagttgggcctcctgaattccggtaaccttgtgccagacgcagcctctaaacacaagcaactcagtgaactgctgcggggtggcagtggttcaagcataaatcccggaatcggaaacgtgagtgcatccagccccgttcagcagggcctcggcggccaggcgcaagggcagccaaattctgctaatatggcgtctttgtcagctatgggcaagtcgcctctgtctcagggagattcctccgccccctctctgcctaaacaggcagcttccacttcgggtccgacacctgcagcctctcaagccctaaatccgcaagcccagaagcaggttggtctggctacaagctcccccgccacatcacagacgggtcccgggatctgtatgaatgccaatttcaaccagacccatccgggactcctgaatagcaatagcggccactcactaattaaccaggcctcacagggccaggcccaggtgatgaacggttctttaggcgccgcgggccgcggccgaggggcaggaatgccttatcctacccctgctatgcagggcgcgagcagctctgtcctggcggagacgcttactcaggtttctccacagatgacagggcacgcaggcctgaatacagctcaagctggaggcatggcaaagatgggtatcaccgggaatacatcaccctttggccagccgttcagccaagctggtggtcagccaatgggggctaccggagtgaatccacaactggcgtccaaacagtccatggttaatagcctgccgaccttccccaccgatatcaagaacacctcagtcaccaatgtgcccaatatgtcccaaatgcagaccagtgtggggattgtgccaacgcaggctatcgcaaccgggcccactgccgatccggaaaagcgaaaactcatccagcaacaactggttctgctcctgcacgcacacaagtgccagagaagggaacaggccaacggtgaggtgcgggcatgttctcttccacactgccgaactatgaaaaacgtactgaatcacatgactcattgccaggccggaaaagcctgtcaggctatcctgggtagtcctgcctcagggatacagaacaccatcggctcggtggggacaggccaacagaacgccacgtcactgtccaatccaaacccaattgatccaagctctatgcagcgcgcctatgctgccttaggtctcccttacatgaatcaacctcagacacagctgcagcctcaagtacccggacagcaaccagctcagccgcagacccaccagcagatgcgtacactgaatccactggggaacaatccgatgaatatacctgcaggtggcatcaccacggatcagcagcctccaaacttaatttccgagtccgcgctgccaacaagcctgggcgccactaaccccctgatgaacgatggctctaacagtggcaacatcgggaccttatctaccattcccactgccgctcctccatcatccaccggggttcggaaagggtggcatgagcacgtcacacaggacctccgcagtcacctggtacacaaactggttcaggcgatcttccctacgcctgaccctgctgctctgaaggacaggcgcatggagaacctggtggcatacgccaagaaggtcgaaggcgatatgtatgaaagcgctaacagccgggacgaatactatcacctcctggcggaaaagatttacaagatccaaaaggagttggaggagaaacgtcgaagcagattgcataagcagggcatcctcggaaatcagcccgcattgcctgccccaggcgctcagccacctgtgattccccaagcccagcccgtaaggcccccaaatggacctctttctctgcccgtcaaccggatgcaagtctcccagggaatgaattcgttcaatccaatgtccctcgggaacgtacagctgccacaggcgcctatgggcccacgggccgctagtccaatgaaccacagcgtacaaatgaatagcatgggctctgtccctggcatggcgatctcaccttctcgtatgcctcagcctcccaacatgatgggcgcccataccaacaatatgatggctcaagcaccagctcaatcccagttcctaccccagaatcagtttcctagctcaagtggggccatgtcagtcggaatgggccagccacctgcccagacaggagtcagccagggtcaggtgcccggagctgctctacccaaccccctgaatatgctggggccccaggcttcccaactcccttgtccccctgtgacacagtcccctcttcacccgacgcctccaccagcctctacagccgcagggatgccgagtctgcagcacaccacacctcccgggatgacacccccacagccagccgcccccacccagccgtccacccctgtcagctcctcaggccagacgcccactcccactccaggaagtgtgccatccgccactcagacccagagcaccccgaccgtccaagccgcagcgcaggctcaggtgacaccccaaccacaaaccccagttcagcctccgtcagtggcaacccctcaatctagccagcagcaacctactcctgtgcatgcacagccaccggggacacctctgagccaggccgctgcatcaatcgacaatcgagtaccgacaccctctagtgtggcctctgccgagactaatagtcagcagcccgggcctgatgtgcccgtgctagagatgaagaccgaaacccaggccgaggacacagagcctgatcctggagagtccaagggcgaaccccgttccgagatgatggaggaggacctgcagggcgctagccaggtcaaggaggagacagatatcgccgagcagaagtcggaacccatggaggtagatgagaagaagccagaggtgaaggtcgaggtgaaagaagaagaggagtctagttccaacggcactgcttctcagtcaacaagtccgagtcaaccccggaagaaaatttttaagccagaagagctcagacaggccctgatgccgacgctcgaagctctgtataggcaggatcctgaatctctgccctttcgacaacccgtggatcctcagcttcttggcatcccagactacttcgacattgttaagaaccctatggacctgtccacaataaaaaggaaattagataccggccagtatcaggagccctggcagtacgtggacgatgtgtggcttatgttcaacaatgcctggctctacaatcgcaaaacctccagggtgtacaaattctgttcaaaattagcagaggtgttcgaacaagagattgaccctgtcatgcaaagtcttgggtattgctgcgggaggaaatacgagttctccccacagaccctgtgctgttatggtaaacaactgtgcaccatcccaagagatgctgcttactattcctaccagaaccgttatcatttctgcgagaagtgctttacagagattcagggcgagaacgttactctaggtgacgatccgtcgcaaccgcagacgaccatctccaaggatcagttcgagaagaagaagaatgatacactggaccctgaaccctttgttgattgtaaggaatgtgggcgaaagatgcatcaaatctgcgtcctgcattatgatatcatctggccctcaggttttgtgtgtgacaactgtttgaaaaagacaggccggccccggaaagagaataaatttagcgccaaaagactgcagaccactcgcctgggcaaccatctcgaagaccgggtgaataaattcttgcgccggcagaaccatcctgaagctggggaagttttcgtccgcgtcgttgcctcaagcgacaaaactgtcgaggtcaagccagggatgaaatcccgcttcgtggactccggcgaaatgtcggagtccttcccataccgcaccaaagcgcttttcgccttcgaagagattgatggcgtggacgtgtgttttttcggtatgcacgttcaagaatatggcagcgattgcccgccccccaatacgaggcgtgtctacatctcatacctggacagcatccatttctttcgacctcggtgccttaggacggcagtgtaccacgaaattctgatcgggtaccttgaatacgtcaagaagctggggtatgttactggtcatatatgggcatgcccacctagtgaaggcgacgactacatctttcactgccacccccccgaccagaagatccccaagcccaagcggcttcaggagtggtataagaagatgctggataaagcatttgccgagcgtatcatacatgactataaggatatctttaaacaggcaaccgaagaccggctgacctcggctaaggagcttccatatttcgaaggcgatttttggccaaatgtacttgaagaaagcattaaagagctggagcaggaagaggaggaaagaaagaaagaagagtccaccgcggcctccgagaccacggagggatcacagggtgatagtaagaatgctaagaagaagaataacaaaaagacaaacaaaaacaagtcaagcatcagcagagcaaataagaagaaaccatcaatgcccaacgtgagcaacgacctctcacagaagctttatgctaccatggagaagcacaaagaagtgttcttcgtcatacacctccacgctggaccagttattaacacactccctcccatagtagatccagaccctctcctgtcgtgcgatctcatggatggtagagacgcattcctgacattggctcgcgacaaacattgggagttcagtagcctaaggcgctcaaaatggtcaaccttgtgtatgttggtagagttgcacacacaggggcaggatcggtttgtttacacttgcaacgaatgtaaacaccacgtcgaaacacgctggcattgcaccgtttgtgaagactatgacctatgtattaactgttacaataccaagtcacacgctcataaaatggtcaaatggggacttggcctcgatgacgaaggatcctcgcagggcgaaccccagtctaaatctcctcaagaaagccggagattatccatccaaaggtgtatccagtccctcgttcatgcctgtcagtgtagaaatgctaattgctctctgccttcgtgccaaaaaatgaaacgtgtcgttcaacacactaagggctgcaaacgcaagaccaacggtggatgccccgtgtgcaaacagttgattgccttgtgttgctaccacgctaagcattgccaggaaaataaatgcccggtgccgttctgtttgaatattaagcacaagctccgacagcagcagattcaacatcggctgcagcaggcccaactcatgaggagacgcatggcaacaatgaatacccgcaatgtgcctcaacaatccctgccaagtccgacaagcgccccaccaggcactccaactcagcagccctctaccccgcagacacctcaacccccagctcaaccgcaaccgtccccggtgtccatgtctcctgcaggcttccccagcgtagccaggacccaaccgccgaccactgtgagtaccggtaagcccacctctcaggtacccgctcccccacccccagcacagcccccaccagctgccgtggaggccgctcgtcagatcgagagagaggctcagcagcagcagcacctgtatcgagtcaatattaataacagcatgcctcccgggcgcactggcatgggaactcctggttcgcagatggcccctgtgagcctgaacgtacctaggcccaatcaggtctccggacccgtcatgccttccatgcccccaggccagtggcagcaagcaccgctaccccagcagcagcctatgcctggcctgcccaggcctgtcattagcatgcaggcacaggcagccgtcgccgggcctcgcatgcctagcgtgcagccacctcgcagcatttccccaagcgccctccaggatcttttgcgcaccttgaagtcaccctcttccccgcaacaacagcaacaagtgttgaacattttgaagagtaatcctcaattgatggccgcatttatcaagcagaggaccgccaagtacgttgctaatcagcccgggatgcaacctcagccagggcttcagtcacagcccgggatgcagccacagccgggtatgcaccagcagccctctcttcagaatttaaacgccatgcaagcaggcgtgcctcgcccgggtgtgcctcctcaacagcaagcgatgggcggactgaacccccaggggcaggctttgaatataatgaacccaggacacaacccaaacatggcaagtatgaatccacagtacagggagatgcttaggcgtcaactcctccagcagcagcagcaacagcaacagcagcagcagcagcagcagcagcagcagcagggaagcgccggcatggccggcggtatggctgggcatggccagtttcagcagccacagggaccaggtggctatccacctgcgatgcaacagcaacagagaatgcagcagcatctaccactgcaggggtcatcaatgggtcaaatggccgcccagatgggccaattgggccaaatgggtcagcctggcctgggcgccgattctactccgaacatacagcaggcacttcagcaaaggatcctccagcaacagcaaatgaaacagcagataggctctcctggacaaccaaatcccatgtccccccagcagcatatgctttccggccagcctcaagcaagccatctgccaggacaacagatagccacatccctcagtaaccaagtgcgctccccagcccctgtgcagtcgcctcgaccccagtcacagccccctcactcctctccttctccacgaatacagccccagccaagtccccaccacgtctccccccagacgggcagtccacaccccggactcgcggtgacaatggcgtctagcatcgaccagggccatctaggaaaccccgagcaaagtgcaatgctgccacagctcaataccccttcaaggagcgccctgagctcagagctgagcctggtgggtgacacaaccggtgatacactggaaaaatttgttgagggtctgtag

SEQ ID NO: 145827 - DNA, 7419 bp, Artificial Sequence
  derived and/or modified sequence
ctccgaggcgctgttgccgtggccgagatctggccacctcctcctcccccaggattgagacctccctccccaagcgcccccgccaggcccctggctgctcgggcccgctcatcaccttcccagcccgcagggccacctactcctgttagagcgctcgcgggtcctgccgctcgcgctagagggtgcttccgggagcaggtgaaaatggccgagaatttgctggatgggccccccaaccctaaaagagctaagctgtcctccccaggcttcagcgccaatgattccacagacttcgggtctctgttcgatctcgaaaacgatctgcccgacgagctgatcccaaacggcggtgaactggggctgctcaattcaggcaacctagtacctgacgccgcctcaaagcacaagcagctgtctgaacttcttcgggggggatcgggatcttcaatcaacccgggcatcggtaacgtgagcgcaagcagcccagttcagcaaggcttggggggccaggcgcagggtcaacctaattccgccaacatggcctccctgagtgccatgggaaagtctcccctgtcccaaggcgactcctctgctcctagtctaccaaagcaggcagcttctacaagtggtcccactcctgctgcgtcacaggctctgaacccgcaagcccagaagcaggtgggactggccacatcctccccagccacatctcagaccggcccgggtatttgtatgaacgctaacttcaaccaaactcatcccggtttactgaatagcaactcaggacactctcttatcaaccaagcttcccaggggcaagctcaggtgatgaatgggtctctgggcgcagctggccggggcagaggggccgggatgccttatcccactccagctatgcagggcgctagctcctccgtgctggcggaaaccctaactcaagtctcacctcaaatgactgggcacgctggcctcaacacagcacaggccggcggtatggcgaaaatggggatcacaggcaacacaagccctttcggtcagccttttagccaggctgggggtcagccaatgggagctacaggagtcaatccccagctggcaagcaaacagagcatggtaaatagcctgcccaccttccccactgacataaagaacacatctgtgaccaatgtgcctaatatgtcccagatgcagacatctgtcggaatcgtgccaacgcaggccattgccacaggccctactgccgaccctgagaagcgcaaacttatccagcaacagctcgtcttgctactgcacgctcataaatgtcaacgcagagagcaagccaatggtgaggtgcgggcatgttccctgccccactgcagaacaatgaaaaatgtgctcaatcatatgacccattgccaagccggcaaagcctgccaggccattctagggtcccccgcttcaggtattcagaacacaattggcagcgtcggcaccggccagcaaaacgcaacatccctctcgaatcctaacccaatcgacccgtcttccatgcagcgcgcctatgctgccctcgggctcccttacatgaatcagccccagacacagttgcaaccccaagtgccgggccagcaacccgcccagccccagacgcaccagcagatgagaaccctcaaccccctcggtaacaacccaatgaacatcccagcaggggggatcaccactgaccagcaacctccaaatctgatctctgagagtgcgctgccaacgagtctcggcgctacaaatcccctgatgaatgacgggtcaaatagtgggaatattggaaccctgagcactatccccactgccgcgcccccaagctccacaggagtgagaaaagggtggcacgaacatgtgacacaggatctgcgctctcacctggtgcacaagctcgtgcaggctatttttcctacccccgaccctgccgccctgaaggacagaagaatggaaaatctggtagcgtacgctaagaaggtggaaggtgacatgtatgagtcagccaatagtagagatgaatattaccacctgttggccgagaaaatctataagatacaaaaggagctagaagaaaagaggcgctctaggctacacaagcagggaatcctgggcaaccagccggccctaccagcccccggcgcccaacctccggtgatcccacaggcgcagccagtgcgtccacccaacggccctctctcactgcccgtaaatcgaatgcaggtttcgcagggaatgaacagctttaatccaatgagcctaggcaatgttcagttgccacaggcccccatggggcctagggccgcctcgccgatgaaccactccgtgcaaatgaattccatggggagtgtgccaggcatggccatcagccccagccggatgccacagccacccaacatgatgggcgcccacaccaacaacatgatggctcaggcacccgctcagagtcagttccttccccaaaatcaattcccgtcaagcagcggagccatgagcgtggggatgggacagccccctgcccagacgggcgtttcccagggccaggtccccggcgcggcccttccaaaccctctcaacatgcttgggcctcaggcaagccaactgccctgccctccagtgactcagtcgccactgcatcccaccccccctcccgctagcacagctgcagggatgccctccttacaacacactacccctcccggaatgaccccaccccagccagcagccccaacacaacccagtacacctgtttcctctagcggccaaacaccgactcccacacctggctcggtcccgagtgccacccagacccagtcaacgccgactgttcaagcagccgcacaggcacaagtgactccccaaccccagacaccagttcaacccccatcggtcgctactccgcagtccagtcagcaacagcccacccctgttcacgcgcagcctccagggaccccgctgtcccaggctgccgcatcaatagataaccgggtgcccacaccctctagcgttgcctctgcagaaaccaacagccaacagccaggacccgacgttcctgtattggaaatgaaaaccgaaacacaggccgaggatactgagcccgatcctggggagtcaaaaggtgaaccaagatccgaaatgatggaagaagatctgcagggcgccagtcaggttaaggaagagaccgacattgccgagcagaaaagtgagcctatggaggtggatgaaaaaaaacctgaggttaaagtcgaggtgaaagaggaagaagagtcatcttcaaatggcaccgcctcgcagtctacatcgccctctcagccaagaaagaagatctttaaacctgaggagctccgccaggctctgatgccaactctggaagcactgtacaggcaggacccagaatccctgccatttcgtcaacctgtggacccgcagttgttaggtattcccgattactttgatatcgttaaaaatcctatggatctctctactataaaacgaaaactagataccggacagtatcaagaaccatggcaatatgtggatgatgtgtggctcatgtttaacaatgcatggctttataacaggaaaacaagccgagtgtacaaattttgctctaagctggcagaggttttcgagcaggaaattgacccagtgatgcagtcactcggctactgctgtgggcgaaagtatgagtttagcccgcagaccctgtgctgctacgggaagcagctgtgtacgatcccgcgcgacgctgcctattatagctatcagaatcgctaccacttctgcgagaagtgcttcactgagatacaaggagagaacgtgacactgggagacgatccttctcagcctcagaccaccatctccaaagaccagtttgaaaagaaaaagaacgatactttagatccagagccgtttgtggactgtaaggagtgcggacggaagatgcaccagatctgcgtgttacattacgatattatctggcctagcgggttcgtgtgcgataattgcctgaaaaaaacaggcaggcctcgtaaggagaataaattttctgccaaaaggctgcagactactaggctgggaaaccatctggaagatagggtgaacaagttcctccggaggcaaaaccacccggaagcaggtgaagtgtttgtgcgcgtggtggcgtctagcgataagacggtcgaagtgaaaccaggcatgaaatctcggttcgtggactcaggggagatgtctgagagttttccataccgtactaaagctctttttgcctttgaggagattgacggtgtggatgtatgcttcttcggaatgcacgtgcaggagtatggtagcgattgtccaccaccaaatacacgccgagtatacatttcatatctggattctatccacttcttccgccccagatgccttcgcacggctgtataccacgagatcctcataggatacctagagtacgtcaagaagctcggctacgtcacaggccatatctgggcatgtcctccttctgagggcgacgactacatctttcactgtcatccacccgaccagaaaatcccaaaaccgaaaaggcttcaagaatggtataagaaaatgctagataaagcctttgcagagaggatcattcatgattacaaagacatatttaagcaagccacagaggaccgccttacatctgccaaagagctgccatactttgagggagacttctggcctaatgtgctggaggagagcatcaaggagcttgaacaagaagaggaggagaggaagaaggaagagtcaacagctgcatcagaaaccaccgaggggtcacagggagatagcaagaatgccaagaaaaaaaataacaaaaagaccaacaaaaataagagtagtatatctcgagcgaacaagaagaagccatcaatgcctaatgtctctaatgacctcagtcaaaagctttatgctactatggaaaagcacaaagaagtgttttttgtgatacatttgcacgccggtcctgttattaacactttaccccctatcgtggacccagacccgcttctgtcttgtgatctgatggacggccgggatgcttttctgactttggctcgagacaagcactgggaattttcctcccttcggagatccaaatggtcgacactgtgtatgctcgtggagctgcacactcagggccaggatagattcgtatatacctgtaacgaatgtaaacatcacgttgaaactcgatggcactgcacggtctgcgaggactatgatctgtgcattaactgctacaacactaagagtcacgcacacaagatggttaagtgggggctaggtctggatgatgagggaagcagtcagggcgagccgcaatctaaatctcctcaggagtcccggcgcctgagcatccagagatgcatacagagtttggtgcatgcatgtcaatgtcggaacgccaactgtagcctaccatcttgtcagaaaatgaagagggttgtccagcacacaaaaggatgtaagcgaaagacgaatggaggttgtcccgtgtgtaagcagttgatcgcactttgttgctatcatgcaaaacattgtcaggagaataagtgcccagtgcctttttgcttgaacattaagcataaactcaggcagcaacaaattcagcaccggctgcagcaggcgcagcttatgcgcagacggatggctaccatgaataccaggaatgtgccgcagcagagccttccgagccccacgtcggcaccccctgggaccccgacacagcagccaagtacaccacagacgccacaaccccccgcccagccccagccgtcgcccgtgtcaatgtctcccgcaggctttcctagcgtcgccaggacacagccgcccaccacagtgtccacagggaaacctactagtcaggtccccgctcccccacccccagcccagccacctcccgcagccgttgaagccgctagacagattgagagagaggcccagcagcaacagcacctttatagagtcaacataaacaattccatgccacctggacggactggcatgggaacaccgggcagccagatggcccccgtcagtcttaacgtgccccggcccaaccaggtcagcggacctgtgatgccctccatgccgcccggtcaatggcagcaggcaccccttccacaacaacagccaatgcctggacttcctaggcccgtcatctcaatgcaggctcaggccgcagttgccgggccgcgcatgccaagtgtccaaccaccgagaagcattagcccatctgccctacaggacctcctgcggactctgaaaagcccaagcagcccacaacagcagcaacaggtgctgaacatcctgaaatccaatccccagctgatggccgcttttatcaagcaacgcacggcaaaatacgtggcaaatcagccaggcatgcagccacagcccggcctgcagtcacagccaggcatgcagcctcaacctggaatgcaccagcagccaagcctgcagaatctgaatgctatgcaggccggggtgccaagaccgggcgtacctcctcagcaacaggcaatgggaggcttaaatccccagggacaggctctgaacattatgaaccctgggcacaacccaaacatggcctcaatgaacccgcagtatagggagatgttgcgtagacagctcctgcaacagcagcagcaacaacagcagcagcaacagcaacagcagcagcagcagcagggaagcgccgggatggcaggtggaatggccgggcacggacagttccagcagccacagggtccaggagggtatcctcctgccatgcagcagcagcagaggatgcagcagcatctcccacttcagggatcgagcatgggacagatggccgcacagatgggacagttgggccaaatgggacaacccgggctgggtgccgactcaacccccaacattcaacaggccttacagcagcgaatacttcagcagcagcaaatgaagcaacaaatcggctcacctggtcagcccaaccccatgagccctcagcaacatatgctgagtggacagccccaagcttcacatctccctggacagcaaatcgctacaagcctgtctaaccaggtgagatcccctgccccggtgcagtcacccaggcctcagtcccagcctccacattcctcacccagtcccaggatccagccccaaccgtctcctcaccatgtatcccctcaaaccggctcaccacaccccggactggctgtcacaatggcgtcatccatcgatcaaggccatctgggaaatcccgaacaaagcgccatgctccctcagcttaatactcccagcaggagtgcgctttcgtctgagctttcgctggtcggcgatactacgggagatacgctggagaagtttgtggaaggcctttag

SEQ ID NO: 145828 - DNA, 7329 bp, Artificial Sequence
  derived and/or modified sequence
atggccgagaacctgctggatggcccccccaaccccaagagggccaagctgagcagccctggcttcagcgccaatgacagcacagactttggcagcctgtttgacctggagaatgacctgcctgatgagctgatccccaatggaggagagctgggcctgctgaacagcggcaacctggtgcctgatgctgccagcaagcacaagcagctgtctgagctgctgcggggcggcagcggcagcagcatcaaccctggcattggaaatgtgtctgccagcagccctgtgcagcagggcctgggcggccaggcccagggccagcccaacagcgccaacatggccagcctgagcgccatgggcaagagccccctgagccagggcgacagcagcgcccccagcctgcccaagcaggccgccagcaccagcggccccaccccagctgccagccaggccctgaacccccaggcccagaagcaggtgggcctggccaccagcagccctgccaccagccagacaggccctggcatctgcatgaatgccaacttcaaccagacccaccctggcctgctgaacagcaacagcggccacagcctcatcaaccaggccagccagggccaggcccaggtgatgaatggcagcctgggcgccgccggccggggccgcggggccggcatgccctaccccaccccagccatgcagggcgccagcagctctgtgctggccgagaccctgacccaggtgagcccccagatgactggacatgctggcctgaacacagcccaggccggcggcatggccaagatgggcatcaccggcaacaccagccccttcggccagcccttcagccaggccggcggccagcccatgggcgccactggagtgaacccccagctggccagcaagcagagcatggtgaacagcctgcccaccttccccacagacatcaagaacacctctgtgaccaacgtgcccaacatgagccagatgcagacctctgtgggcatcgtgcccacccaggccatcgccaccggccccacagctgaccctgagaagaggaagctgatccagcagcagctggtgctgctgctgcacgcccacaagtgccagaggcgggagcaggccaacggggaggtgcgggcctgcagcctgccccactgcaggaccatgaagaatgtgctgaaccacatgacccactgccaggccggcaaggcctgccaggtggcccactgtgccagcagccggcagatcatcagccactggaagaactgcaccaggcatgactgccctgtgtgcctgcccctgaagaatgccagtgacaagaggaaccagcagaccatcctgggcagccctgccagcggcatccagaacaccatcggctctgtgggcaccggccagcagaatgccaccagcctgagcaaccccaaccccatcgaccccagctccatgcagagggcctatgctgccctgggcctgccctacatgaaccagccccagacccagctgcagccccaggtgcccggccagcagcctgcccagccccagacccaccagcagatgaggaccctgaaccccctgggcaacaaccccatgaacatcccagctgggggcatcaccacagaccagcagccccccaacctgatcagcgagagcgccctgcccaccagcctgggcgccaccaaccccctgatgaatgatggcagcaacagcggcaacatcggcaccctgagcaccatccccacagctgccccacccagcagcactggagtgaggaagggctggcatgaacatgtgacccaggacctgcggagccacctggtgcacaagctggtgcaggccatcttccccaccccagaccctgctgccctgaaggacaggaggatggagaacctggtggcctatgccaagaaggtggagggggacatgtatgaaagtgccaacagcagagatgagtactaccacctgctggccgagaagatctacaagatccagaaggagctggaggagaagagaagaagccggctgcacaagcagggcatcctgggcaaccagcctgccctgcctgcccctggggcccagccccctgtgatcccccaggcccagcctgtgcggcccccaaatggccccctgagcctgcctgtgaacaggatgcaggtgtcccagggcatgaacagcttcaaccccatgagcctgggcaatgtgcagctgccccaggcccccatgggccccagggctgccagccccatgaaccacagcgtgcagatgaacagcatgggctctgtgcccggcatggccatcagccccagcaggatgccccagccccccaacatgatgggcgcccacaccaacaacatgatggcccaggccccagcccagagccagttcctgccccagaaccagttccccagcagcagcggggccatgtctgtgggcatgggccagcccccagcccagacaggagtgtcccagggccaggtgcctggagctgccctgcccaaccccctgaacatgctgggcccccaggccagccagctgccctgcccccctgtgacccagagccccctgcaccccaccccacctccagccagcacagctgctggcatgcccagcctgcagcacaccaccccacctggcatgaccccaccccagcctgctgcccccacccagcccagcacccctgtgagcagcagcggccagacccccacccccaccccaggctctgtgcccagcgccacccagacccagagcacccccaccgtgcaggccgccgcccaggcccaggtgaccccccagccccagacccctgtgcagccccccagcgtggccaccccccagagcagccagcagcagcccacccctgtgcacgcccagcccccaggcacccccctgagccaggccgccgccagcattgacaacagagtgcccacccccagctctgtggccagcgctgagaccaacagccagcagcccggcccagatgtgcctgtgctggagatgaagacagagacccaggccgaggacacagagccagaccccggggagagcaagggggagcccaggtctgagatgatggaggaggacctgcagggcgccagccaggtgaaggaggagacagacattgctgagcagaagtctgagcccatggaggtggatgagaagaagccagaggtgaaggtggaggtgaaggaggaggaggagagcagcagcaatggaacagccagccagagcaccagccccagccagcccaggaagaagatcttcaagccagaggagctgcggcaggccctgatgcccaccctggaggccctgtaccggcaggaccctgagagcctgcccttccggcagcctgtggacccccagctgctgggcatcccagactactttgacatcgtgaagaaccccatggacctgagcaccatcaagaggaagctggacaccggccagtaccaggagccctggcagtatgtggatgatgtgtggctgatgttcaacaatgcctggctgtacaacaggaagaccagccgggtgtacaagttctgcagcaagctggccgaggtgtttgagcaggagattgatcctgtgatgcagagcctgggctactgctgcggcaggaaatatgagttcagcccccagaccctgtgctgctacggcaagcagctgtgcaccatccccagagatgctgcctactacagctaccagaaccgctaccacttctgtgagaagtgcttcacagagatccagggagaaaatgtgaccctgggagatgaccccagccagccccagaccaccatcagcaaggaccagtttgagaagaagaagaatgacaccctggaccctgagccctttgtggactgcaaggaatgtggcaggaagatgcaccagatctgtgtgctgcactatgacatcatctggcccagcggctttgtgtgtgacaactgcctgaagaagacaggccggcccaggaaagaaaacaagttcagcgccaagaggctgcagaccacccggctgggcaaccacctggaggacagagtgaacaagttcctgcggcggcagaaccaccctgaggccggggaggtgtttgtgcgggtggtggccagcagtgacaagacagtggaggtgaagccaggcatgaagagcagatttgtggacagcggggagatgtctgagagcttcccctaccgcaccaaggccctgtttgcctttgaggagattgatggagtggatgtgtgcttcttcggcatgcacgtgcaggagtatggcagtgactgccccccacccaacaccaggagagtgtacatctcctacctggacagcatccacttcttccggccccgctgcctgaggacagctgtgtaccacgagatcctgattggctacctggagtatgtgaagaagctgggctacgtgacaggccacatctgggcctgccccccatctgaaggagatgactacatcttccactgccaccccccagaccagaagatccccaagcccaagaggctgcaggagtggtacaagaagatgctggacaaggcctttgctgagcgcatcatccatgactacaaggacatcttcaagcaggccacagaggaccggctgaccagcgccaaggagctgccctactttgaaggagacttctggcccaacgtgctggaggagagcatcaaggagctggagcaggaggaggaggagaggaagaaggaggagagcacagctgccagcgagaccacagagggcagccagggcgacagcaagaatgccaagaagaagaacaacaagaagaccaacaagaacaagagcagcatcagccgggccaacaagaagaagcccagcatgcccaacgtgtccaatgacctgagccagaagctgtatgccaccatggagaagcacaaggaggtgttctttgtgatccacctgcatgctggccctgtgatcaacaccctgccccccatcgtggaccctgaccccctgctgagctgtgacctgatggatggaagagatgccttcctgaccctggcccgggacaagcactgggagttcagcagcctgcggcgcagcaagtggagcaccctgtgcatgctggtggagctgcacacccagggccaggacagatttgtgtacacctgcaatgaatgcaagcaccacgtggagacccgctggcactgcaccgtgtgtgaggactatgacctgtgcatcaactgctacaacaccaagagccacgcccacaagatggtgaagtggggcctgggcctggatgatgagggcagcagccagggcgagccccagagcaagagcccccaggagagccggcggctgagcatccagcgctgcatccagagcctggtgcacgcctgccagtgcagaaatgccaactgcagcctgcccagctgccagaagatgaagagggtggtgcagcacaccaagggctgcaagaggaagaccaatggaggctgccctgtgtgcaagcagctgattgccctgtgctgctaccacgccaagcactgccaggagaacaagtgccctgtgcccttctgcctgaacatcaagcacaagctgcggcagcagcagatccagcaccggctgcagcaggcccagctgatgagaagaaggatggccaccatgaacaccagaaatgtgccccagcagagcctgcccagccccaccagcgcccctcctggcacccccacccagcagcccagcaccccccagaccccccagcccccagcccagccccagcccagccctgtgtccatgagccctgctggcttccccagcgtggcccggacccagccccccaccaccgtgtccacaggcaagcccaccagccaggtgcctgcccctcctcctccagcccagcccccacctgctgctgtggaggccgcccggcagatcgagcgggaggcccagcagcagcagcacctgtacagagtgaacatcaacaacagcatgcctcctggccgcacaggcatgggcaccccaggcagccagatggcccctgtgtccctgaatgtgccccggcccaaccaggtgtctggccctgtgatgcccagcatgcctcctggccagtggcagcaggcccccctgccccagcagcagcccatgcctggcctgcccaggcctgtgatctccatgcaggcccaggccgctgtggccggccccaggatgcccagcgtgcagccccccaggagcatcagccccagcgccctgcaggacctgctgcggaccctgaagagccccagcagcccccagcagcagcagcaggtgctgaacatcctgaagagcaacccccagctgatggccgccttcatcaagcagaggacagccaagtatgtggccaaccagcccggcatgcagccccagcccggcctgcagagccagcccggcatgcagccccagcccggcatgcaccagcagcccagcctgcagaacctgaatgccatgcaggccggcgtgcccaggcctggggtgcccccccagcagcaggccatgggcggcctgaacccccagggccaggccctgaacatcatgaaccctggccacaaccccaacatggcctccatgaacccccagtaccgggagatgctgcggcggcagctgctgcagcagcagcagcagcagcagcagcagcagcagcagcagcagcagcagcagcagggcagcgctggcatggccggcggcatggccggccacggccagttccagcagccccagggccctgggggctaccccccagccatgcagcagcagcagaggatgcagcagcacctgcccctgcagggcagctccatgggccagatggccgcccagatgggccagctgggccagatgggccagcccggcctgggcgctgacagcacccccaacatccagcaggccctgcagcagaggatcctgcagcagcagcagatgaagcagcagatcggcagccctggccagcccaaccccatgagcccccagcagcacatgctgagcggccagccccaggccagccacctgcccggccagcagatcgccaccagcctgagcaaccaggtgcgcagccctgcccctgtgcagagcccccggccccagagccagcccccccacagcagccccagcccccgcatccagccccagcccagcccccaccacgtgagcccccagacaggcagcccccaccctggcctggccgtgaccatggccagcagcattgaccagggccacctgggcaaccctgagcagagcgccatgctgccccagctgaacacccccagccgcagcgccctgagcagcgagctgagcctggtgggggacaccactggagacaccctggagaagtttgtggagggcctgtag

SEQ ID NO: 145829 - DNA, 7215 bp, Artificial Sequence
  derived and/or modified sequence
atggccgagaacctgctggatggcccccccaaccccaagagggccaagctgagcagccctggcttcagcgccaatgacagcacagactttggcagcctgtttgacctggagaatgacctgcctgatgagctgatccccaatggaggagagctgggcctgctgaacagcggcaacctggtgcctgatgctgccagcaagcacaagcagctgtctgagctgctgcggggcggcagcggcagcagcatcaaccctggcattggaaatgtgtctgccagcagccctgtgcagcagggcctgggcggccaggcccagggccagcccaacagcgccaacatggccagcctgagcgccatgggcaagagccccctgagccagggcgacagcagcgcccccagcctgcccaagcaggccgccagcaccagcggccccaccccagctgccagccaggccctgaacccccaggcccagaagcaggtgggcctggccaccagcagccctgccaccagccagacaggccctggcatctgcatgaatgccaacttcaaccagacccaccctggcctgctgaacagcaacagcggccacagcctcatcaaccaggccagccagggccaggcccaggtgatgaatggcagcctgggcgccgccggccggggccgcggggccggcatgccctaccccaccccagccatgcagggcgccagcagctctgtgctggccgagaccctgacccaggtgagcccccagatgactggacatgctggcctgaacacagcccaggccggcggcatggccaagatgggcatcaccggcaacaccagccccttcggccagcccttcagccaggccggcggccagcccatgggcgccactggagtgaacccccagctggccagcaagcagagcatggtgaacagcctgcccaccttccccacagacatcaagaacacctctgtgaccaacgtgcccaacatgagccagatgcagacctctgtgggcatcgtgcccacccaggccatcgccaccggccccacagctgaccctgagaagaggaagctgatccagcagcagctggtgctgctgctgcacgcccacaagtgccagaggcgggagcaggccaacggggaggtgcgggcctgcagcctgccccactgcaggaccatgaagaatgtgctgaaccacatgacccactgccaggccggcaaggcctgccaggccatcctgggcagccctgccagcggcatccagaacaccatcggctctgtgggcaccggccagcagaatgccaccagcctgagcaaccccaaccccatcgaccccagctccatgcagagggcctatgctgccctgggcctgccctacatgaaccagccccagacccagctgcagccccaggtgcccggccagcagcctgcccagccccagacccaccagcagatgaggaccctgaaccccctgggcaacaaccccatgaacatcccagctgggggcatcaccacagaccagcagccccccaacctgatcagcgagagcgccctgcccaccagcctgggcgccaccaaccccctgatgaatgatggcagcaacagcggcaacatcggcaccctgagcaccatccccacagctgccccacccagcagcactggagtgaggaagggctggcatgaacatgtgacccaggacctgcggagccacctggtgcacaagctggtgcaggccatcttccccaccccagaccctgctgccctgaaggacaggaggatggagaacctggtggcctatgccaagaaggtggagggggacatgtatgaaagtgccaacagcagagatgagtactaccacctgctggccgagaagatctacaagatccagaaggagctggaggagaagagaagaagccggctgcacaagcagggcatcctgggcaaccagcctgccctgcctgcccctggggcccagccccctgtgatcccccaggcccagcctgtgcggcccccaaatggccccctgagcctgcctgtgaacaggatgcaggtgtcccagggcatgaacagcttcaaccccatgagcctgggcaatgtgcagctgccccaggcccccatgggccccagggctgccagccccatgaaccacagcgtgcagatgaacagcatgggctctgtgcccggcatggccatcagccccagcaggatgccccagccccccaacatgatgggcgcccacaccaacaacatgatggcccaggccccagcccagagccagttcctgccccagaaccagttccccagcagcagcggggccatgtctgtgggcatgggccagcccccagcccagacaggagtgtcccagggccaggtgcctggagctgccctgcccaaccccctgaacatgctgggcccccaggccagccagctgccctgcccccctgtgacccagagccccctgcaccccaccccacctccagccagcacagctgctggcatgcccagcctgcagcacaccaccccacctggcatgaccccaccccagcctgctgcccccacccagcccagcacccctgtgagcagcagcggccagacccccacccccaccccaggctctgtgcccagcgccacccagacccagagcacccccaccgtgcaggccgccgcccaggcccaggtgaccccccagccccagacccctgtgcagccccccagcgtggccaccccccagagcagccagcagcagcccacccctgtgcacgcccagcccccaggcacccccctgagccaggccgccgccagcattgacaacagagtgcccacccccagctctgtggccagcgctgagaccaacagccagcagcccggcccagatgtgcctgtgctggagatgaagacagagacccaggccgaggacacagagccagaccccggggagagcaagggggagcccaggtctgagatgatggaggaggacctgcagggcgccagccaggtgaaggaggagacagacattgctgagcagaagtctgagcccatggaggtggatgagaagaagccagaggtgaaggtggaggtgaaggaggaggaggagagcagcagcaatggaacagccagccagagcaccagccccagccagcccaggaagaagatcttcaagccagaggagctgcggcaggccctgatgcccaccctggaggccctgtaccggcaggaccctgagagcctgcccttccggcagcctgtggacccccagctgctgggcatcccagactactttgacatcgtgaagaaccccatggacctgagcaccatcaagaggaagctggacaccggccagtaccaggagccctggcagtatgtggatgatgtgtggctgatgttcaacaatgcctggctgtacaacaggaagaccagccgggtgtacaagttctgcagcaagctggccgaggtgtttgagcaggagattgatcctgtgatgcagagcctgggctactgctgcggcaggaaatatgagttcagcccccagaccctgtgctgctacggcaagcagctgtgcaccatccccagagatgctgcctactacagctaccagaaccgctaccacttctgtgagaagtgcttcacagagatccagggagaaaatgtgaccctgggagatgaccccagccagccccagaccaccatcagcaaggaccagtttgagaagaagaagaatgacaccctggaccctgagccctttgtggactgcaaggaatgtggcaggaagatgcaccagatctgtgtgctgcactatgacatcatctggcccagcggctttgtgtgtgacaactgcctgaagaagacaggccggcccaggaaagaaaacaagttcagcgccaagaggctgcagaccacccggctgggcaaccacctggaggacagagtgaacaagttcctgcggcggcagaaccaccctgaggccggggaggtgtttgtgcgggtggtggccagcagtgacaagacagtggaggtgaagccaggcatgaagagcagatttgtggacagcggggagatgtctgagagcttcccctaccgcaccaaggccctgtttgcctttgaggagattgatggagtggatgtgtgcttcttcggcatgcacgtgcaggagtatggcagtgactgccccccacccaacaccaggagagtgtacatctcctacctggacagcatccacttcttccggccccgctgcctgaggacagctgtgtaccacgagatcctgattggctacctggagtatgtgaagaagctgggctacgtgacaggccacatctgggcctgccccccatctgaaggagatgactacatcttccactgccaccccccagaccagaagatccccaagcccaagaggctgcaggagtggtacaagaagatgctggacaaggcctttgctgagcgcatcatccatgactacaaggacatcttcaagcaggccacagaggaccggctgaccagcgccaaggagctgccctactttgaaggagacttctggcccaacgtgctggaggagagcatcaaggagctggagcaggaggaggaggagaggaagaaggaggagagcacagctgccagcgagaccacagagggcagccagggcgacagcaagaatgccaagaagaagaacaacaagaagaccaacaagaacaagagcagcatcagccgggccaacaagaagaagcccagcatgcccaacgtgtccaatgacctgagccagaagctgtatgccaccatggagaagcacaaggaggtgttctttgtgatccacctgcatgctggccctgtgatcaacaccctgccccccatcgtggaccctgaccccctgctgagctgtgacctgatggatggaagagatgccttcctgaccctggcccgggacaagcactgggagttcagcagcctgcggcgcagcaagtggagcaccctgtgcatgctggtggagctgcacacccagggccaggacagatttgtgtacacctgcaatgaatgcaagcaccacgtggagacccgctggcactgcaccgtgtgtgaggactatgacctgtgcatcaactgctacaacaccaagagccacgcccacaagatggtgaagtggggcctgggcctggatgatgagggcagcagccagggcgagccccagagcaagagcccccaggagagccggcggctgagcatccagcgctgcatccagagcctggtgcacgcctgccagtgcagaaatgccaactgcagcctgcccagctgccagaagatgaagagggtggtgcagcacaccaagggctgcaagaggaagaccaatggaggctgccctgtgtgcaagcagctgattgccctgtgctgctaccacgccaagcactgccaggagaacaagtgccctgtgcccttctgcctgaacatcaagcacaagctgcggcagcagcagatccagcaccggctgcagcaggcccagctgatgagaagaaggatggccaccatgaacaccagaaatgtgccccagcagagcctgcccagccccaccagcgcccctcctggcacccccacccagcagcccagcaccccccagaccccccagcccccagcccagccccagcccagccctgtgtccatgagccctgctggcttccccagcgtggcccggacccagccccccaccaccgtgtccacaggcaagcccaccagccaggtgcctgcccctcctcctccagcccagcccccacctgctgctgtggaggccgcccggcagatcgagcgggaggcccagcagcagcagcacctgtacagagtgaacatcaacaacagcatgcctcctggccgcacaggcatgggcaccccaggcagccagatggcccctgtgtccctgaatgtgccccggcccaaccaggtgtctggccctgtgatgcccagcatgcctcctggccagtggcagcaggcccccctgccccagcagcagcccatgcctggcctgcccaggcctgtgatctccatgcaggcccaggccgctgtggccggccccaggatgcccagcgtgcagccccccaggagcatcagccccagcgccctgcaggacctgctgcggaccctgaagagccccagcagcccccagcagcagcagcaggtgctgaacatcctgaagagcaacccccagctgatggccgccttcatcaagcagaggacagccaagtatgtggccaaccagcccggcatgcagccccagcccggcctgcagagccagcccggcatgcagccccagcccggcatgcaccagcagcccagcctgcagaacctgaatgccatgcaggccggcgtgcccaggcctggggtgcccccccagcagcaggccatgggcggcctgaacccccagggccaggccctgaacatcatgaaccctggccacaaccccaacatggcctccatgaacccccagtaccgggagatgctgcggcggcagctgctgcagcagcagcagcagcagcagcagcagcagcagcagcagcagcagcagcagcagggcagcgctggcatggccggcggcatggccggccacggccagttccagcagccccagggccctgggggctaccccccagccatgcagcagcagcagaggatgcagcagcacctgcccctgcagggcagctccatgggccagatggccgcccagatgggccagctgggccagatgggccagcccggcctgggcgctgacagcacccccaacatccagcaggccctgcagcagaggatcctgcagcagcagcagatgaagcagcagatcggcagccctggccagcccaaccccatgagcccccagcagcacatgctgagcggccagccccaggccagccacctgcccggccagcagatcgccaccagcctgagcaaccaggtgcgcagccctgcccctgtgcagagcccccggccccagagccagcccccccacagcagccccagcccccgcatccagccccagcccagcccccaccacgtgagcccccagacaggcagcccccaccctggcctggccgtgaccatggccagcagcattgaccagggccacctgggcaaccctgagcagagcgccatgctgccccagctgaacacccccagccgcagcgccctgagcagcgagctgagcctggtgggggacaccactggagacaccctggagaagtttgtggagggcctgtag

SEQ ID NO: 145830 - DNA, 7419 bp, Artificial Sequence
  derived and/or modified sequence
ctgcggggagctgtggccgtggccgagatctggcccccacctcctcctcctggcctgcggccccccagccccagcgccccagcccggcccctggccgcccgggcccggagcagccccagccagcctgctggcccccccacccctgtgcgggccctggccggccctgctgcccgggcccggggctgcttccgggagcaggtgaagatggccgagaacctgctggatggcccccccaaccccaagagggccaagctgagcagccctggcttcagcgccaatgacagcacagactttggcagcctgtttgacctggagaatgacctgcctgatgagctgatccccaatggaggagagctgggcctgctgaacagcggcaacctggtgcctgatgctgccagcaagcacaagcagctgtctgagctgctgcggggcggcagcggcagcagcatcaaccctggcattggaaatgtgtctgccagcagccctgtgcagcagggcctgggcggccaggcccagggccagcccaacagcgccaacatggccagcctgagcgccatgggcaagagccccctgagccagggcgacagcagcgcccccagcctgcccaagcaggccgccagcaccagcggccccaccccagctgccagccaggccctgaacccccaggcccagaagcaggtgggcctggccaccagcagccctgccaccagccagacaggccctggcatctgcatgaatgccaacttcaaccagacccaccctggcctgctgaacagcaacagcggccacagcctcatcaaccaggccagccagggccaggcccaggtgatgaatggcagcctgggcgccgccggccggggccgcggggccggcatgccctaccccaccccagccatgcagggcgccagcagctctgtgctggccgagaccctgacccaggtgagcccccagatgactggacatgctggcctgaacacagcccaggccggcggcatggccaagatgggcatcaccggcaacaccagccccttcggccagcccttcagccaggccggcggccagcccatgggcgccactggagtgaacccccagctggccagcaagcagagcatggtgaacagcctgcccaccttccccacagacatcaagaacacctctgtgaccaacgtgcccaacatgagccagatgcagacctctgtgggcatcgtgcccacccaggccatcgccaccggccccacagctgaccctgagaagaggaagctgatccagcagcagctggtgctgctgctgcacgcccacaagtgccagaggcgggagcaggccaacggggaggtgcgggcctgcagcctgccccactgcaggaccatgaagaatgtgctgaaccacatgacccactgccaggccggcaaggcctgccaggccatcctgggcagccctgccagcggcatccagaacaccatcggctctgtgggcaccggccagcagaatgccaccagcctgagcaaccccaaccccatcgaccccagctccatgcagagggcctatgctgccctgggcctgccctacatgaaccagccccagacccagctgcagccccaggtgcccggccagcagcctgcccagccccagacccaccagcagatgaggaccctgaaccccctgggcaacaaccccatgaacatcccagctgggggcatcaccacagaccagcagccccccaacctgatcagcgagagcgccctgcccaccagcctgggcgccaccaaccccctgatgaatgatggcagcaacagcggcaacatcggcaccctgagcaccatccccacagctgccccacccagcagcactggagtgaggaagggctggcatgaacatgtgacccaggacctgcggagccacctggtgcacaagctggtgcaggccatcttccccaccccagaccctgctgccctgaaggacaggaggatggagaacctggtggcctatgccaagaaggtggagggggacatgtatgaaagtgccaacagcagagatgagtactaccacctgctggccgagaagatctacaagatccagaaggagctggaggagaagagaagaagccggctgcacaagcagggcatcctgggcaaccagcctgccctgcctgcccctggggcccagccccctgtgatcccccaggcccagcctgtgcggcccccaaatggccccctgagcctgcctgtgaacaggatgcaggtgtcccagggcatgaacagcttcaaccccatgagcctgggcaatgtgcagctgccccaggcccccatgggccccagggctgccagccccatgaaccacagcgtgcagatgaacagcatgggctctgtgcccggcatggccatcagccccagcaggatgccccagccccccaacatgatgggcgcccacaccaacaacatgatggcccaggccccagcccagagccagttcctgccccagaaccagttccccagcagcagcggggccatgtctgtgggcatgggccagcccccagcccagacaggagtgtcccagggccaggtgcctggagctgccctgcccaaccccctgaacatgctgggcccccaggccagccagctgccctgcccccctgtgacccagagccccctgcaccccaccccacctccagccagcacagctgctggcatgcccagcctgcagcacaccaccccacctggcatgaccccaccccagcctgctgcccccacccagcccagcacccctgtgagcagcagcggccagacccccacccccaccccaggctctgtgcccagcgccacccagacccagagcacccccaccgtgcaggccgccgcccaggcccaggtgaccccccagccccagacccctgtgcagccccccagcgtggccaccccccagagcagccagcagcagcccacccctgtgcacgcccagcccccaggcacccccctgagccaggccgccgccagcattgacaacagagtgcccacccccagctctgtggccagcgctgagaccaacagccagcagcccggcccagatgtgcctgtgctggagatgaagacagagacccaggccgaggacacagagccagaccccggggagagcaagggggagcccaggtctgagatgatggaggaggacctgcagggcgccagccaggtgaaggaggagacagacattgctgagcagaagtctgagcccatggaggtggatgagaagaagccagaggtgaaggtggaggtgaaggaggaggaggagagcagcagcaatggaacagccagccagagcaccagccccagccagcccaggaagaagatcttcaagccagaggagctgcggcaggccctgatgcccaccctggaggccctgtaccggcaggaccctgagagcctgcccttccggcagcctgtggacccccagctgctgggcatcccagactactttgacatcgtgaagaaccccatggacctgagcaccatcaagaggaagctggacaccggccagtaccaggagccctggcagtatgtggatgatgtgtggctgatgttcaacaatgcctggctgtacaacaggaagaccagccgggtgtacaagttctgcagcaagctggccgaggtgtttgagcaggagattgatcctgtgatgcagagcctgggctactgctgcggcaggaaatatgagttcagcccccagaccctgtgctgctacggcaagcagctgtgcaccatccccagagatgctgcctactacagctaccagaaccgctaccacttctgtgagaagtgcttcacagagatccagggagaaaatgtgaccctgggagatgaccccagccagccccagaccaccatcagcaaggaccagtttgagaagaagaagaatgacaccctggaccctgagccctttgtggactgcaaggaatgtggcaggaagatgcaccagatctgtgtgctgcactatgacatcatctggcccagcggctttgtgtgtgacaactgcctgaagaagacaggccggcccaggaaagaaaacaagttcagcgccaagaggctgcagaccacccggctgggcaaccacctggaggacagagtgaacaagttcctgcggcggcagaaccaccctgaggccggggaggtgtttgtgcgggtggtggccagcagtgacaagacagtggaggtgaagccaggcatgaagagcagatttgtggacagcggggagatgtctgagagcttcccctaccgcaccaaggccctgtttgcctttgaggagattgatggagtggatgtgtgcttcttcggcatgcacgtgcaggagtatggcagtgactgccccccacccaacaccaggagagtgtacatctcctacctggacagcatccacttcttccggccccgctgcctgaggacagctgtgtaccacgagatcctgattggctacctggagtatgtgaagaagctgggctacgtgacaggccacatctgggcctgccccccatctgaaggagatgactacatcttccactgccaccccccagaccagaagatccccaagcccaagaggctgcaggagtggtacaagaagatgctggacaaggcctttgctgagcgcatcatccatgactacaaggacatcttcaagcaggccacagaggaccggctgaccagcgccaaggagctgccctactttgaaggagacttctggcccaacgtgctggaggagagcatcaaggagctggagcaggaggaggaggagaggaagaaggaggagagcacagctgccagcgagaccacagagggcagccagggcgacagcaagaatgccaagaagaagaacaacaagaagaccaacaagaacaagagcagcatcagccgggccaacaagaagaagcccagcatgcccaacgtgtccaatgacctgagccagaagctgtatgccaccatggagaagcacaaggaggtgttctttgtgatccacctgcatgctggccctgtgatcaacaccctgccccccatcgtggaccctgaccccctgctgagctgtgacctgatggatggaagagatgccttcctgaccctggcccgggacaagcactgggagttcagcagcctgcggcgcagcaagtggagcaccctgtgcatgctggtggagctgcacacccagggccaggacagatttgtgtacacctgcaatgaatgcaagcaccacgtggagacccgctggcactgcaccgtgtgtgaggactatgacctgtgcatcaactgctacaacaccaagagccacgcccacaagatggtgaagtggggcctgggcctggatgatgagggcagcagccagggcgagccccagagcaagagcccccaggagagccggcggctgagcatccagcgctgcatccagagcctggtgcacgcctgccagtgcagaaatgccaactgcagcctgcccagctgccagaagatgaagagggtggtgcagcacaccaagggctgcaagaggaagaccaatggaggctgccctgtgtgcaagcagctgattgccctgtgctgctaccacgccaagcactgccaggagaacaagtgccctgtgcccttctgcctgaacatcaagcacaagctgcggcagcagcagatccagcaccggctgcagcaggcccagctgatgagaagaaggatggccaccatgaacaccagaaatgtgccccagcagagcctgcccagccccaccagcgcccctcctggcacccccacccagcagcccagcaccccccagaccccccagcccccagcccagccccagcccagccctgtgtccatgagccctgctggcttccccagcgtggcccggacccagccccccaccaccgtgtccacaggcaagcccaccagccaggtgcctgcccctcctcctccagcccagcccccacctgctgctgtggaggccgcccggcagatcgagcgggaggcccagcagcagcagcacctgtacagagtgaacatcaacaacagcatgcctcctggccgcacaggcatgggcaccccaggcagccagatggcccctgtgtccctgaatgtgccccggcccaaccaggtgtctggccctgtgatgcccagcatgcctcctggccagtggcagcaggcccccctgccccagcagcagcccatgcctggcctgcccaggcctgtgatctccatgcaggcccaggccgctgtggccggccccaggatgcccagcgtgcagccccccaggagcatcagccccagcgccctgcaggacctgctgcggaccctgaagagccccagcagcccccagcagcagcagcaggtgctgaacatcctgaagagcaacccccagctgatggccgccttcatcaagcagaggacagccaagtatgtggccaaccagcccggcatgcagccccagcccggcctgcagagccagcccggcatgcagccccagcccggcatgcaccagcagcccagcctgcagaacctgaatgccatgcaggccggcgtgcccaggcctggggtgcccccccagcagcaggccatgggcggcctgaacccccagggccaggccctgaacatcatgaaccctggccacaaccccaacatggcctccatgaacccccagtaccgggagatgctgcggcggcagctgctgcagcagcagcagcagcagcagcagcagcagcagcagcagcagcagcagcagcagggcagcgctggcatggccggcggcatggccggccacggccagttccagcagccccagggccctgggggctaccccccagccatgcagcagcagcagaggatgcagcagcacctgcccctgcagggcagctccatgggccagatggccgcccagatgggccagctgggccagatgggccagcccggcctgggcgctgacagcacccccaacatccagcaggccctgcagcagaggatcctgcagcagcagcagatgaagcagcagatcggcagccctggccagcccaaccccatgagcccccagcagcacatgctgagcggccagccccaggccagccacctgcccggccagcagatcgccaccagcctgagcaaccaggtgcgcagccctgcccctgtgcagagcccccggccccagagccagcccccccacagcagccccagcccccgcatccagccccagcccagcccccaccacgtgagcccccagacaggcagcccccaccctggcctggccgtgaccatggccagcagcattgaccagggccacctgggcaaccctgagcagagcgccatgctgccccagctgaacacccccagccgcagcgccctgagcagcgagctgagcctggtgggggacaccactggagacaccctggagaagtttgtggagggcctgtag

SEQ ID NO: 145831 - DNA, 7329 bp, Artificial Sequence
  derived and/or modified sequence
atggccgagaacctgctggacggcccccccaaccccaagcgggccaaactaagctctcccggcttctcagccaacgatagcaccgactttgggtcgctttttgacctggagaatgatctacctgatgaactaatacctaacggtggcgaactgggcctgctcaattccggtaatctggtacccgacgccgcctccaagcataagcagctgtctgagctgttacgaggcggaagtggatcctctatcaaccctggcattgggaacgttagcgccagcagccctgtgcagcagggcctgggaggacaggctcagggtcagcccaactccgcgaacatggcgtcactgagcgctatgggaaaaagcccgctatcccaaggagatagcagcgccccgtcactgcctaaacaagctgccagcacgagtggaccaactccggccgcctctcaagcactcaacccccaggcccaaaagcaggtcgggctcgccacttcatcacccgccacaagccagactgggcccgggatttgcatgaacgctaatttcaaccagacccacccaggcctcctcaacagcaatagcggacactcgctcattaatcaagcaagccaggggcaagcccaggtaatgaacggttcactgggggccgctggtcggggccgtggcgccggcatgccctaccctacacctgctatgcagggcgccagctctagcgtcttggctgaaactcttacccaggtgtctccacagatgaccggtcatgcaggcctgaacacggcgcaggccgggggcatggcaaagatgggcattaccggaaacactagtccattcggacagcccttctctcaggccggtggacaacccatgggggcgaccggggtgaaccctcaattagcctctaagcagagtatggtcaactcactgccaacttttccaacagacataaagaacaccagcgtgaccaacgttccaaacatgtcccagatgcagacctcggtaggaatcgttccaactcaggctatcgctactgggccaaccgccgatcctgagaagcgcaaactgattcaacagcagttagtgctgctcctgcacgctcacaaatgtcagagacgcgagcaggctaatggcgaagtaagagcttgttctctcccccattgccgcactatgaagaacgtcttaaatcatatgacacactgtcaggcaggaaaggcttgtcaggtcgctcattgcgcgagtagcaggcaaatcatttcacactggaaaaattgtactcggcacgactgtccagtgtgtttacctcttaagaacgcatccgataagcggaaccagcaaaccatacttggctcacccgcaagtggaattcagaacacgattgggtcagtgggcaccggccagcagaacgcaacctctttgagcaatccaaacccaatcgacccaagttccatgcagcgcgcatacgccgccctcggattgccctacatgaaccagccccagacacagctgcagcctcaggtacccgggcagcaacctgcacagcctcaaacccaccagcagatgagaactttgaacccactgggaaataaccctatgaacatacctgccgggggcataacaacagaccaacaaccacccaacctgatcagcgagagcgcgctgccaacatctctgggagcaacaaacccactgatgaatgacggctccaacagtggcaatatcgggacattatctactattcctactgcggcaccaccttcttcgaccggggtgcgaaagggttggcatgaacacgtcacacaggacctgcgatctcacttggtgcacaaactagtccaggctattttccccacccctgacccagcagcactgaaggatcgccgaatggaaaatcttgtcgcatatgcaaaaaaggttgagggcgacatgtacgaatcggcaaactctcgcgacgagtactatcatctgctcgcagagaagatctacaaaatccaaaaagaattggaagagaagcgccggtccaggctccacaaacagggcatcctcggcaatcagccagctctgccagcccccggtgctcagcccccggtgatccctcaagcgcaacctgtaaggcctcccaatgggcccctgagtttaccagtaaaccgcatgcaggtgtctcaggggatgaactctttcaatccaatgtcgctaggcaacgtccagttaccccaggcgcccatggggcctagagctgcttccccaatgaatcactccgttcaaatgaattccatgggaagcgtcccaggcatggccattagcccttcccgcatgcctcagcctccaaatatgatgggcgctcacacaaacaacatgatggctcaggctcctgctcaatctcaattccttcctcagaaccaattcccttcctcaagcggagcaatgagcgttgggatgggccaaccacctgctcaaacaggggtgtctcaggggcaagtgccaggagctgccctgccaaacccgttgaacatgctaggccctcaggcctcccagttgccttgtccccctgtcacccagagcccgcttcatccaacaccccctccagcctcaaccgccgccggcatgccctcactccagcacaccaccccaccgggaatgactcctccccagcccgctgccccgacacagcccagcactccggtgagtagttccggccagacgcccactccgacaccaggatcagtgccaagcgccacccagacccagtcaacaccgaccgtgcaggcagccgcccaggctcaggtgacgccccaaccccaaaccccagtgcaacccccctctgtcgccacgccacaatcttcacaacagcagcccacccccgttcatgcccagccccctggaacccctttgtctcaagctgctgcgtctatcgataatcgggtcccaaccccatcatctgtggcgtctgctgagactaattctcaacagcctggcccagacgtgccagtgctagagatgaaaacagaaacacaggctgaagacactgagcccgatcccggcgaaagcaagggtgaacccaggtccgagatgatggaagaggatctgcagggagccagccaggttaaagaagagacggatatcgccgaacagaaaagtgaacccatggaagttgacgaaaaaaagcccgaagttaaagtagaggtaaaggaagaggaggaatcatccagcaacggtacagctagccaatctactagccccagtcagccacggaagaagatattcaagccagaagagttgcggcaagcactgatgcccaccttggaagccctctatcggcaggatcccgaaagtctgccctttcgacaacctgtggacccacagctcctcgggatcccggactattttgacattgtgaaaaatccaatggacctctctaccataaaaagaaaactcgatactggacagtaccaagaaccatggcaatacgttgacgacgtgtggttgatgttcaataatgcctggctttacaaccggaaaaccagtagggtatataaattctgttccaagttggcagaggttttcgaacaggaaatcgacccagttatgcagagtctgggttattgttgcgggaggaaatatgagttcagcccacagaccctctgttgctacgggaagcagttgtgcactattcctagagatgctgcctattactcttatcagaaccgttatcacttttgtgagaaatgttttacagagatccagggagaaaatgttacccttggcgacgacccctctcagccgcagactaccatatcgaaggatcagtttgagaaaaaaaaaaacgatactcttgatcctgaacctttcgtcgactgcaaagaatgcggtcgcaagatgcaccagatctgcgttctgcactatgatattatttggccctccggatttgtctgtgacaactgcctgaagaagaccggtcgccctaggaaggagaataaattcagcgccaaacggctgcaaaccacgcgcctggggaaccatttggaggatcgcgtgaacaagttcctgcggagacaaaatcatcccgaagctggtgaagtatttgtgcgggtggtggctagtagcgataaaacggtggaggttaagccagggatgaaatcgagatttgttgactcgggagaaatgagcgagagttttccgtatagaacgaaggcactctttgcgttcgaagagattgacggcgtggatgtgtgttttttcgggatgcacgtgcaggaatatggcagtgactgcccccctcctaataccagacgggtttacatctcgtatctggacagcattcacttcttccgacctagatgcttacgcacagccgtgtaccacgaaatactgatcggataccttgagtacgtgaaaaaactgggatatgtaacaggtcacatctgggcatgccccccgtccgagggggatgattacatattccactgtcatcccccagatcagaagattcctaaacccaagaggctgcaggagtggtacaagaaaatgctggacaaagcattcgctgagaggatcatccacgattacaaagatattttcaagcaggcgacagaggatcggctgacgtccgcaaaggagctcccctacttcgaaggtgatttctggcccaacgtcctggaggaatcaatcaaggagctggagcaagaagaggaggagagaaagaaggaggagtccacagcagcatcagaaaccaccgagggctctcagggggactctaaaaatgctaagaagaagaataataagaaaacaaataaaaataaatctagcatttctcgagcgaataaaaaaaagccatcaatgcctaatgtttctaacgacttgtctcagaaattgtacgctaccatggagaaacataaggaggtattttttgtgattcacctccatgctggacctgtaataaatactctgcctcctattgttgatcctgatcccttactgtcttgtgacctaatggatggccgggatgcctttctgacgctggcaagggataaacactgggagttcagctcactgcgaagaagcaagtggtccaccttgtgcatgttggtcgaactccacactcagggccaggatcgcttcgtctacacatgcaatgagtgcaagcatcacgtcgagacacgctggcattgcactgtctgcgaagattacgatctctgcatcaactgttataatactaagtcccacgcccacaagatggtaaagtggggactggggttggacgatgaaggcagttcacagggcgaaccacagtccaaatctccgcaagaatcaagaaggctcagtatccagcggtgcatacagagtctggtacacgcttgtcagtgtcgcaacgccaattgttctctgccctcgtgccagaaaatgaaacgggtggtccagcacaccaagggctgcaagagaaagacgaatggcggttgcccagtgtgtaagcagctcatcgcactgtgctgctatcatgccaagcattgtcaagaaaacaaatgtccagtgcctttttgtctaaatatcaaacacaagctgaggcagcagcagatccaacaccggctgcaacaagctcagctgatgcggcgtaggatggctaccatgaacacccgaaatgtgccccagcagagcctcccaagcccgactagtgcgcccccaggcaccccgactcagcagccctctacaccacagaccccccagccacccgcacagcctcagcctagtcctgtgtcaatgtcacctgcaggctttccctccgtcgcacgcacacagccacctacaactgtgagcacagggaaacccacgtctcaggtcccagccccaccacccccggcccaacctcctcccgccgcggtcgaagctgccaggcaaatcgaacgagaagcccaacaacagcagcatctctatagggtcaatataaacaactcgatgcctcctggaaggacaggtatgggcacaccggggtctcagatggcccccgtatccttgaatgtccctcggcccaaccaggtgtctggacccgttatgccatctatgccgcccggccaatggcagcaagcgcccctaccccagcagcaacccatgcctggcctgcctcggccagttattagcatgcaggcccaggccgctgtcgctggccctaggatgccaagcgttcagcccccaagaagcataagtccctccgccttacaggatctgttgagaacccttaagagcccctctagcccccagcagcagcagcaagttctaaatatactaaagagcaatcctcagctgatggccgcctttatcaaacagcgaacagccaagtatgtagctaaccagcccgggatgcaaccccagcctggcctgcagagccagccaggcatgcagccacagcctgggatgcatcagcagccgtcactgcaaaatctcaatgccatgcaggctggtgtgccacgacccggggtccccccgcaacaacaggctatgggcggcctgaatccgcagggacaagccctgaatatcatgaaccctggccacaatccaaacatggcttctatgaacccccagtatcgcgaaatgctccggaggcaactgctgcaacagcagcagcagcagcagcagcagcagcagcagcagcagcagcaacaacaagggtccgccggaatggccggcggcatggccgggcatggccaattccagcaacctcagggtccaggcggatacccacccgcgatgcagcagcaacagagaatgcaacagcatctgccgctacagggttcttctatggggcaaatggcagctcagatgggtcaactgggtcagatgggccagcctgggctgggtgcagactccacaccgaacatacagcaggcgttgcagcagcgaatcctccagcagcagcaaatgaaacagcagataggttccccggggcaacctaaccccatgagtcctcagcagcacatgctgtccggacaaccgcaggcctcacacctgccgggccagcagattgcaacctctttgtcaaaccaagtccggagccctgccccagtgcagtctccccgccctcagtcgcagcccccacactccagcccatctccgaggattcagccacagcccagtcctcaccacgtatcaccacaaaccggatcgcctcatccaggcttggctgtgactatggcttcgagtattgatcaaggtcatcttggaaatcccgaacaatctgcaatgttgccccagctcaacacgccaagccgaagcgcactgtccagcgaactgagcttggtcggagatacgacaggggacactcttgaaaagtttgtggaaggactttag

SEQ ID NO: 145832 - DNA, 7215 bp, Artificial Sequence
  derived and/or modified sequence
atggccgagaacctgctggacggcccccccaaccccaagcgggccaagctttctagccctgggttctccgccaacgatagcacagacttcggatccctgttcgacctggagaacgatctcccagatgagctcattcccaacggaggtgaattaggtctgctgaactccggtaacctggtgcctgacgccgccagtaaacataaacaactgtcagaactcctcaggggcgggtcaggctcttctataaatcccggcattggtaatgtcagcgcctcatcccccgttcaacagggtctcgggggtcaggcacagggccaacctaatagcgccaatatggccagtctgtcagctatggggaagagtccccttagccagggcgattcttccgccccctcattacccaagcaagctgcctcaaccagtggacccactccggcggcatcacaggctctgaaccctcaggcccagaaacaagtaggcctcgctactagctctcctgctacgagccagaccggcccgggcatttgtatgaatgcgaacttcaatcaaactcacccgggtcttcttaatagtaattcagggcactccttgatcaatcaggcttcacagggacaagcacaagtcatgaatggctcgttaggcgcagctgggaggggtcgcggcgcaggtatgccctaccctactcctgccatgcaaggtgcttcctcttcagtcttggctgaaacacttacccaagtttccccccagatgacaggacacgctggactgaacaccgcacaggcaggaggaatggctaagatggggatcacagggaataccagcccttttgggcagccattctcccaggcgggcggccagcctatgggagccacgggtgtgaatccccaactggcgtctaagcagagtatggtaaacagtcttccaaccttcccaacagacatcaaaaataccagtgtcactaatgtcccaaatatgagccaaatgcagaccagcgtgggaatcgtgccaacgcaggccattgcaactggccctaccgccgatcctgagaagcgaaaactgatccagcagcaactggtcctgctccttcatgcacataaatgccagcggagggaacaggcaaacggagaggtgcgcgcttgtagcctgccacattgcaggacgatgaagaacgtgctcaaccacatgacacactgccaggctgggaaggcctgtcaagctatattaggatccccagcgagcggaatccagaataccatcggaagcgtcggcaccggccagcagaacgcaaccagcctgagcaatcctaatcctatcgacccaagcagtatgcagcgggcatacgcagcccttggtttgccatacatgaatcagccccagacacagctccagcctcaggtccccggtcaacagcccgcacagccacagacacaccagcagatgagaactttaaacccactgggcaacaacccaatgaatattcccgctggcgggattaccacagaccagcagcctcctaacctgatcagcgagtcagccttgccaacctcgctcggggcaacgaacccgctgatgaacgatggttctaactccggcaatatagggaccctgtccacgatcccaacagcggctccaccaagctctaccggcgtgaggaagggctggcatgagcatgtgactcaggatctcagatctcacctcgtgcataaactggtacaggctatttttcctactcccgacccagcggctctaaaagataggagaatggagaatctcgtcgcctatgccaaaaaagtggagggcgatatgtatgaatcggccaactccagagatgaatactaccatcttttggccgagaaaatatataagatacaaaaggaactggaagagaagaggaggtcacggctgcacaaacagggcattctcggaaatcaacctgctctgccagctcctggcgcccagccccctgtgataccccaggcccagcccgtacgacctccaaacggacccctgtccctacccgtgaataggatgcaggtctcccagggaatgaatagcttcaaccccatgtccctggggaacgtacaattgccacaagctccgatgggacctagagcggccagtcctatgaaccactccgtacagatgaacagtatgggttctgtgcctggaatggctatcagcccttcaaggatgcctcagccccctaacatgatgggggcccacacaaataatatgatggcccaagcgcccgcacaatcccagtttctgcctcagaaccagtttccatcttccagcggcgccatgtcagttgggatgggacaaccacccgcccagaccggagttagccagggccaggtgccaggagcagccctgcctaacccccttaacatgctcggtccccaagcatcgcagctgccctgcccccctgttactcagagcccattgcaccccactccacctccggctagtaccgcagccgggatgcctagcttgcagcacaccacaccacctggcatgacaccgcctcagcctgcagcccctactcagccttcgacccctgttagctcttccgggcagacgcccacccctacacccgggagcgttcccagtgcaactcagacccaatccactccgaccgtgcaggctgctgcccaggcccaggtaactccacagcctcagacaccagtgcaaccaccctccgtggcgaccccacagagctcacagcagcagccaacccctgttcacgctcagccacccggcacacccctgtctcaggccgctgcttctattgataatagagtgcctacgccttcctctgtggcaagtgcagaaacgaattctcagcagcccggacctgatgtgcccgttctcgagatgaaaactgagacccaggccgaggataccgaacccgacccgggcgagtcaaaaggagagcctcggagcgaaatgatggaggaggaccttcagggcgctagtcaggtaaaggaggaaactgatattgctgagcaaaaatccgaacccatggaagttgatgagaaaaagccggaggttaaggtggaagttaaagaggaggaggaatcctctagtaatggaaccgccagtcagagcacaagtccatcacagcccaggaagaaaatctttaagccagaggagctccgtcaggccttgatgcctaccttggaagctttatatcgccaggacccagaatccctgccgtttagacaaccagttgatccccaactcctcgggattccggactattttgacattgtcaagaatccaatggacctgtctacaataaaacgtaaactcgacacgggacagtatcaggagccttggcagtatgtggacgacgtgtggttgatgtttaacaatgcctggctgtataatagaaaaactagccgcgtgtacaagttttgtagtaagctcgccgaagtcttcgagcaggagattgacccagtcatgcagagtttgggctactgctgtggacggaagtatgagttcagcccacagaccttgtgctgctacggaaagcaattgtgtacaatcccccgcgatgctgcctattattcttaccagaacagatatcatttctgtgagaagtgtttcacagaaattcagggcgagaatgtgactctgggcgacgatccctctcagccacagacaacaattagcaaggatcagtttgaaaaaaaaaagaacgatactctggaccccgagccattcgtggattgcaaagagtgtggcagaaaaatgcaccagatctgtgtactgcactacgacatcatatggcccagtggattcgtgtgtgacaactgtttaaaaaagactggccgaccccgaaaagagaacaaattttcggctaaacgactgcagactacccgcctcggtaaccatctggaagaccgtgtgaataaattcttacggcgacagaatcatccggaggctggggaggtgttcgtgcgtgtggttgcctcaagtgacaaaaccgtggaggttaagcctggaatgaagagtagattcgtggactctggagaaatgtccgagagctttccatatcggaccaaagctctctttgcctttgaagaaatcgacggcgtggacgtctgtttctttggcatgcacgtgcaggaatacggtagcgattgcccccctccaaacaccaggcgggtttacatcagctacttggacagcattcacttttttcggcctcgctgtctgaggacggctgtgtaccacgaaattctgattggatatcttgagtacgttaagaaactgggctacgtcacaggtcacatttgggcatgtcccccaagcgagggggacgattacatcttccactgtcatcctcctgaccagaaaatacccaagccgaagcgacttcaggagtggtacaaaaagatgctcgacaaagcattcgcagagaggattatccacgactataaagacattttcaaacaagctaccgaagaccgccttacttctgccaaagagctgccttacttcgagggcgatttctggcctaatgtgctggaagaatcgatcaaagaattggagcaagaagaagaagaaagaaaaaaagaagagagcaccgcggcaagcgaaactaccgaagggtcccaaggggactcaaaaaacgctaaaaagaaaaataataaaaaaacaaacaaaaataaatcctccatttcccgggccaataaaaagaaaccctctatgcctaacgtcagcaacgatctgtcgcagaagctctacgctacaatggaaaaacacaaggaggtgttctttgtgattcacctccatgcggggcccgttatcaatacactcccaccaatcgtggatccagatcctctactgagttgtgatctgatggacggacgggacgctttccttactctagcacgagataaacactgggaattttcttccctgagacgaagcaagtggagcactctgtgtatgcttgtcgagctgcatacgcaagggcaggacagattcgtatacacttgtaacgagtgcaaacatcacgtggaaacacgatggcactgtactgtatgcgaggattacgatctgtgcatcaattgctataacaccaaatcccatgcgcataaaatggtcaagtggggactggggctcgacgacgagggttcttcgcagggcgaaccccaatccaagtccccacaggaatcaagacggctgtccatacagcggtgcatccaaagcctcgttcatgcctgccaatgccgcaatgccaattgcagcttgccgtcttgccaaaaaatgaagagagtcgtgcagcacaccaaaggatgtaagcgaaagactaatgggggctgccctgtgtgcaaacagctgatagctttatgctgttatcatgccaagcactgccaggagaataaatgccccgtaccattctgcctaaatataaaacataagcttaggcagcagcagatacaacatagactccagcaggctcagctgatgcggcggaggatggctactatgaacacgcggaacgttcctcaacagtccttaccttcccctacttctgccccgcccggaacacctacacagcagccaagcactccacagacgcctcagcctcctgctcagccacagccgtcacccgtctctatgtcacctgccggtttcccctctgtcgcacgcacccagccacctacgactgtcagcactggcaaaccaacctctcaggtgccagcgcctccacctccagcccagccacctcccgccgccgtggaggccgctaggcagattgagagggaagcccagcagcagcagcacttgtaccgggttaacattaacaactctatgcctcccggccggaccgggatggggacccccgggtctcagatggcacccgtcagccttaacgtgccacgcccaaatcaggtctctggaccagtaatgcccagtatgcccccaggtcagtggcaacaagctccgctaccccaacaacagccaatgcccgggttgcctagacctgtcatatccatgcaggctcaggctgccgtcgctgggcccaggatgcccagtgttcaaccccctagatcaatcagtccatcggctttgcaggatcttcttaggaccttaaagtccccaagttcgccacagcagcaacagcaggtcctcaatattctgaagagcaatcctcagttaatggccgcatttattaaacagcggaccgcaaagtacgtcgcgaatcaaccggggatgcagccgcagccaggattacaatcccagcctgggatgcagccccaacctggtatgcatcagcagccaagcctgcagaatctgaatgcaatgcaggctggcgttccgcggcctggagttcctccccagcagcaggccatgggtggactcaacccacaaggacaggctctgaatatcatgaacccgggacataatcccaacatggcctccatgaatccccagtaccgcgaaatgctcaggcgacagctgctacagcagcaacaacagcagcagcaacagcaacaacagcaacagcagcagcaacaggggagcgcaggaatggccggcgggatggccggacatggacagtttcaacagccacaggggcccggaggctaccccccggccatgcagcagcagcagagaatgcagcagcacttgcccctgcaagggtcctcaatgggacagatggctgcacagatgggccaactgggccaaatgggccaacccggccttggggctgattccacacccaacatacagcaggccctacagcagcggatcctccagcaacagcagatgaaacagcagattggctcgccaggacagccgaacccaatgtctccccagcagcatatgctttcggggcaaccgcaggcatcacacctgccaggacaacagatcgcaacctctctgtcgaatcaggtgcgctcccctgcgcctgtgcagtctcctcgaccgcagagtcaaccgccacacagctcgccttccccaaggatccagcctcagccttcaccccatcatgtgtcaccccagaccggcagtcctcaccctggtctggccgttaccatggcaagtagcatagatcagggacaccttggtaatccagagcagtccgccatgctcccacagcttaatacgccctctcggtctgccctgagtagtgaactttctctggtcggagacacgactggagatactctcgaaaaattcgttgaaggactatag

SEQ ID NO: 145833 - DNA, 7419 bp, Artificial Sequence
  derived and/or modified sequence
ctgcggggcgccgtggccgtggccgagatctggccccccccccccccccccggactgcgcccaccatccccatccgctcctgcacgacctctggccgcacgcgcccgaagcagtcccagccagcccgcaggcccccccacacctgtgagggcattggctggtcctgcggctcgcgcaagaggctgctttcgggagcaggtgaagatggcggagaacctgttggatgggccccccaaccctaaaagagcaaagctttcctccccaggattctccgcaaatgacagtaccgattttggcagcctcttcgatctggaaaatgacctcccagatgagctaatccctaatggaggggaactgggtctgctgaactcaggaaatctggtaccggacgccgctagcaagcataagcaactgtcagaactgttacgcggagggagcggctcatccattaatccagggattgggaacgtttctgcctcatcccctgtccagcagggcctcggcggccaggctcagggtcagcccaacagcgcaaatatggcgagtttatccgctatgggcaaatctcccctgtctcagggagactcctcagccccctctttgccgaagcaggcggctagcacaagcgggcccacaccagcagcgtcacaagccctgaatccgcaggctcagaagcaggtcggtctcgctacgtcgtcaccagccacttctcagaccggccctggcatttgcatgaatgcaaactttaatcagacgcatcccggactactgaatagcaacagcggacatagcttaatcaatcaggcaagccaggggcaggcccaggtgatgaatggcagcctcggcgcagcaggccgaggtaggggcgcggggatgccatacccgactccggccatgcagggagctagttcatccgtgttggccgaaaccctgacacaggtgtcaccccagatgaccggacacgctggtctaaataccgcccaggccggcgggatggccaaaatgggcatcaccggaaataccagtccttttgggcaaccattcagtcaggccgggggccagccgatgggcgccacaggggtcaatcctcagctcgcctcaaaacaaagcatggtcaacagccttcctacctttcctacagacataaaaaatacgtcagtgacaaacgttcctaatatgtcacagatgcagaccagtgtggggattgttcctacgcaggccatcgcgaccggccctaccgctgacccagagaaacggaagctgatccagcagcagctcgtgttgctgttgcatgcgcacaagtgccaaagacgcgagcaggcaaacggagaggttagggcctgcagcttgccccattgtcgcactatgaagaacgttctgaaccacatgacacactgtcaggccggtaaggcgtgtcaggccatacttggttccccagcctctggtatccagaacacaatcggctccgtaggcactggccaacagaatgcaacttccttgagcaacccaaaccccatcgacccttcctctatgcagagggcctatgctgctttagggctcccatacatgaaccagccacagacccagctgcagcctcaagtgcctggccaacaaccagcccagccccaaacacaccagcaaatgcgcaccctgaaccccctgggcaataacccgatgaacatcccagctggtggtattacaaccgatcaacagccgcctaatcttatctccgagagtgctcttccaactagcctgggcgccactaatcctctcatgaacgatgggagcaactcaggcaacatcggaacgctcagtactataccgacagccgcgcctccttccagcacaggagtgcgcaagggttggcacgagcacgtcacccaggacttgcgctcgcacctggtgcataaactagtgcaagcaatcttcccaacccccgatcccgcggctctgaaagatcgccgcatggaaaacctggtagcctacgctaagaaagtcgagggcgacatgtacgaatctgctaactcacgggatgagtattaccaccttctagcggagaaaatttacaagattcagaaggaactggaggagaagcgccgtagccgattgcataagcaagggatcctgggaaatcagcctgccctgcccgcaccaggagcccagcccccagtgatcccacaggcccaaccagtgaggccccccaatggtcccctgagcctgccggtgaaccggatgcaggtatcccagggaatgaactcatttaacccaatgtcactgggcaatgtacagctccctcaggctccaatgggaccacgcgccgctagcccaatgaatcattctgtccaaatgaacagcatgggaagcgtgcccggcatggcaatcagtcccagcagaatgccgcagccccccaatatgatgggcgctcacactaacaacatgatggcccaagcacctgcgcagtcccaattcctgccacagaatcagtttccaagctcaagcggcgccatgtctgtcgggatgggccagccaccagcccaaaccggcgtgtcccaaggtcaggtgcccggggcggcattgcccaatcctctgaatatgttaggcccccaggctagccaactcccgtgtcctcctgtcacccagagccctctacatcctacgcctcccccagcgagtacagcggccggcatgccatctttgcagcacactacccctcccgggatgacccccccgcagcccgccgcgccaacacaacctagcacacccgtgagtagttctggacagactccgacaccgaccccgggaagcgtgcctagcgccacccagactcagtctacacccaccgtgcaggctgcagcgcaggcccaggtgacaccacaaccgcagactcctgttcagcccccttctgtggccacgccccagtcttcacaacagcagcctactcccgtccatgctcagccaccaggaacaccactctcccaagccgcagcttcaattgataacagagtgcctacgcctagcagcgtcgctagtgcggaaacgaactctcagcaacccggaccagacgtgccagttctggaaatgaagaccgaaacccaggccgaggacacagaaccagacccaggtgagtcaaagggtgagcctcgcagtgagatgatggaggaagatctgcagggggcaagtcaggtcaaagaagaaacagatattgccgagcagaagtcggagcccatggaggtggatgaaaaaaagccagaggtgaaggtcgaagtcaaagaggaggaggaatccagtagtaacgggaccgcatcacagagcaccagcccgagtcaaccgagaaaaaagatcttcaagccagaggagctgagacaggccctgatgccaactctcgaggccctttacaggcaggatcctgaatctcttcccttcaggcagccagttgacccacaactcctaggaatcccagactattttgacatcgtgaagaaccccatggatctgagcacaataaaaaggaagctggataccggccaatatcaggaaccctggcagtatgtcgacgatgtctggttgatgtttaacaatgcatggttgtataatagaaagacatcccgagtgtataagttctgctccaagctggcagaggtcttcgagcaagaaatagacccagtgatgcaatccctgggatactgctgtggcagaaagtatgagttttcccctcagaccctgtgctgctacggtaaacagctttgcaccatcccccgggacgctgcctattattcataccaaaaccgatatcatttctgcgagaaatgttttaccgagattcaaggggaaaacgtgactctcggagacgatccatctcagccccagaccaccatctccaaggatcagtttgaaaagaagaagaacgacacactcgaccctgagcctttcgttgattgtaaagagtgcggacgaaagatgcaccagatctgtgtcctgcattatgatattatatggcctagtggcttcgtgtgtgataattgcctcaaaaagaccggacggcctagaaaagagaataaatttagtgccaaaaggctgcaaacaacccggctcggaaatcacctcgaggatagagtcaataagttcctccggcgccagaaccatcctgaggcaggcgaagtctttgtgcgggttgtggcctccagtgacaagactgtggaggtgaaacccggtatgaaaagccgctttgttgattccggcgagatgtccgaatctttcccttatcggacaaaagccctattcgcttttgaggaaatagacggcgtagatgtgtgcttcttcggaatgcacgtgcaagagtatggatctgactgtccgccacccaatacacgacgcgtgtacatatcctatttggactcaatccacttctttagaccacggtgcctgcggacagctgtgtaccacgaaattctgattggctatctggagtacgtgaagaaactaggctacgtgacaggccacatctgggcctgtcctccaagcgaaggggacgattatatttttcactgtcatcccccggaccaaaagatccccaaaccaaagcgcttacaggagtggtataagaagatgctggacaaagccttcgcagagaggatcattcacgactacaaggacatcttcaagcaggcgaccgaagaccggctgacatccgccaaggagctgccgtatttcgagggcgacttctggccaaatgtgcttgaagagagcatcaaagagctggagcaagaggaagaggaacggaagaaagaggaaagcacagctgcatccgagaccactgaagggtcacagggggattccaagaatgctaagaaaaagaacaataaaaagacgaataaaaacaaatccagcatttcccgggccaacaagaagaagccctcaatgcctaatgtctctaatgatctgtcccagaaactctatgccaccatggagaaacacaaagaggttttcttcgtgatccacctgcatgctggcccagtgattaacacgctgccaccaatcgtggatcctgacccattgctcagctgcgatctgatggatggacgcgacgcatttttgaccttagccagagataaacattgggaattctctagtctccgtagatctaaatggtccaccctgtgtatgctagtggaactccacacccaagggcaggatcggttcgtctacacatgtaatgaatgcaaacaccacgtggaaacccggtggcactgcacagtttgtgaggactacgatctgtgtattaactgttataatactaaatctcatgcccacaaaatggtcaaatgggggctcggcctagacgacgaggggtcctcccaaggagagcctcaaagtaaaagtccacaggaatctcgcaggctgagtattcagagatgcattcaatcacttgtgcatgcatgccagtgccgtaacgccaactgctccctgccaagctgtcagaagatgaagcgagtggtgcagcacaccaaaggttgtaaaagaaaaacgaatggcggctgtcccgtttgcaagcagctcatcgctctttgctgttaccacgctaagcactgccaggaaaataagtgccctgtgcctttttgcctgaacattaaacacaaactgcggcagcaacagatccagcacagacttcagcaagcacaacttatgcggcggcgcatggcgacaatgaacacccggaacgtcccccaacagagtcttccaagcccaacgtccgcccccccgggaacccctacacaacagccatccacaccacagactcctcagcctcctgctcagccacagccctcacctgtctctatgagccccgcagggttcccatccgttgcaagaactcaaccccccaccacggtcagcacagggaaacccacttctcaggtgccagcaccaccgcctcccgcacagccgcccccggcagctgtagaagcagcacgccagattgagcgcgaagctcagcagcagcaacatctgtatagagtgaatatcaataactctatgccccccggccgcactgggatgggcaccccagggtcccagatggcccccgtttcacttaacgtgcctcggcctaaccaggttagtggaccagtgatgcctagcatgccaccgggccagtggcaacaggctcctctaccccagcagcaacccatgcctggcttacctcggcccgtgatctctatgcaggcccaggcagccgtagcaggcccacggatgcccagtgtccagccaccaaggagcatctccccgtctgcactgcaggatctgttgagaactttgaagtccccatcgtcgccacagcagcagcagcaggtcttgaatatcctcaaatccaacccacaacttatggctgcgttcattaagcaaagaaccgccaagtatgtcgccaatcaacccggcatgcagccccagccgggcctccagagccagcctgggatgcagccacagccaggcatgcatcagcaacctagcctgcaaaacctgaatgccatgcaggccggagtacctcgacctggagtgcccccccagcagcaagccatgggaggcttaaatccacagggccaggctctcaacataatgaatcctggccacaatccgaatatggcatctatgaatccgcaatatcgagagatgctcaggcgacagttgctccagcaacaacaacagcagcagcagcagcagcaacagcaacagcagcagcagcaaggtagtgcaggcatggccggcggaatggctggccacgggcagtttcagcagccccagggccctggcggctatccaccagccatgcagcagcaacagcgtatgcagcaacaccttccgctgcaaggcagctcaatggggcagatggctgcgcagatgggacagctcggccagatgggccagcccggcttgggcgccgactccacgccaaatattcagcaggctttgcaacagagaatcctgcagcagcagcaaatgaagcagcagattgggtctccagggcagccaaacccaatgagtccgcagcagcacatgctgtccgggcaaccccaggcatcccacctgcccgggcagcagattgcgaccagtctgtccaatcaggtaaggagccccgccccagtgcagtcgcccaggccgcagagccagccacctcacagctctccgagtcccagaattcaaccccagccctcaccacaccatgtttcccctcagaccgggtccccccacccggggttagccgtcacaatggcctccagcatagaccagggtcacctgggcaatcccgaacagagcgcgatgcttccgcagcttaacactccctcaaggtcagcactcagtagtgaactgtccttagtcggtgacactacaggcgacacgctggaaaagtttgtggaaggattgtag

SEQ ID NO: 145834 - DNA, 7329 bp, Artificial Sequence
  derived and/or modified sequence
atggccgagaatctgcttgatggaccaccgaaccctaagcgggctaagctgtcaagtcctggcttctcagccaatgattccaccgatttcgggagcctctttgacttggagaatgatcttcctgacgagctgattcccaatggcggtgaattggggctgctcaattcaggcaaccttgtgccggacgcggcatcaaaacacaagcagctctctgagcttctcaggggtggatcaggctcctcaatcaacccgggtattgggaacgtgagtgctagcagcccggttcagcaggggttgggaggccaggcccagggacagcccaattcagcaaatatggcttccctgagcgctatgggcaaatcacctctgagccaaggggatagctctgcccctagcttgccaaagcaggcggcttccacatcaggacccacacctgctgcgtctcaggctctgaatccacaggcccagaagcaggtggggttagcaacatcatctccagccactagccaaaccggcccaggcatctgcatgaatgcgaactttaaccagactcaccccggtcttctcaactccaactctggacactcacttataaaccaggcgtcccagggccaggcacaagtcatgaacggctcactaggggcagcgggtagaggaaggggcgcaggtatgccataccccactcctgcgatgcaaggtgcgtccagcagtgtattagccgagactcttacccaagtaagcccccagatgacaggccatgctggattaaatacagcacaggcaggcggtatggcaaaaatgggaatcactggcaatacctctccatttggacagcctttttcacaggctggtgggcagcccatgggagcaacgggcgtgaacccccaacttgcaagcaagcagtcaatggtcaactctttaccaaccttccctacagacatcaaaaatacctcagttaccaacgtacccaacatgtcccaaatgcagactagcgtgggaattgtacccacccaggcaatcgcgacaggccctaccgctgaccccgagaaaagaaaattgatccagcagcagctcgttctgctgctccacgcccataagtgccagcgcagagagcaggccaacggagaggtacgagcttgtagtctccctcattgccgaactatgaaaaacgtgctaaaccacatgacccattgccaggccggaaaggcctgccaggttgcccactgtgctagctcccggcagatcatctcccattggaagaattgtaccaggcacgactgtccagtgtgcctccctttgaagaacgcctcagataaacggaaccagcaaactattctggggtctcccgcttccgggattcagaacacaattggaagcgttggtacgggccagcaaaatgcaactagcttaagtaacccaaaccccattgacccctcgtccatgcagcgagcatatgccgcactcggtctgccctacatgaatcagccgcagactcaactccaacctcaagtgccaggtcagcagccagctcaacctcaaactcatcagcagatgaggactctgaatcctttgggaaataaccctatgaacattcccgctggcggtattacaacagaccagcagccgcctaacctgataagcgagtcggccctgcctaccagtctaggagcaactaaccctttgatgaatgatggaagcaacagcggaaacatcgggactctgagtactatccctactgcagcccctccttcctctactggcgtaaggaagggctggcatgaacacgttacccaggatcttagaagccatttggttcacaaactggtccaggccatattccctactcctgacccagccgcactgaaggatcggagaatggagaatcttgtggcttatgccaaaaaggtggagggcgatatgtatgagagtgccaattccagagatgaatactaccacctcctggccgaaaaaatatacaaaatccagaaagagctcgaggaaaagagaagaagccgcctacataagcaaggcattttaggaaatcaacccgcactcccagcacctggagctcaaccccctgtgatccctcaggctcagccagtgaggccaccaaatggccctctgagcctgcctgtcaaccgtatgcaggtcagccaaggcatgaactcgttcaaccccatgtcacttggaaacgtacagttacctcaggctcctatgggtcctcgagcagcaagtcccatgaaccacagcgtccagatgaactccatgggtagcgtgcccggtatggccatcagtccctcacgtatgccccagccgccaaatatgatgggggcacatacaaataatatgatggctcaagctccagctcaatcccagtttctgccccagaatcagtttccgtccagttccggggctatgagcgtgggcatgggccaaccccctgcacagacgggtgtgagccaaggacaggtgcccggagccgctctgcccaatccactaaatatgctgggccctcaggcctcccagttaccctgtcctcccgtgacccagtcacctctgcaccccactccaccccctgcgtcaaccgctgcagggatgccaagtttgcagcacacaactccgccaggcatgactccgccacagcccgctgccccaacgcaaccgagtactcccgttagtagcagcggccagaccccgacgcctacaccaggaagtgtaccctctgccacgcagacccaatcgacaccgaccgttcaggccgctgcccaggcacaggtgactccccagccacagacccctgtgcaaccgccatcagtggcgacacctcagtcctctcagcagcaaccaacacctgtccatgcacagccacctggcacgccgctgtcgcaggccgctgcctccatcgacaacagagtaccaacaccctccagcgtagctagcgctgaaacaaatagccagcaaccgggacctgatgtgcctgtcctggagatgaagacagaaacgcaagcagaagacactgaaccagatcccggtgaaagtaagggagagcctcgatccgagatgatggaggaggacttgcagggtgcctcacaggtgaaagaggaaactgacatcgctgaacagaaatctgagccaatggaagtggatgaaaagaagccagaggtgaaagttgaagtgaaagaggaagaagagagctctagcaacggaactgcgagccaatccacttcgccatcccaaccacgcaagaaaatttttaagcccgaggagctgaggcaggccttgatgcctaccctggaagcattataccggcaagatccagaaagcttgccattccggcagcctgtcgatccgcagctcttgggaattcctgattattttgatattgtcaaaaaccccatggatctgtccactataaagagaaaacttgacacggggcagtaccaggagccatggcagtacgttgacgatgtttggctgatgtttaataacgcctggctgtataataggaaaacatcaagggtttacaagttctgctctaagttggccgaagttttcgagcaagagatcgaccccgtcatgcagagtctgggttattgctgcgggcgtaagtacgagttcagcccacagaccctgtgctgctacggaaagcagctttgcaccattcccagggacgccgcttactattcctaccagaacaggtaccacttctgcgagaaatgctttactgaaattcaaggcgaaaatgtgactctgggcgatgatccctcccaacctcagactacaatctcgaaggatcagttcgaaaaaaagaagaatgacacgctcgatccagagccgtttgtggactgcaaggagtgcgggcgaaagatgcaccagatttgtgtgcttcactacgacataatctggccttccgggttcgtatgtgataactgtctgaagaagacaggacgaccaaggaaggaaaacaagttctctgccaaacggttgcagacaacaaggcttgggaaccaccttgaagatcgggtaaacaagttcctacggcgacagaatcacccagaggcgggagaagttttcgtgagggtggttgcctcatcagacaagaccgtggaggtgaagccaggaatgaaatcacggtttgttgattctggggagatgtctgaatcatttccctaccgaactaaagctttgtttgcctttgaggagatcgatggggtggacgtatgcttcttcggcatgcatgtgcaggaatatggctccgactgcccaccccctaacacccggagggtatacatttcctatttagattccatccatttcttccggccacggtgtctacgtactgccgtgtatcacgaaattttgatcgggtacctagagtacgtaaagaaattaggatacgtgactgggcacatttgggcctgccccccatccgagggcgacgattacatctttcattgccacccaccagatcagaaaattcccaaaccaaagcgcctgcaagagtggtataagaaaatgctcgataaggctttcgctgagaggatcattcatgactataaagacatctttaaacaggcaaccgaggacagactgacatcggcaaaggaactgccatactttgaaggggacttctggccaaacgttctcgaggagtcaattaaagagcttgagcaggaagaggaagaacgcaagaaggaagagtccacggcggcatctgagaccactgaggggagtcaaggagattcaaagaacgccaagaaaaagaataataaaaagactaataagaacaagagttcaatctcgcgggcaaacaagaaaaagcccagcatgcctaacgtctctaacgatctgtctcagaagctgtatgccacaatggaaaagcacaaagaagtgttcttcgttatccatctgcacgcaggacccgtgataaacaccctcccaccaatcgtagacccagaccctctgctgtcctgcgacctgatggatgggagggatgcctttctgacattggcgagggacaaacactgggagtttagttcccttcggcgtagtaaatggtcaacgctgtgcatgctcgttgaactgcacacgcagggccaggatcggtttgtttacacatgtaatgaatgtaaacatcacgtggagacaaggtggcactgtacagtgtgtgaggattacgacctgtgcataaattgttacaatacgaagtctcacgctcataaaatggttaagtggggtctgggtctggacgacgaagggtcgtcacagggagaaccccagagcaagtcccctcaggagtccagacggttgtccatacagcgatgtatacagagtctagtacacgcctgccagtgtcgaaacgctaattgctctctgccaagctgtcaaaaaatgaagagggtggtacagcacaccaagggttgtaaaagaaagaccaacggaggctgccctgtttgtaagcaacttatagccctatgctgttaccacgcgaagcactgtcaagagaacaaatgtccagtacctttctgcctgaacattaagcacaaactaagacagcagcaaattcagcaccggctgcagcaggctcaacttatgagacggagaatggctaccatgaacaccagaaatgtgccgcaacaaagtctgccctcacctacctctgcgccaccgggaacccctactcagcagccctctaccccacagacacctcagcccccagcacaaccacagccatcaccggtctctatgtcccccgctggtttccctagcgtggcgaggacgcagcctcctactactgtgtcgacgggaaaaccaacctcacaagtccccgcacctccaccgcctgcccaaccacctcctgccgctgtcgaagccgcaaggcagattgagcgcgaagcccaacagcaacagcacctgtaccgtgttaatatcaataattccatgcccccaggcagaacagggatgggaacccctggttcacagatggctcccgtgtccctgaacgtgccacgacctaaccaggtgtccggcccagtgatgcccagcatgcctccaggacagtggcagcaggccccactgccccagcagcaaccaatgccgggactccccaggccagtgatcagcatgcaggcccaggccgcagtagcaggcccacgcatgcctagcgtgcagcctcccagaagcatcagtccatccgcattgcaggacttactcagaaccctgaaaagcccctcatctcctcaacagcagcaacaagtgctcaacatactgaagagtaaccctcagctgatggccgcttttataaaacagagaacggctaagtatgtcgccaaccagccgggaatgcaacctcagcctggattgcaaagccagcctggcatgcagccccagcccggtatgcatcagcagccctcccttcagaatctgaacgctatgcaggcaggcgtccctcgccctggcgtgccgcctcagcagcaggctatggggggtctgaatccccagggccaggccctgaacatcatgaatccaggacacaatccaaacatggcctctatgaaccctcagtaccgcgagatgctccggaggcagctgctccagcagcaacaacaacagcagcaacagcagcagcaacagcagcagcagcagcagggttcagcagggatggctggcggtatggctggccatgggcagttccaacagccccaggggccagggggatacccacctgctatgcagcagcaacagaggatgcagcaacacctacctttacaaggatccagcatgggccagatggctgcccagatgggacagttggggcagatgggacagccaggactgggcgcagattccacacctaatattcaacaggccctgcagcagcgcatcctgcagcagcaacagatgaagcagcaaatcggaagccctgggcagcctaacccaatgtcgcctcagcaacacatgctgtcagggcaaccgcaggcgagccaccttccagggcagcagattgctacaagcctttcaaatcaggtcagaagcccggctccagtgcagtcaccacgcccacagtctcaacctccgcatagctccccatcacctcgcatccagccacagccaagcccccatcacgtgagcccccagacgggatccccccaccctgggctggcagtaacaatggccagtagtatcgatcaggggcatttaggtaatcccgaacagagcgctatgctgccacaattgaataccccaagtcgatctgcacttagtagtgagctctctcttgtgggggacacaaccggtgacacactggaaaagtttgtcgagggtctctaa

SEQ ID NO: 145835 - DNA, 7214 bp, Artificial Sequence
  derived and/or modified sequence
atggccgaaaaccttttagacggcccacccaatccaaagagggccaagctgtcctctccaggtttcagcgcaaatgacagcaccgattttgggagtctatttgacctggagaacgatctgccggatgaactgatccccaatggtggagaactaggcctgctgaatagcgggaacctggttcccgacgccgctagtaaacataagcaattgtccgagctgttacgtggcggttccggttcgagcatcaacccgggaatcgggaacgtgagtgcttcttctccagtacagcaagggttaggtggacaggcacaaggccagccaaattcagcaaacatggcgtccctgtcagccatgggtaagtcacccctgagtcaaggcgattcctccgccccaagcctacctaagcaggccgcatccactagcgggccaacacccgctgccagtcaggctctgaacccgcaggcacagaaacaggtcggactcgccacctcctctcctgcgacttcacagaccggcccaggtatctgcatgaatgctaatttcaatcaaacccacccaggactgctgaattcaaactccggccatagcctgatcaatcaggcatctcagggacaggcccaggttatgaatggcagtctcggcgctgcaggacgagggcgaggtgctgggatgccctacccaaccccggcaatgcagggcgcttcttcgtcagtgctggccgaaacactgacacaggtaagccctcagatgacgggtcatgcaggactcaacacagcacaagcgggtgggatggcgaaaatggggatcaccggaaatacatcgcctttcggccagccttttagtcaagcgggaggccagccaatgggggcaacgggcgtcaatccacagctggcatccaagcagtccatggttaattccctgcctaccttccccacggatatcaaaaacacttccgtgacaaacgtacctaatatgagccagatgcagaccagcgtgggcatcgtgccaacccaagcaattgcaaccgggcctactgcagatccagaaaaacgcaaactgattcagcagcaactggtgctgctgcttcacgcccataaatgccaacggagggagcaggcgaacggcgaagtcagagcctgctccctgccccactgcagaactatgaaaaacgtcctgaatcacatgacacactgccaggcgggaaaagcatgtcaggcgatcttgggttcacctgctagtggcatacagaacactatagggagcgtaggcacaggacaacagaacgctaccagtctctctaacccgaatcccatcgacccttccagtatgcagagagcgtatgctgccttgggactgccctatatgaatcagccacaaacgcagttgcaacctcaagtgcccggtcagcagcccgctcagccccaaacccatcagcagatgcgcacactgaatcccctcggtaataaccccatgaacatccctgccggaggaattacgaccgatcaacagcccccaaatctcattagtgagtcagctctgcccacttctctgggcgctacaaaccctctgatgaatgacggaagcaattccggaaatattggcacattatcaaccataccaacggccgctcctccgtcgtcaacaggcgttcgcaagggctggcacgagcacgtaacacaggacctgcgctcacacctggtccacaagttggttcaggccatcttccctactcccgaccccgctgccctgaaagacaggcggatggagaatttagttgcctacgcgaaaaaagtggagggcgatatgtacgagagcgcgaatagtagggatgagtactaccatctgctcgcagagaaaatttacaagattcagaaagaactcgaggagaaacgacgcagtaggctgcataagcagggcatcctcgggaaccaaccagcgcttcccgcaccaggagcccaacctccagtaatcccccaagctcagccagtgaggcctcccaacggacctttgagcctgccggttaatcgcatgcaggttagccagggaatgaatagcttcaaccctatgtccttgggtaacgtgcagctgccacaggcacccatggggccacgcgcagcgagccccatgaatcattccgttcagatgaattccatggggtcagtgcctgggatggctatctccccaagccgaatgccacagcctccaaatatgatgggggcacacacaaataatatgatggcccaagcacccgctcaaagccagttcctgcctcagaatcagttccctagtagctctggggcaatgtctgtggggatggggcagccccctgcacagacaggggtgtcacagggtcaggttccgggtgccgctctacccaatcctctcaatatgcttgggccacaggccagccaactaccttgccctcccgtgacacagtctcccctccaccccacgccgccaccagcttctaccgccgcaggaatgccttcacttcaacataccactcctccaggcatgaccccaccacagcccgcagcccctacgcagccttcaactcctgtgtccagcagtggccagactcctactccaactccaggaagcgtgccaagtgcaacccagacacagtctaccccaaccgtacaggccgcagcgcaggcccaagtgacccctcagccacaaactcccgttcagcccccttctgtcgccacgccccagagctcacaacagcagccaaccccagtccatgcgcagccgcctggcactcccttatctcaagctgcggctagcatagataatagagtcccaaccccttctagcgtggccagcgccgagacaaactcccagcagccgggtcccgacgtcccagtcctcgagatgaagacagaaacccaggctgaagacacagagccagaccctggggaaagcaaaggagaacctcgttccgagatgatggaggaagatctccagggagcgtctcaagtgaaagaggagactgacatcgccgagcagaagtctgaaccgatggaagtcgacgagaaaaagcctgaggtcaaagtggaggtgaaggaggaggaagagagctcatccaacggcaccgcgtctcagtctacgtcacctagtcagccccgaaagaagatattcaagcccgaggaacttcgccaggcgcttatgccgactctagaggccctttatcgccaggaccctgagagcctaccattcagacagcctgtcgatcctcagttgttgggtatccctgactatttcgatatcgtgaaaaatccgatggatctgagcactatcaaacgaaagctggataccggccagtaccaagagccttggcagtacgttgacgatgtatggttgatgtttaacaacgcatggctctataacaggaagaccagccgggtgtataaattttgctctaaactagccgaagtcttcgagcaggagattgatccagtcatgcagtcactgggttactgctgcggaaggaaatatgagttctcccctcagacactgtgttgttacggcaaacagctctgtacaataccacgggatgctgcatactacagctatcagaatcggtaccacttttgcgaaaaatgttttacggaaatacaaggcgaaaacgtgacactgggcgacgatccgtctcagccccagaccacaatcagtaaagatcagtttgagaaaaagaagaatgatacccttgatccggagccattcgtcgactgcaaagagtgcggcaggaagatgcaccagatctgcgtgctgcactacgatatcatttggcctagcggctttgtgtgtgacaactgtctgaagaagaccggaaggcctcgtaaggagaataaattttccgccaaaaggctgcagactaccaggctaggtaatcatctcgaagatcgcgtgaataagttccttcgacggcagaatcatccggaagcaggagaggttttcgtgagggttgttgcctctagtgacaaaactgttgaagtgaaacctgggatgaaatcacgctttgtcgacagcggagaaatgtccgagagttttccatataggaccaaagcattgttcgcatttgaagaaattgatggcgtggatgtttgctttttcggaatgcatgttcaagagtacgggtccgactgtccccctcccaatacacggagggtgtacatcagctatctggattccatccactttttcaggcctaggtgtctcaggacagccgtctatcatgaaattctaatcggatatctggaatatgtgaagaagttgggttacgtgactggccatatctgggcttgtccgccaagtgagggtgatgactacatcttccattgccatccaccagatcagaaaattcctaaacccaagcgccttcaggagtggtataagaagatgcttgataaagcctttgcagaacggattatacacgactataaggatatctttaaacaggccacagaggataggctcacctcagccaaagagcttccatattttgaaggggacttctggccaaatgttctggaagagagcatcaaagagctggaacaagaagaagaggagcgaaaaaaagaagaatcaacagctgcgagtgaaacaaccgagggcagtcagggggactcaaagaatgccaaaaagaagaataataagaaaacaaataagaataaatcctctatcagtcgggcaaacaagaaaaagccttctatgcccaacgtgagtaacgacctgtcacaaaaactatacgccacaatggagaagcacaaggaagtgttttttgtgatccatctgcacgctggaccggtaataaataccctccctccaatcgtggatccagacccgctgctgtcatgtgaccttatggacggcagggatgcattcctcacgttggcaagggataagcactgggagttttctagccttcgcagatcaaagtggagcacgctttgcatgctcgtagaactgcatactcaggggcaagataggttcgtttacacctgtaatgagtgcaagcaccacgtagagaccagatggcattgcaccgtttgcgaagactatgatttatgcattaattgttacaacactaagtcacatgcccacaagatggtcaaatgggggctggggctggacgacgagggtagctcccagggcgagcctcagtctaaatccccacaagaaagccgacgccttagtatacaacggtgcatccagagtctggtccatgcctgccagtgtagaaacgccaactgttctttgccctcatgtcaaaaaatgaaaagagtggtgcagcataccaaagggtgcaaaagaaaaacaaatggcggttgtcctgtgtgtaagcagctgatcgctttgtgctgttatcatgctaagcactgtcaggagaacaagtgccctgtccctttttgcctcaacatcaaacacaaactccgccagcagcaaattcagcaccgattacaacaggcccagttaatgagaaggaggatggccactatgaatacccgcaacgtgccccagcaatcgttgccatccccaactagcgcaccacctgggactcctactcaacagcctagtaccccacaaactccacaaccacctgcccagccccagccttcccctgtgtctatgagtcctgccggatttccctctgtcgctaggactcagccacctaccaccgtatccactggaaagccaacatcacaggtgcccgctcctccccctcccgctcagccacctcctgcagccgtggaagccgctaggcaaatcgaaagagaagcccagcagcagcagcacctatatcgggtaaacatcaacaattctatgcctcctggcagaaccggaatgggcacaccaggctctcagatggccccagtttcacttaacgtccctagacccaatcaggtgtcaggtccagtcatgccaagcatgccccctggccagtggcagcaagcgccactcccccagcaacaacctatgcctggtttgcctcgccctgtgattagcatgcaggcacaggcggctgtagccggtccgagaatgccttccgtgcagccccctcgttcaatttctccgtctgcccttcaagacttgctgcgaacactcaagtccccatcttccccacaacagcagcagcaggtgctcaatatcctgaagtcaaatccacagctgatggccgcattcataaaacagagaactgccaagtatgtcgccaatcaaccaggcatgcagccccaaccaggcctgcagtcgcaaccagggatgcagccccagcccggaatgcatcaacagccctccctacagaacctgaacgctatgcaggcaggagtgcccagacctggagtaccccctcagcagcaggctatggggggactgaatccccaggggcaagccttgaacatcatgaatcccggacataaccccaacatggcctccatgaacccccaatatcgcgagatgctcaggagacagctcttgcagcaacaacagcaacagcagcagcagcagcaacaacaacagcagcagcagcaagggagcgctggaatggcaggcggaatggctggacacggtcaattccagcagccccaaggacccggtggatatcccccagctatgcagcaacaacaacggatgcagcaacacttgcccctacaaggtagcagcatgggacagatggcagctcagatgggccagctgggacaaatgggtcagccgggtttaggagccgactctactcctaatatccaacaggcactgcagcagaggatcctccagcagcagcaaatgaaacaacagataggctccccaggccagccgaatcctatgtccccccagcagcatatgctaagcggacagcctcaggcctctcacctacctgggcagcagattgcgacatcgctcagcaaccaggttagaagcccggcacccgtgcagtcgccccgaccgcagagccagccccctcactcctcaccctccccgcgaatccagccccaaccctctccccatcacgtgtcaccccagacgggctccccccatccaggcctcgcagtgaccatggccagctctatcgatcaaggccatttagggaacccggaacagagcgccatgcttcctcagcttaacaccccctcgaggtctgcactgagctccgaactgtccctggtgggagataccacgggcgataccttagagaagtttgtcgagggcttgta

SEQ ID NO: 145836 - DNA, 7418 bp, Artificial Sequence
  derived and/or modified sequence
ctgcggggtgccgtagcggttgccgagatctggccccctccccctcccccagggctgaggccacccagtccctctgcacctgcccgtcccctcgcagcaagggcccgatccagtccatcccaacccgctggacccccaactcctgtccgggcactcgcgggacccgctgccagggcaaggggatgtttcagagaacaggtaaagatggccgagaatctgttggacggccctccaaacccaaagagagctaaactcagttcgccagggttctccgctaacgactcaaccgactttggaagtctgttcgacctggagaacgatctccccgatgaactcatccccaatggcggagagttaggccttctcaactctggcaaccttgtgcccgatgcggcatcaaaacacaagcaactctctgaacttttaaggggagggtcgggctctagcatcaaccctggaattgggaatgtaagtgccagctccccggtgcagcagggcctaggcggtcaggcacagggacagccaaattctgctaacatggcttccttgagtgccatgggaaagtcacctctttcacagggggattctagtgcacctagccttcccaaacaggccgcatctacttccggccctacccccgctgcttctcaggccctgaaccctcaggctcagaagcaagttggtctggctacatcaagccccgctaccagccaaactggaccagggatttgcatgaacgcaaactttaaccagacacatcctggtctgctgaattccaatagtgggcactccctgattaatcaggcttctcaggggcaggctcaggtgatgaacggctcgcttggcgcagcaggtcggggaagaggcgcagggatgccctatccgaccccagctatgcagggcgctagtagcagcgttctcgccgagacactgactcaagtcagtccccagatgacaggccacgcagggctcaataccgcccaagcaggcggaatggcaaagatgggaatcacagggaataccagcccttttgggcagccatttagccaagccggtggacagcctatgggagcaacaggtgtgaacccacagcttgcttccaagcagagtatggtcaactcattgcccaccttccctaccgacatcaagaacacaagtgtgactaacgtgcctaatatgtcccagatgcagacgagcgtcggaattgttcccacacaggcgattgccaccggacctactgccgaccccgagaaaaggaaactgatccagcaacagctggtgctccttctgcatgcccacaaatgccaacggagagagcaggcaaatggcgaagtgagagcctgctccttgccacactgtcgtacaatgaaaaatgttctgaaccacatgactcattgccaggccggaaaagcttgtcaggcaattctgggcagtcccgcttcaggaatccagaatacaattggcagtgtggggaccggacaacaaaatgccacaagcctgtctaaccctaatccaattgacccaagcagtatgcagagggcttatgcagccctggggcttccttacatgaaccagccgcaaactcagctccagcctcaggtgcctggccaacagcccgcacaaccacagacccatcagcagatgagaaccctgaatccactcgggaacaatccgatgaatattccggctgggggaattaccaccgaccagcagccccctaacttgatatccgaaagcgccctccccactagcctgggagcgacaaaccccctaatgaacgacgggtcaaactccggcaacatcgggactctttcaactattcctactgccgcacctccatcaagcacgggagtaagaaagggatggcacgagcatgtgacacaggacttgcggagccatctagtgcacaaactggttcaggcaattttcccaaccccagaccccgcagccctaaaagaccgtagaatggaaaatctggttgcctacgccaagaaggtggagggtgatatgtacgagtcggccaactctcgggatgaatactatcacctgctggccgagaagatctacaagatccagaaagagctagaggagaaaaggcggtctcgacttcacaagcagggaatccttggaaaccagcctgcgctgccagcacctggggctcaaccgcctgttatccctcaggctcaaccagtcagacctcccaacggccctctgagcttacctgtgaataggatgcaagtcagtcaggggatgaattcatttaaccccatgtccttaggaaatgtgcaattgccacaagcccctatgggcccaagggctgcgagcccgatgaaccactcggtgcaaatgaacagtatgggcagcgtgcccggaatggccatttccccctcacggatgcctcagcctcctaacatgatgggggcacacacaaataacatgatggcgcaggccccagcccagtctcaattcctacctcagaatcagtttccgagttcttccggagctatgtccgttggaatgggacagccaccggcacaaaccggagtgtctcagggtcaggtgcccggagccgcactgccaaaccccctgaatatgttaggtccacaggcctcccagctgccttgtcctcccgtcacccagagcccattgcacccaacacctccccctgcctctactgctgccggtatgccaagcctacagcacacaacgccccctggcatgacacctcctcagcccgcagcaccaacacagccatccacgccagtgtcgtcatctggacagaccccaacgccaacaccagggagcgtaccctccgctactcagacccagtctacacccacagtacaagcagctgcgcaggcgcaggttactccacaacctcaaacccctgtccaacctccatcggtggccactcctcaatcatcccagcagcagcccacccccgttcacgcgcagcctccaggaacgcccctttctcaggccgcagccagcattgacaaccgcgtgcctactccttcatccgtagcctccgccgaaacaaattcccagcagcccggtcctgacgttcccgtgttggagatgaaaactgaaacacaagcggaggacacagagcctgacccaggggaaagtaagggcgaacccaggtcagaaatgatggaagaggatcttcaaggagcttcccaagtgaaggaggaaaccgacattgctgagcagaaatccgagcctatggaggtggacgagaagaaacccgaggtaaaggtggaagttaaagaggaagaagaatcctcgtccaacggaactgcttcccagtctacatcaccctctcaacctaggaagaaaatctttaagccggaagagctgaggcaagcactcatgccaacactggaggcactgtaccggcaggaccctgaatccctgcctttccgtcagcctgtggacccacagctgcttggcatcccagactatttcgacatcgtgaagaatccgatggacctatctacaattaaacggaaactggacacagggcagtatcaggagccatggcagtacgtggacgacgtctggttaatgtttaataacgcctggctgtataaccgcaaaacatctagggtctacaaattttgttcaaaattggccgaagtcttcgaacaggagattgaccctgttatgcagagcctcggatactgctgcggcaggaaatacgagttttcgccgcaaactctctgctgctatggtaaacagctttgtacaatacctcgggatgcggcatattatagttaccagaatagataccacttctgcgagaaatgcttcaccgaaatccagggtgagaacgtgacactgggagatgacccgagccagccgcagaccacgatctccaaggatcagttcgaaaagaagaaaaacgacaccctggacccagaacctttcgtggattgcaaagaatgtggtcggaaaatgcatcagatctgtgttctgcattatgacattatttggcctagtggtttcgtgtgcgacaattgcctaaaaaagacaggcagacctcgaaaggaaaataaattttctgctaagcgactgcagaccactcggctgggcaaccacctggaggatcgcgttaataagttcctgagacgccagaaccatcccgaggctggcgaagtgtttgttagggtggtcgcatccagcgataaaaccgtggaggtgaagccgggtatgaaaagcagattcgtggacagcggcgagatgagcgaaagctttccttaccggaccaaagccttatttgcttttgaggaaattgatggagtggacgtatgtttttttggcatgcacgtccaggaatatggttctgactgtccacctcctaataccagacgggtgtatatttcttatctggattcaatacattttttccgacctcgatgtcttcgtactgctgtgtaccacgagatcctgattgggtatctggagtacgtgaagaaactcggttatgtcacggggcacatttgggcgtgccccccatcagaaggcgacgattatatctttcactgtcaccctccagaccagaaaattcccaaacccaagaggctgcaggaatggtacaaaaaaatgctggacaaggcctttgctgaacgtatcattcatgactataaagatatctttaaacaggctactgaggataggttgacgtcagcaaaagaactgccttatttcgaaggggacttctggccgaatgtactcgaggaatccattaaggaactagaacaggaggaagaagaacgaaagaaggaggaatctactgccgcaagtgaaacgaccgaaggaagtcagggcgacagtaaaaacgctaaaaagaaaaataacaaaaagacaaataaaaataaatcctccatcagccgtgcaaataagaaaaaacccagcatgcctaatgtcagtaacgacctgagtcagaagctatatgctactatggaaaaacataaggaggtgtttttcgtgatacacttgcacgcgggtccagtaattaacaccctgccacccattgtcgaccctgacccactcttgagttgtgacctaatggatggtagagacgctttcttaactctggcccgagataaacactgggagttctcctcactgagaaggagcaagtggtcaacgctgtgtatgctcgtggagctgcatacacagggccaggaccgcttcgtgtatacctgtaacgaatgcaaacatcacgttgaaaccaggtggcactgcacagtgtgcgaggactacgacctgtgcattaattgctacaacacaaagtctcacgcacacaagatggtcaagtgggggctcggactcgatgacgaagggtcctcccagggtgagcctcaatcgaagagccctcaggagagccgaagactgtctatacaacggtgtatccagtcactggttcatgcctgtcaatgtcggaacgctaactgctccctccccagctgccagaagatgaagcgggtggtacagcacaccaagggatgcaagcgcaagaccaacgggggttgtcctgtatgcaagcagctgatcgctctgtgctgctaccatgcaaagcactgtcaggaaaacaaatgccctgtccctttctgcctgaacattaagcacaaactgagacaacagcaaatccagcaccgactgcagcaagctcagctgatgcgaaggcggatggccacaatgaatactagaaacgtccctcaacagtccctgccttcgccaacatctgccccacccggaacccctacacagcagccatcaacaccacagactccacagcccccagctcagccccaaccctcacctgtgtcaatgtcaccggcaggattcccgtccgtggcaagaacacagcccccaaccacagtgtccaccggaaagccaacatctcaagtgcccgcaccaccacccccagctcaaccgcctcctgcggctgtggaagcagccagacaaatcgagcgggaagcccagcagcagcagcacctttaccgcgtgaatattaacaacagtatgccacctggacggaccggcatgggcacccccggaagccaaatggcgcctgtatctctcaatgtacctcgtccgaaccaggtctccgggcctgtcatgccgtcaatgcctcccggacagtggcagcaggctcctttgccccagcaacaacctatgccaggcctgccacggccagtgatcagcatgcaggcccaggccgcagtagccggacctcgcatgccttccgttcagcctcctagaagtatctccccaagcgcattacaagatctacttcgcacacttaaaagccccagctcccctcagcagcagcagcaggttctgaatatactgaaaagtaaccctcagttgatggcagcttttattaagcaaagaacagctaaatatgtggctaatcagccagggatgcagccccagccaggtctgcagtcacagccaggcatgcagccccaaccgggtatgcaccaacaaccgagtctgcaaaacctaaacgcgatgcaagctggcgtacctcgtcccggagtgccaccacaacagcaggcaatgggcggtctgaacccacaaggccaggcccttaacattatgaacccaggccacaatcctaatatggcaagtatgaacccacagtatcgggagatgctgcgaaggcaactgctgcagcagcagcagcagcaacagcaacagcaacagcaacagcagcagcagcagcagggtagtgcagggatggcaggtggcatggctggacacggacagtttcagcagccccaaggccctggaggttatccacctgcgatgcagcagcagcagaggatgcaacagcacctcccgcttcagggatcatcgatgggtcagatggccgctcagatggggcagctggggcagatgggacaacccggactgggagctgattccacccctaacatccagcaggccttgcaacaacgaatactgcagcagcaacagatgaagcaacagatcggtagtccagggcagccaaaccccatgtcgccacagcagcatatgctgtcaggacagccacaggctagccacttgccaggacagcagattgctacctcattgagcaaccaggtcaggtcgcccgcaccagtgcagagtcctcgaccacaaagccaacccccacacagttctccatccccaaggatccagccgcagcctagtccccatcatgttagcccacaaaccggctctccccaccctggcctcgccgtaactatggccagctcgattgaccagggccatctcggcaatccagagcagtcagcgatgctcccccagcttaacactcccagcaggagcgcactgtcttcagagctgagcctggtcggcgacactaccggcgacaccttagagaagttcgttgagggattgta

SEQ ID NO: 145837 - DNA, 10798 bp, Artificial Sequence
  derived and/or modified sequence
ttttttttaattgaggaatcaacagccgccatcttgtcgcggacccgaccggggcttcgagcgcgatctactcggccccgccggtcccgggccccacaaccgcccgcgcaccccgctccgcccggccggcccgctccgcccggccctcggcgcccgccccggcggccccgctcgcctctcggctcggcctcccggagcccggcggcggcggcggcggcagcggcggcggcggcggcggaacggggggtgggggggccgcggcggcggcggcgaccccgctcggcgcattgtttttcctcacggcggcggcggcggcgggccgcgggccgggagcggagcccggagccccctcgtcgtcgggccgcgagcgaattcattaagtggggcgcggggggggagcgaggcggcggcggcggcggcaccatgttctcggggactgcctgagccgcccggccgggcgccgtcgctgccagccgggcccgggggggcggccgggccgccggggcgcccccaccgcggagtgtcgcgctcgggaggcgggcaggggatgagggggccgcggccggcggcggcggcggcggccgggggcgggcggtgagcgctgcggggcgctgttgctgtggctgagatttggccgccgcctcccccacccggcctgcgccctccctctccctcggcgcccgcccgcccgctcgcggcccgcgctcgctcctctccctcgcagccggcagggcccccgacccccgtccgggccctcgccggcccggccgcccgtgcccggggctgttttcgcgagcaggtgaaaatggctgagaacttgctggacggaccgcccaaccccaaaagagccaaactcagctcgcccggtttctcggcgaatgacagcacagattttggatcattgtttgacttggaaaatgatcttcctgatgagctgatacccaatggaggagaattaggccttttaaacagtgggaaccttgttccagatgctgcttccaaacataaacaactgtcggagcttctacgaggaggcagcggctctagtatcaacccaggaataggaaatgtgagcgccagcagccccgtgcagcagggcctgggtggccaggctcaagggcagccgaacagtgctaacatggccagcctcagtgccatgggcaagagccctctgagccagggagattcttcagcccccagcctgcctaaacaggcagccagcacctctgggcccacccccgctgcctcccaagcactgaatccgcaagcacaaaagcaagtggggctggcgactagcagccctgccacgtcacagactggacctggtatctgcatgaatgctaactttaaccagacccacccaggcctcctcaatagtaactctggccatagcttaattaatcaggcttcacaagggcaggcgcaagtcatgaatggatctcttggggctgctggcagaggaaggggagctggaatgccgtaccctactccagccatgcagggcgcctcgagcagcgtgctggctgagaccctaacgcaggtttccccgcaaatgactggtcacgcgggactgaacaccgcacaggcaggaggcatggccaagatgggaataactgggaacacaagtccatttggacagccctttagtcaagctggagggcagccaatgggagccactggagtgaacccccagttagccagcaaacagagcatggtcaacagtttgcccaccttccctacagatatcaagaatacttcagtcaccaacgtgccaaatatgtctcagatgcaaacatcagtgggaattgtacccacacaagcaattgcaacaggccccactgcagatcctgaaaaacgcaaactgatacagcagcagctggttctactgcttcatgctcataagtgtcagagacgagagcaagcaaacggagaggttcgggcctgctcgctcccgcattgtcgaaccatgaaaaacgttttgaatcacatgacgcattgtcaggctgggaaagcctgccaagttgcccattgtgcatcttcacgacaaatcatctctcattggaagaactgcacacgacatgactgtcctgtttgcctccctttgaaaaatgccagtgacaagcgaaaccaacaaaccatcctggggtctccagctagtggaattcaaaacacaattggttctgttggcacagggcaacagaatgccacttctttaagtaacccaaatcccatagaccccagctccatgcagcgagcctatgctgctctcggactcccctacatgaaccagccccagacgcagctgcagcctcaggttcctggccagcaaccagcacagcctcaaacccaccagcagatgaggactctcaaccccctgggaaataatccaatgaacattccagcaggaggaataacaacagatcagcagcccccaaacttgatttcagaatcagctcttccgacttccctgggggccacaaacccactgatgaacgatggctccaactctggtaacattggaaccctcagcactataccaacagcagctcctccttctagcaccggtgtaaggaaaggctggcacgaacatgtcactcaggacctgcggagccatctagtgcataaactcgtccaagccatcttcccaacacctgatcccgcagctctaaaggatcgccgcatggaaaacctggtagcctatgctaagaaagtggaaggggacatgtacgagtctgccaacagcagggatgaatattatcacttattagcagagaaaatctacaagatacaaaaagaactagaagaaaaacggaggtcgcgtttacataaacaaggcatcttggggaaccagccagccttaccagccccgggggctcagccccctgtgattccacaggcacaacctgtgagacctccaaatggacccctgtccctgccagtgaatcgcatgcaagtttctcaagggatgaattcatttaaccccatgtccttggggaacgtccagttgccacaagcacccatgggacctcgtgcagcctccccaatgaaccactctgtccagatgaacagcatgggctcagtgccagggatggccatttctccttcccgaatgcctcagcctccgaacatgatgggtgcacacaccaacaacatgatggcccaggcgcccgctcagagccagtttctgccacagaaccagttcccgtcatccagcggggcgatgagtgtgggcatggggcagccgccagcccaaacaggcgtgtcacagggacaggtgcctggtgctgctcttcctaaccctctcaacatgctggggcctcaggccagccagctaccttgccctccagtgacacagtcaccactgcacccaacaccgcctcctgcttccacggctgctggcatgccatctctccagcacacgacaccacctgggatgactcctccccagccagcagctcccactcagccatcaactcctgtgtcgtcttccgggcagactcccaccccgactcctggctcagtgcccagtgctacccaaacccagagcacccctacagtccaggcagcagcccaggcccaggtgaccccgcagcctcaaaccccagttcagcccccgtctgtggctacccctcagtcatcgcagcaacagccgacgcctgtgcacgcccagcctcctggcacaccgctttcccaggcagcagccagcattgataacagagtccctaccccctcctcggtggccagcgcagaaaccaattcccagcagccaggacctgacgtacctgtgctggaaatgaagacggagacccaagcagaggacactgagcccgatcctggtgaatccaaaggggagcccaggtctgagatgatggaggaggatttgcaaggagcttcccaagttaaagaagaaacagacatagcagagcagaaatcagaaccaatggaagtggatgaaaagaaacctgaagtgaaagtagaagttaaagaggaagaagagagtagcagtaacggcacagcctctcagtcaacatctccttcgcagccgcgcaaaaaaatctttaaaccagaggagttacgccaggccctcatgccaaccctagaagcactgtatcgacaggacccagagtcattacctttccggcagcctgtagatccccagctcctcggaattccagactattttgacatcgtaaagaatcccatggacctctccaccatcaagcggaagctggacacagggcaataccaagagccctggcagtacgtggacgacgtctggctcatgttcaacaatgcctggctctataatcgcaagacatcccgagtctataagttttgcagtaagcttgcagaggtctttgagcaggaaattgaccctgtcatgcagtcccttggatattgctgtggacgcaagtatgagttttccccacagactttgtgctgctatgggaagcagctgtgtaccattcctcgcgatgctgcctactacagctatcagaataggtatcatttctgtgagaagtgtttcacagagatccagggcgagaatgtgaccctgggtgacgacccttcacagccccagacgacaatttcaaaggatcagtttgaaaagaagaaaaatgataccttagaccccgaacctttcgttgattgcaaggagtgtggccggaagatgcatcagatttgcgttctgcactatgacatcatttggccttcaggttttgtgtgcgacaactgcttgaagaaaactggcagacctcgaaaagaaaacaaattcagtgctaagaggctgcagaccacaagactgggaaaccacttggaagaccgagtgaacaaatttttgcggcgccagaatcaccctgaagccggggaggtttttgtccgagtggtggccagctcagacaagacggtggaggtcaagcccgggatgaagtcacggtttgtggattctggggaaatgtctgaatctttcccatatcgaaccaaagctctgtttgcttttgaggaaattgacggcgtggatgtctgcttttttggaatgcacgtccaagaatacggctctgattgcccccctccaaacacgaggcgtgtgtacatttcttatctggatagtattcatttcttccggccacgttgcctccgcacagccgtttaccatgagatccttattggatatttagagtatgtgaagaaattagggtatgtgacagggcacatctgggcctgtcctccaagtgaaggagatgattacatcttccattgccacccacctgatcaaaaaatacccaagccaaaacgactgcaggagtggtacaaaaagatgctggacaaggcgtttgcagagcggatcatccatgactacaaggatattttcaaacaagcaactgaagacaggctcaccagtgccaaggaactgccctattttgaaggtgatttctggcccaatgtgttagaagagagcattaaggaactagaacaagaagaagaggagaggaaaaaggaagagagcactgcagccagtgaaaccactgagggcagtcagggcgacagcaagaatgccaagaagaagaacaacaagaaaaccaacaagaacaaaagcagcatcagccgcgccaacaagaagaagcccagcatgcccaacgtgtccaatgacctgtcccagaagctgtatgccaccatggagaagcacaaggaggtcttcttcgtgatccacctgcacgctgggcctgtcatcaacaccctgccccccatcgtcgaccccgaccccctgctcagctgtgacctcatggatgggcgcgacgccttcctcaccctcgccagagacaagcactgggagttctcctccttgcgccgctccaagtggtccacgctctgcatgctggtggagctgcacacccagggccaggaccgctttgtctacacctgcaacgagtgcaagcaccacgtggagacgcgctggcactgcactgtgtgcgaggactacgacctctgcatcaactgctataacacgaagagccatgcccataagatggtgaagtgggggctgggcctggatgacgagggcagcagccagggcgagccacagtcaaagagcccccaggagtcacgccggctgagcatccagcgctgcatccagtcgctggtgcacgcgtgccagtgccgcaacgccaactgctcgctgccatcctgccagaagatgaagcgggtggtgcagcacaccaagggctgcaaacgcaagaccaacgggggctgcccggtgtgcaagcagctcatcgccctctgctgctaccacgccaagcactgccaagaaaacaaatgccccgtgcccttctgcctcaacatcaaacacaagctccgccagcagcagatccagcaccgcctgcagcaggcccagctcatgcgccggcggatggccaccatgaacacccgcaacgtgcctcagcagagtctgccttctcctacctcagcaccgcccgggacccccacacagcagcccagcacaccccagacgccgcagccccctgcccagccccaaccctcacccgtgagcatgtcaccagctggcttccccagcgtggcccggactcagccccccaccacggtgtccacagggaagcctaccagccaggtgccggcccccccacccccggcccagccccctcctgcagcggtggaagcggctcggcagatcgagcgtgaggcccagcagcagcagcacctgtaccgggtgaacatcaacaacagcatgcccccaggacgcacgggcatggggaccccggggagccagatggcccccgtgagcctgaatgtgccccgacccaaccaggtgagcgggcccgtcatgcccagcatgcctcccgggcagtggcagcaggcgccccttccccagcagcagcccatgccaggcttgcccaggcctgtgatatccatgcaggcccaggcggccgtggctgggccccggatgcccagcgtgcagccacccaggagcatctcacccagcgctctgcaagacctgctgcggaccctgaagtcgcccagctcccctcagcagcaacagcaggtgctgaacattctcaaatcaaacccgcagctaatggcagctttcatcaaacagcgcacagccaagtacgtggccaatcagcccggcatgcagccccagcctggcctccagtcccagcccggcatgcaaccccagcctggcatgcaccagcagcccagcctgcagaacctgaatgccatgcaggctggcgtgccgcggcccggtgtgcctccacagcagcaggcgatgggaggcctgaacccccagggccaggccttgaacatcatgaacccaggacacaaccccaacatggcgagtatgaatccacagtaccgagaaatgttacggaggcagctgctgcagcagcagcagcaacagcagcagcaacaacagcagcaacagcagcagcagcaagggagtgccggcatggctgggggcatggcggggcacggccagttccagcagcctcaaggacccggaggctacccaccggccatgcagcagcagcagcgcatgcagcagcatctccccctccagggcagctccatgggccagatggcggctcagatgggacagcttggccagatggggcagccggggctgggggcagacagcacccccaacatccagcaagccctgcagcagcggattctgcagcaacagcagatgaagcagcagattgggtccccaggccagccgaaccccatgagcccccagcaacacatgctctcaggacagccacaggcctcgcatctccctggccagcagatcgccacgtcccttagtaaccaggtgcggtctccagcccctgtccagtctccacggccccagtcccagcctccacattccagcccgtcaccacggatacagccccagccttcgccacaccacgtctcaccccagactggttccccccaccccggactcgcagtcaccatggccagctccatagatcagggacacttggggaaccccgaacagagtgcaatgctcccccagctgaacacccccagcaggagtgcgctgtccagcgaactgtccctggtcggggacaccacgggggacacgctagagaagtttgtggagggcttgtagcattgtgagagcatcaccttttccctttcatgttcttggaccttttgtactgaaaatccaggcatctaggttctttttattcctagatggaactgcgacttccgagccatggaagggtggattgatgtttaaagaaacaatacaaagaatatatttttttgttaaaaaccagttgatttaaatatctggtctctctctttggtttttttttggcgggggggtggggggggttcttttttttccgttttgtttttgtttggggggaggggggttttgtttggattctttttgtcgtcattgctggtgactcatgcctttttttaacgggaaaaacaagttcattatattcatattttttatttgtattttcaagactttaaacatttatgtttaaaagtaagaagaaaaataatattcagaactgattcctgaaataatgcaagcttataatgtatcccgataactttgtgatgtttcgggaagatttttttctatagtgaactctgtgggcgtctcccagtattaccctggatgataggaattgactccggcgtgcacacacgtacacacccacacacatctatctatacataatggctgaagccaaacttgtcttgcagatgtagaaattgttgctttgtttctctgataaaactggttttagacaaaaaatagggatgatcactcttagaccatgctaatgttactagagaagaagccttcttttctttcttctatgtgaaacttgaaatgaggaaaagcaattctagtgtaaatcatgcaagcgctctaattcctataaatacgaaactcgagaagattcaatcactgtatagaatggtaaaataccaactcatttcttatatcatattgttaaataaactgtgtgcaacagacaaaaagggtggtccttcttgaattcatgtacatggtattaacacttagtgttcggggttttttgttatgaaaatgctgttttcaacattgtatttggactatgcatgtgttttttccccattgtatataaagtaccgcttaaaattgatataaattactgaggtttttaacatgtattctgttctttaagatccctgtaagaatgtttaaggtttttatttatttatatatattttttgagtctgttctttgtaagacatggttctggttgttcgctcatagcggagaggctggggctgcggttgtggttgtggcggcgtgggtggtggctgggaactgtggcccaggcttagcggccgcccggaggcttttcttcccggagactgaggtgggcgactgaggtgggcggctcagcgttggccccacacattcgaggctcacaggtgattgtcgctcacacagttagggtcgtcagttggtctgaaactgcatttggcccactcctccatcctccctgtccgtcgtagctgccacccccagaggcggcgcttcttcccgtgttcaggcggctccccccccccgtacacgactcccagaatctgaggcagagagtgctccaggctcgcgaggtgctttctgacttccccccaaatcctgccgctgccgcgcagcatgtcccgtgtggcgtttgaggaaatgctgagggacagacaccttggagcaccagctccggtccctgttacagtgagaaaggtcccccacttcgggggatacttgcacttagccacatggtcctgcctcccttggagtccagttccaggctcccttactgagtgggtgagacaagttcacaaaaaccgtaaaactgagaggaggaccatgggcaggggagctgaagttcatcccctaagtctaccacccccagcacccagagaacccactttatccctagtcccccaacaaaggctggtctaggtgggggtgatggtaattttagaaatcacgccccaaatagcttccgtttgggcccttacattcacagataggttttaaatagctgaatacttggtttgggaatctgaattcgaggaacctttctaagaagttggaaaggtccgatctagttttagcacagagctttgaaccttgagttataaaatgcagaataattcaagtaaaaataagaccaccatctggcacccctgaccagcccccattcaccccatcccaggaggggaagcacaggccgggcctccggtggagattgctgccactgctcggcctgctgggttcttaacctccagtgtcctcttcatcttttccacccgtagggaaaccttgagccatgtgttcaaacaagaagtggggctagagcccgagagcagcagctctaagcccacactcagaaagtggcgccctcctggttgtgcagccttttaatgtgggcagtggaggggcctctgtttcaggttatcctggaattcaaaacgttatgtaccaacctcatcctctttggagtctgcatcctgtgcaaccgtcttgggcaatccagatgtcgaaggatgtgaccgagagcatggtctgtggatgctaaccctaagtttgtcgtaaggaaatttctgtaagaaacctggaaagccccaacgctgtgtctcatgctgtatacttaagaggagaagaaaaagtcctatatttgtgatcaaaaagaggaaacttgaaatgtgatggtgtttataataaaagatggtaaaactacttggattcaaa

SEQ ID NO: 145838 - DNA, 10035 bp, Artificial Sequence
  derived and/or modified sequence
ctgcggggcgctgttgctgtggctgagatttggccgccgcctcccccacccggcctgcgccctccctctccctcggcgcccgcccgcccgctcgcggcccgcgctcgctcctctccctcgcagccggcagggcccccgacccccgtccgggccctcgccggcccggccgcccgtgcccggggctgttttcgcgagcaggtgaaaatggctgagaacttgctggacggaccgcccaaccccaaaagagccaaactcagctcgcccggtttctcggcgaatgacagcacagattttggatcattgtttgacttggaaaatgatcttcctgatgagctgatacccaatggaggagaattaggccttttaaacagtgggaaccttgttccagatgctgcttccaaacataaacaactgtcggagcttctacgaggaggcagcggctctagtatcaacccaggaataggaaatgtgagcgccagcagccccgtgcagcagggcctgggtggccaggctcaagggcagccgaacagtgctaacatggccagcctcagtgccatgggcaagagccctctgagccagggagattcttcagcccccagcctgcctaaacaggcagccagcacctctgggcccacccccgctgcctcccaagcactgaatccgcaagcacaaaagcaagtggggctggcgactagcagccctgccacgtcacagactggacctggtatctgcatgaatgctaactttaaccagacccacccaggcctcctcaatagtaactctggccatagcttaattaatcaggcttcacaagggcaggcgcaagtcatgaatggatctcttggggctgctggcagaggaaggggagctggaatgccgtaccctactccagccatgcagggcgcctcgagcagcgtgctggctgagaccctaacgcaggtttccccgcaaatgactggtcacgcgggactgaacaccgcacaggcaggaggcatggccaagatgggaataactgggaacacaagtccatttggacagccctttagtcaagctggagggcagccaatgggagccactggagtgaacccccagttagccagcaaacagagcatggtcaacagtttgcccaccttccctacagatatcaagaatacttcagtcaccaacgtgccaaatatgtctcagatgcaaacatcagtgggaattgtacccacacaagcaattgcaacaggccccactgcagatcctgaaaaacgcaaactgatacagcagcagctggttctactgcttcatgctcataagtgtcagagacgagagcaagcaaacggagaggttcgggcctgctcgctcccgcattgtcgaaccatgaaaaacgttttgaatcacatgacgcattgtcaggctgggaaagcctgccaagttgcccattgtgcatcttcacgacaaatcatctctcattggaagaactgcacacgacatgactgtcctgtttgcctccctttgaaaaatgccagtgacaagcgaaaccaacaaaccatcctggggtctccagctagtggaattcaaaacacaattggttctgttggcacagggcaacagaatgccacttctttaagtaacccaaatcccatagaccccagctccatgcagcgagcctatgctgctctcggactcccctacatgaaccagccccagacgcagctgcagcctcaggttcctggccagcaaccagcacagcctcaaacccaccagcagatgaggactctcaaccccctgggaaataatccaatgaacattccagcaggaggaataacaacagatcagcagcccccaaacttgatttcagaatcagctcttccgacttccctgggggccacaaacccactgatgaacgatggctccaactctggtaacattggaaccctcagcactataccaacagcagctcctccttctagcaccggtgtaaggaaaggctggcacgaacatgtcactcaggacctgcggagccatctagtgcataaactcgtccaagccatcttcccaacacctgatcccgcagctctaaaggatcgccgcatggaaaacctggtagcctatgctaagaaagtggaaggggacatgtacgagtctgccaacagcagggatgaatattatcacttattagcagagaaaatctacaagatacaaaaagaactagaagaaaaacggaggtcgcgtttacataaacaaggcatcttggggaaccagccagccttaccagccccgggggctcagccccctgtgattccacaggcacaacctgtgagacctccaaatggacccctgtccctgccagtgaatcgcatgcaagtttctcaagggatgaattcatttaaccccatgtccttggggaacgtccagttgccacaagcacccatgggacctcgtgcagcctccccaatgaaccactctgtccagatgaacagcatgggctcagtgccagggatggccatttctccttcccgaatgcctcagcctccgaacatgatgggtgcacacaccaacaacatgatggcccaggcgcccgctcagagccagtttctgccacagaaccagttcccgtcatccagcggggcgatgagtgtgggcatggggcagccgccagcccaaacaggcgtgtcacagggacaggtgcctggtgctgctcttcctaaccctctcaacatgctggggcctcaggccagccagctaccttgccctccagtgacacagtcaccactgcacccaacaccgcctcctgcttccacggctgctggcatgccatctctccagcacacgacaccacctgggatgactcctccccagccagcagctcccactcagccatcaactcctgtgtcgtcttccgggcagactcccaccccgactcctggctcagtgcccagtgctacccaaacccagagcacccctacagtccaggcagcagcccaggcccaggtgaccccgcagcctcaaaccccagttcagcccccgtctgtggctacccctcagtcatcgcagcaacagccgacgcctgtgcacgcccagcctcctggcacaccgctttcccaggcagcagccagcattgataacagagtccctaccccctcctcggtggccagcgcagaaaccaattcccagcagccaggacctgacgtacctgtgctggaaatgaagacggagacccaagcagaggacactgagcccgatcctggtgaatccaaaggggagcccaggtctgagatgatggaggaggatttgcaaggagcttcccaagttaaagaagaaacagacatagcagagcagaaatcagaaccaatggaagtggatgaaaagaaacctgaagtgaaagtagaagttaaagaggaagaagagagtagcagtaacggcacagcctctcagtcaacatctccttcgcagccgcgcaaaaaaatctttaaaccagaggagttacgccaggccctcatgccaaccctagaagcactgtatcgacaggacccagagtcattacctttccggcagcctgtagatccccagctcctcggaattccagactattttgacatcgtaaagaatcccatggacctctccaccatcaagcggaagctggacacagggcaataccaagagccctggcagtacgtggacgacgtctggctcatgttcaacaatgcctggctctataatcgcaagacatcccgagtctataagttttgcagtaagcttgcagaggtctttgagcaggaaattgaccctgtcatgcagtcccttggatattgctgtggacgcaagtatgagttttccccacagactttgtgctgctatgggaagcagctgtgtaccattcctcgcgatgctgcctactacagctatcagaataggtatcatttctgtgagaagtgtttcacagagatccagggcgagaatgtgaccctgggtgacgacccttcacagccccagacgacaatttcaaaggatcagtttgaaaagaagaaaaatgataccttagaccccgaacctttcgttgattgcaaggagtgtggccggaagatgcatcagatttgcgttctgcactatgacatcatttggccttcaggttttgtgtgcgacaactgcttgaagaaaactggcagacctcgaaaagaaaacaaattcagtgctaagaggctgcagaccacaagactgggaaaccacttggaagaccgagtgaacaaatttttgcggcgccagaatcaccctgaagccggggaggtttttgtccgagtggtggccagctcagacaagacggtggaggtcaagcccgggatgaagtcacggtttgtggattctggggaaatgtctgaatctttcccatatcgaaccaaagctctgtttgcttttgaggaaattgacggcgtggatgtctgcttttttggaatgcacgtccaagaatacggctctgattgcccccctccaaacacgaggcgtgtgtacatttcttatctggatagtattcatttcttccggccacgttgcctccgcacagccgtttaccatgagatccttattggatatttagagtatgtgaagaaattagggtatgtgacagggcacatctgggcctgtcctccaagtgaaggagatgattacatcttccattgccacccacctgatcaaaaaatacccaagccaaaacgactgcaggagtggtacaaaaagatgctggacaaggcgtttgcagagcggatcatccatgactacaaggatattttcaaacaagcaactgaagacaggctcaccagtgccaaggaactgccctattttgaaggtgatttctggcccaatgtgttagaagagagcattaaggaactagaacaagaagaagaggagaggaaaaaggaagagagcactgcagccagtgaaaccactgaggtcttcttcgtgatccacctgcacgctgggcctgtcatcaacaccctgccccccatcgtcgaccccgaccccctgctcagctgtgacctcatggatgggcgcgacgccttcctcaccctcgccagagacaagcactgggagttctcctccttgcgccgctccaagtggtccacgctctgcatgctggtggagctgcacacccagggccaggaccgctttgtctacacctgcaacgagtgcaagcaccacgtggagacgcgctggcactgcactgtgtgcgaggactacgacctctgcatcaactgctataacacgaagagccatgcccataagatggtgaagtgggggctgggcctggatgacgagggcagcagccagggcgagccacagtcaaagagcccccaggagtcacgccggctgagcatccagcgctgcatccagtcgctggtgcacgcgtgccagtgccgcaacgccaactgctcgctgccatcctgccagaagatgaagcgggtggtgcagcacaccaagggctgcaaacgcaagaccaacgggggctgcccggtgtgcaagcagctcatcgccctctgctgctaccacgccaagcactgccaagaaaacaaatgccccgtgcccttctgcctcaacatcaaacacaagctccgccagcagcagatccagcaccgcctgcagcaggcccagctcatgcgccggcggatggccaccatgaacacccgcaacgtgcctcagcagagtctgccttctcctacctcagcaccgcccgggacccccacacagcagcccagcacaccccagacgccgcagccccctgcccagccccaaccctcacccgtgagcatgtcaccagctggcttccccagcgtggcccggactcagccccccaccacggtgtccacagggaagcctaccagccaggtgccggcccccccacccccggcccagccccctcctgcagcggtggaagcggctcggcagatcgagcgtgaggcccagcagcagcagcacctgtaccgggtgaacatcaacaacagcatgcccccaggacgcacgggcatggggaccccggggagccagatggcccccgtgagcctgaatgtgccccgacccaaccaggtgagcgggcccgtcatgcccagcatgcctcccgggcagtggcagcaggcgccccttccccagcagcagcccatgccaggcttgcccaggcctgtgatatccatgcaggcccaggcggccgtggctgggccccggatgcccagcgtgcagccacccaggagcatctcacccagcgctctgcaagacctgctgcggaccctgaagtcgcccagctcccctcagcagcaacagcaggtgctgaacattctcaaatcaaacccgcagctaatggcagctttcatcaaacagcgcacagccaagtacgtggccaatcagcccggcatgcagccccagcctggcctccagtcccagcccggcatgcaaccccagcctggcatgcaccagcagcccagcctgcagaacctgaatgccatgcaggctggcgtgccgcggcccggtgtgcctccacagcagcaggcgatgggaggcctgaacccccagggccaggccttgaacatcatgaacccaggacacaaccccaacatggcgagtatgaatccacagtaccgagaaatgttacggaggcagctgctgcagcagcagcagcaacagcagcagcaacaacagcagcaacagcagcagcagcaagggagtgccggcatggctgggggcatggcggggcacggccagttccagcagcctcaaggacccggaggctacccaccggccatgcagcagcagcagcgcatgcagcagcatctccccctccagggcagctccatgggccagatggcggctcagatgggacagcttggccagatggggcagccggggctgggggcagacagcacccccaacatccagcaagccctgcagcagcggattctgcagcaacagcagatgaagcagcagattgggtccccaggccagccgaaccccatgagcccccagcaacacatgctctcaggacagccacaggcctcgcatctccctggccagcagatcgccacgtcccttagtaaccaggtgcggtctccagcccctgtccagtctccacggccccagtcccagcctccacattccagcccgtcaccacggatacagccccagccttcgccacaccacgtctcaccccagactggttccccccaccccggactcgcagtcaccatggccagctccatagatcagggacacttggggaaccccgaacagagtgcaatgctcccccagctgaacacccccagcaggagtgcgctgtccagcgaactgtccctggtcggggacaccacgggggacacgctagagaagtttgtggagggcttgtagcattgtgagagcatcaccttttccctttcatgttcttggaccttttgtactgaaaatccaggcatctaggttctttttattcctagatggaactgcgacttccgagccatggaagggtggattgatgtttaaagaaacaatacaaagaatatatttttttgttaaaaaccagttgatttaaatatctggtctctctctttggtttttttttggcgggggggtggggggggttcttttttttccgttttgtttttgtttggggggaggggggttttgtttggattctttttgtcgtcattgctggtgactcatgcctttttttaacgggaaaaacaagttcattatattcatattttttatttgtattttcaagactttaaacatttatgtttaaaagtaagaagaaaaataatattcagaactgattcctgaaataatgcaagcttataatgtatcccgataactttgtgatgtttcgggaagatttttttctatagtgaactctgtgggcgtctcccagtattaccctggatgataggaattgactccggcgtgcacacacgtacacacccacacacatctatctatacataatggctgaagccaaacttgtcttgcagatgtagaaattgttgctttgtttctctgataaaactggttttagacaaaaaatagggatgatcactcttagaccatgctaatgttactagagaagaagccttcttttctttcttctatgtgaaacttgaaatgaggaaaagcaattctagtgtaaatcatgcaagcgctctaattcctataaatacgaaactcgagaagattcaatcactgtatagaatggtaaaataccaactcatttcttatatcatattgttaaataaactgtgtgcaacagacaaaaagggtggtccttcttgaattcatgtacatggtattaacacttagtgttcggggttttttgttatgaaaatgctgttttcaacattgtatttggactatgcatgtgttttttccccattgtatataaagtaccgcttaaaattgatataaattactgaggtttttaacatgtattctgttctttaagatccctgtaagaatgtttaaggtttttatttatttatatatattttttgagtctgttctttgtaagacatggttctggttgttcgctcatagcggagaggctggggctgcggttgtggttgtggcggcgtgggtggtggctgggaactgtggcccaggcttagcggccgcccggaggcttttcttcccggagactgaggtgggcgactgaggtgggcggctcagcgttggccccacacattcgaggctcacaggtgattgtcgctcacacagttagggtcgtcagttggtctgaaactgcatttggcccactcctccatcctccctgtccgtcgtagctgccacccccagaggcggcgcttcttcccgtgttcaggcggctccccccccccgtacacgactcccagaatctgaggcagagagtgctccaggctcgcgaggtgctttctgacttccccccaaatcctgccgctgccgcgcagcatgtcccgtgtggcgtttgaggaaatgctgagggacagacaccttggagcaccagctccggtccctgttacagtgagaaaggtcccccacttcgggggatacttgcacttagccacatggtcctgcctcccttggagtccagttccaggctcccttactgagtgggtgagacaagttcacaaaaaccgtaaaactgagaggaggaccatgggcaggggagctgaagttcatcccctaagtctaccacccccagcacccagagaacccactttatccctagtcccccaacaaaggctggtctaggtgggggtgatggtaattttagaaatcacgccccaaatagcttccgtttgggcccttacattcacagataggttttaaatagctgaatacttggtttgggaatctgaattcgaggaacctttctaagaagttggaaaggtccgatctagttttagcacagagctttgaaccttgagttataaaatgcagaataattcaagtaaaaataagaccaccatctggcacccctgaccagcccccattcaccccatcccaggaggggaagcacaggccgggcctccggtggagattgctgccactgctcggcctgctgggttcttaacctccagtgtcctcttcatcttttccacccgtagggaaaccttgagccatgtgttcaaacaagaagtggggctagagcccgagagcagcagctctaagcccacactcagaaagtggcgccctcctggttgtgcagccttttaatgtgggcagtggaggggcctctgtttcaggttatcctggaattcaaaacgttatgtaccaacctcatcctctttggagtctgcatcctgtgcaaccgtcttgggcaatccagatgtcgaaggatgtgaccgagagcatggtctgtggatgctaaccctaagtttgtcgtaaggaaatttctgtaagaaacctggaaagccccaacgctgtgtctcatgctgtatacttaagaggagaagaaaaagtcctatatttgtgatcaaaaagaggaaacttgaaatgtgatggtgtttataataaaagatggtaaaactacttggattcaaa

SEQ ID NO: 145839 - DNA, 10083 bp, Artificial Sequence
  derived and/or modified sequence
ctgcggggcgctgttgctgtggctgagatttggccgccgcctcccccacccggcctgcgccctccctctccctcggcgcccgcccgcccgctcgcggcccgcgctcgctcctctccctcgcagccggcagggcccccgacccccgtccgggccctcgccggcccggccgcccgtgcccggggctgttttcgcgagcaggtgaaaatggctgagaacttgctggacggaccgcccaaccccaaaagagccaaactcagctcgcccggtttctcggcgaatgacagcacagattttggatcattgtttgacttggaaaatgatcttcctgatgagctgatacccaatggaggagaattaggccttttaaacagtgggaaccttgttccagatgctgcttccaaacataaacaactgtcggagcttctacgaggaggcagcggctctagtatcaacccaggaataggaaatgtgagcgccagcagccccgtgcagcagggcctgggtggccaggctcaagggcagccgaacagtgctaacatggccagcctcagtgccatgggcaagagccctctgagccagggagattcttcagcccccagcctgcctaaacaggcagccagcacctctgggcccacccccgctgcctcccaagcactgaatccgcaagcacaaaagcaagtggggctggcgactagcagccctgccacgtcacagactggacctggtatctgcatgaatgctaactttaaccagacccacccaggcctcctcaatagtaactctggccatagcttaattaatcaggcttcacaagggcaggcgcaagtcatgaatggatctcttggggctgctggcagaggaaggggagctggaatgccgtaccctactccagccatgcagggcgcctcgagcagcgtgctggctgagaccctaacgcaggtttccccgcaaatgactggtcacgcgggactgaacaccgcacaggcaggaggcatggccaagatgggaataactgggaacacaagtccatttggacagccctttagtcaagctggagggcagccaatgggagccactggagtgaacccccagttagccagcaaacagagcatggtcaacagtttgcccaccttccctacagatatcaagaatacttcagtcaccaacgtgccaaatatgtctcagatgcaaacatcagtgggaattgtacccacacaagcaattgcaacaggccccactgcagatcctgaaaaacgcaaactgatacagcagcagctggttctactgcttcatgctcataagtgtcagagacgagagcaagcaaacggagaggttcgggcctgctcgctcccgcattgtcgaaccatgaaaaacgttttgaatcacatgacgcattgtcaggctgggaaagcctgccaagccatcctggggtctccagctagtggaattcaaaacacaattggttctgttggcacagggcaacagaatgccacttctttaagtaacccaaatcccatagaccccagctccatgcagcgagcctatgctgctctcggactcccctacatgaaccagccccagacgcagctgcagcctcaggttcctggccagcaaccagcacagcctcaaacccaccagcagatgaggactctcaaccccctgggaaataatccaatgaacattccagcaggaggaataacaacagatcagcagcccccaaacttgatttcagaatcagctcttccgacttccctgggggccacaaacccactgatgaacgatggctccaactctggtaacattggaaccctcagcactataccaacagcagctcctccttctagcaccggtgtaaggaaaggctggcacgaacatgtcactcaggacctgcggagccatctagtgcataaactcgtccaagccatcttcccaacacctgatcccgcagctctaaaggatcgccgcatggaaaacctggtagcctatgctaagaaagtggaaggggacatgtacgagtctgccaacagcagggatgaatattatcacttattagcagagaaaatctacaagatacaaaaagaactagaagaaaaacggaggtcgcgtttacataaacaaggcatcttggggaaccagccagccttaccagccccgggggctcagccccctgtgattccacaggcacaacctgtgagacctccaaatggacccctgtccctgccagtgaatcgcatgcaagtttctcaagggatgaattcatttaaccccatgtccttggggaacgtccagttgccacaagcacccatgggacctcgtgcagcctccccaatgaaccactctgtccagatgaacagcatgggctcagtgccagggatggccatttctccttcccgaatgcctcagcctccgaacatgatgggtgcacacaccaacaacatgatggcccaggcgcccgctcagagccagtttctgccacagaaccagttcccgtcatccagcggggcgatgagtgtgggcatggggcagccgccagcccaaacaggcgtgtcacagggacaggtgcctggtgctgctcttcctaaccctctcaacatgctggggcctcaggccagccagctaccttgccctccagtgacacagtcaccactgcacccaacaccgcctcctgcttccacggctgctggcatgccatctctccagcacacgacaccacctgggatgactcctccccagccagcagctcccactcagccatcaactcctgtgtcgtcttccgggcagactcccaccccgactcctggctcagtgcccagtgctacccaaacccagagcacccctacagtccaggcagcagcccaggcccaggtgaccccgcagcctcaaaccccagttcagcccccgtctgtggctacccctcagtcatcgcagcaacagccgacgcctgtgcacgcccagcctcctggcacaccgctttcccaggcagcagccagcattgataacagagtccctaccccctcctcggtggccagcgcagaaaccaattcccagcagccaggacctgacgtacctgtgctggaaatgaagacggagacccaagcagaggacactgagcccgatcctggtgaatccaaaggggagcccaggtctgagatgatggaggaggatttgcaaggagcttcccaagttaaagaagaaacagacatagcagagcagaaatcagaaccaatggaagtggatgaaaagaaacctgaagtgaaagtagaagttaaagaggaagaagagagtagcagtaacggcacagcctctcagtcaacatctccttcgcagccgcgcaaaaaaatctttaaaccagaggagttacgccaggccctcatgccaaccctagaagcactgtatcgacaggacccagagtcattacctttccggcagcctgtagatccccagctcctcggaattccagactattttgacatcgtaaagaatcccatggacctctccaccatcaagcggaagctggacacagggcaataccaagagccctggcagtacgtggacgacgtctggctcatgttcaacaatgcctggctctataatcgcaagacatcccgagtctataagttttgcagtaagcttgcagaggtctttgagcaggaaattgaccctgtcatgcagtcccttggatattgctgtggacgcaagtatgagttttccccacagactttgtgctgctatgggaagcagctgtgtaccattcctcgcgatgctgcctactacagctatcagaataggtatcatttctgtgagaagtgtttcacagagatccagggcgagaatgtgaccctgggtgacgacccttcacagccccagacgacaatttcaaaggatcagtttgaaaagaagaaaaatgataccttagaccccgaacctttcgttgattgcaaggagtgtggccggaagatgcatcagatttgcgttctgcactatgacatcatttggccttcaggttttgtgtgcgacaactgcttgaagaaaactggcagacctcgaaaagaaaacaaattcagtgctaagaggctgcagaccacaagactgggaaaccacttggaagaccgagtgaacaaatttttgcggcgccagaatcaccctgaagccggggaggtttttgtccgagtggtggccagctcagacaagacggtggaggtcaagcccgggatgaagtcacggtttgtggattctggggaaatgtctgaatctttcccatatcgaaccaaagctctgtttgcttttgaggaaattgacggcgtggatgtctgcttttttggaatgcacgtccaagaatacggctctgattgcccccctccaaacacgaggcgtgtgtacatttcttatctggatagtattcatttcttccggccacgttgcctccgcacagccgtttaccatgagatccttattggatatttagagtatgtgaagaaattagggtatgtgacagggcacatctgggcctgtcctccaagtgaaggagatgattacatcttccattgccacccacctgatcaaaaaatacccaagccaaaacgactgcaggagtggtacaaaaagatgctggacaaggcgtttgcagagcggatcatccatgactacaaggatattttcaaacaagcaactgaagacaggctcaccagtgccaaggaactgccctattttgaaggtgatttctggcccaatgtgttagaagagagcattaaggaactagaacaagaagaagaggagaggaaaaaggaagagagcactgcagccagtgaaaccactgagggcagtcagggcgacagcaagaatgccaagaagaagaacaacaagaaaaccaacaagaacaaaagcagcatcagccgcgccaacaagaagaagcccagcatgcccaacgtgtccaatgacctgtcccagaagctgtatgccaccatggagaagcacaaggaggtcttcttcgtgatccacctgcacgctgggcctgtcatcaacaccctgccccccatcgtcgaccccgaccccctgctcagctgtgacctcatggatgggcgcgacgccttcctcaccctcgccagagacaagcactgggagttctcctccttgcgccgctccaagtggtccacgctctgcatgctggtggagctgcacacccagggccaggaccgctttgtctacacctgcaacgagtgcaagcaccacgtggagacgcgctggcactgcactgtgtgcgaggactacgacctctgcatcaactgctataacacgaagagccatgcccataagatggtgaagtgggggctgggcctggatgacgagggcagcagccagggcgagccacagtcaaagagcccccaggagtcacgccggctgagcatccagcgctgcatccagtcgctggtgcacgcgtgccagtgccgcaacgccaactgctcgctgccatcctgccagaagatgaagcgggtggtgcagcacaccaagggctgcaaacgcaagaccaacgggggctgcccggtgtgcaagcagctcatcgccctctgctgctaccacgccaagcactgccaagaaaacaaatgccccgtgcccttctgcctcaacatcaaacacaagctccgccagcagcagatccagcaccgcctgcagcaggcccagctcatgcgccggcggatggccaccatgaacacccgcaacgtgcctcagcagagtctgccttctcctacctcagcaccgcccgggacccccacacagcagcccagcacaccccagacgccgcagccccctgcccagccccaaccctcacccgtgagcatgtcaccagctggcttccccagcgtggcccggactcagccccccaccacggtgtccacagggaagcctaccagccaggtgccggcccccccacccccggcccagccccctcctgcagcggtggaagcggctcggcagatcgagcgtgaggcccagcagcagcagcacctgtaccgggtgaacatcaacaacagcatgcccccaggacgcacgggcatggggaccccggggagccagatggcccccgtgagcctgaatgtgccccgacccaaccaggtgagcgggcccgtcatgcccagcatgcctcccgggcagtggcagcaggcgccccttccccagcagcagcccatgccaggcttgcccaggcctgtgatatccatgcaggcccaggcggccgtggctgggccccggatgcccagcgtgcagccacccaggagcatctcacccagcgctctgcaagacctgctgcggaccctgaagtcgcccagctcccctcagcagcaacagcaggtgctgaacattctcaaatcaaacccgcagctaatggcagctttcatcaaacagcgcacagccaagtacgtggccaatcagcccggcatgcagccccagcctggcctccagtcccagcccggcatgcaaccccagcctggcatgcaccagcagcccagcctgcagaacctgaatgccatgcaggctggcgtgccgcggcccggtgtgcctccacagcagcaggcgatgggaggcctgaacccccagggccaggccttgaacatcatgaacccaggacacaaccccaacatggcgagtatgaatccacagtaccgagaaatgttacggaggcagctgctgcagcagcagcagcaacagcagcagcaacaacagcagcaacagcagcagcagcaagggagtgccggcatggctgggggcatggcggggcacggccagttccagcagcctcaaggacccggaggctacccaccggccatgcagcagcagcagcgcatgcagcagcatctccccctccagggcagctccatgggccagatggcggctcagatgggacagcttggccagatggggcagccggggctgggggcagacagcacccccaacatccagcaagccctgcagcagcggattctgcagcaacagcagatgaagcagcagattgggtccccaggccagccgaaccccatgagcccccagcaacacatgctctcaggacagccacaggcctcgcatctccctggccagcagatcgccacgtcccttagtaaccaggtgcggtctccagcccctgtccagtctccacggccccagtcccagcctccacattccagcccgtcaccacggatacagccccagccttcgccacaccacgtctcaccccagactggttccccccaccccggactcgcagtcaccatggccagctccatagatcagggacacttggggaaccccgaacagagtgcaatgctcccccagctgaacacccccagcaggagtgcgctgtccagcgaactgtccctggtcggggacaccacgggggacacgctagagaagtttgtggagggcttgtagcattgtgagagcatcaccttttccctttcatgttcttggaccttttgtactgaaaatccaggcatctaggttctttttattcctagatggaactgcgacttccgagccatggaagggtggattgatgtttaaagaaacaatacaaagaatatatttttttgttaaaaaccagttgatttaaatatctggtctctctctttggtttttttttggcgggggggtggggggggttcttttttttccgttttgtttttgtttggggggaggggggttttgtttggattctttttgtcgtcattgctggtgactcatgcctttttttaacgggaaaaacaagttcattatattcatattttttatttgtattttcaagactttaaacatttatgtttaaaagtaagaagaaaaataatattcagaactgattcctgaaataatgcaagcttataatgtatcccgataactttgtgatgtttcgggaagatttttttctatagtgaactctgtgggcgtctcccagtattaccctggatgataggaattgactccggcgtgcacacacgtacacacccacacacatctatctatacataatggctgaagccaaacttgtcttgcagatgtagaaattgttgctttgtttctctgataaaactggttttagacaaaaaatagggatgatcactcttagaccatgctaatgttactagagaagaagccttcttttctttcttctatgtgaaacttgaaatgaggaaaagcaattctagtgtaaatcatgcaagcgctctaattcctataaatacgaaactcgagaagattcaatcactgtatagaatggtaaaataccaactcatttcttatatcatattgttaaataaactgtgtgcaacagacaaaaagggtggtccttcttgaattcatgtacatggtattaacacttagtgttcggggttttttgttatgaaaatgctgttttcaacattgtatttggactatgcatgtgttttttccccattgtatataaagtaccgcttaaaattgatataaattactgaggtttttaacatgtattctgttctttaagatccctgtaagaatgtttaaggtttttatttatttatatatattttttgagtctgttctttgtaagacatggttctggttgttcgctcatagcggagaggctggggctgcggttgtggttgtggcggcgtgggtggtggctgggaactgtggcccaggcttagcggccgcccggaggcttttcttcccggagactgaggtgggcgactgaggtgggcggctcagcgttggccccacacattcgaggctcacaggtgattgtcgctcacacagttagggtcgtcagttggtctgaaactgcatttggcccactcctccatcctccctgtccgtcgtagctgccacccccagaggcggcgcttcttcccgtgttcaggcggctccccccccccgtacacgactcccagaatctgaggcagagagtgctccaggctcgcgaggtgctttctgacttccccccaaatcctgccgctgccgcgcagcatgtcccgtgtggcgtttgaggaaatgctgagggacagacaccttggagcaccagctccggtccctgttacagtgagaaaggtcccccacttcgggggatacttgcacttagccacatggtcctgcctcccttggagtccagttccaggctcccttactgagtgggtgagacaagttcacaaaaaccgtaaaactgagaggaggaccatgggcaggggagctgaagttcatcccctaagtctaccacccccagcacccagagaacccactttatccctagtcccccaacaaaggctggtctaggtgggggtgatggtaattttagaaatcacgccccaaatagcttccgtttgggcccttacattcacagataggttttaaatagctgaatacttggtttgggaatctgaattcgaggaacctttctaagaagttggaaaggtccgatctagttttagcacagagctttgaaccttgagttataaaatgcagaataattcaagtaaaaataagaccaccatctggcacccctgaccagcccccattcaccccatcccaggaggggaagcacaggccgggcctccggtggagattgctgccactgctcggcctgctgggttcttaacctccagtgtcctcttcatcttttccacccgtagggaaaccttgagccatgtgttcaaacaagaagtggggctagagcccgagagcagcagctctaagcccacactcagaaagtggcgccctcctggttgtgcagccttttaatgtgggcagtggaggggcctctgtttcaggttatcctggaattcaaaacgttatgtaccaacctcatcctctttggagtctgcatcctgtgcaaccgtcttgggcaatccagatgtcgaaggatgtgaccgagagcatggtctgtggatgctaaccctaagtttgtcgtaaggaaatttctgtaagaaacctggaaagccccaacgctgtgtctcatgctgtatacttaagaggagaagaaaaagtcctatatttgtgatcaaaaagaggaaacttgaaatgtgatggtgtttataataaaagatggtaaaactacttggattcaaa

SEQ ID NO: 145840 - DNA, 7329 bp, Artificial Sequence
  derived and/or modified sequence
atggccgagaacctgctggacggcccccccaaccccaagagagccaagctgagcagccccggcttcagcgccaacgacagcaccgacttcggcagcctgttcgacctggagaacgacctgcccgacgagctgatccccaacggcggcgagctgggcctgctgaacagcggcaacctggtgcccgacgccgccagcaagcacaagcagctgagcgagctgctgagaggcggcagcggcagcagcatcaaccccggcatcggcaacgtgagcgccagcagccccgtgcagcagggcctgggcggccaggcccagggccagcccaacagcgccaacatggccagcctgagcgccatgggcaagagccccctgagccagggcgacagcagcgcccccagcctgcccaagcaggccgccagcaccagcggccccacccccgccgccagccaggccctgaacccccaggcccagaagcaggtgggcctggccaccagcagccccgccaccagccagaccggccccggcatctgcatgaacgccaacttcaaccagacccaccccggcctgctgaacagcaacagcggccacagcctgatcaaccaggccagccagggccaggcccaggtgatgaacggcagcctgggcgccgccggcagaggcagaggcgccggcatgccctaccccacccccgccatgcagggcgccagcagcagcgtgctggccgagaccctgacccaggtgagcccccagatgaccggccacgccggcctgaacaccgcccaggccggcggcatggccaagatgggcatcaccggcaacaccagccccttcggccagcccttcagccaggccggcggccagcccatgggcgccaccggcgtgaacccccagctggccagcaagcagagcatggtgaacagcctgcccaccttccccaccgacatcaagaacaccagcgtgaccaacgtgcccaacatgagccagatgcagaccagcgtgggcatcgtgcccacccaggccatcgccaccggccccaccgccgaccccgagaagagaaagctgatccagcagcagctggtgctgctgctgcacgcccacaagtgccagagaagagagcaggccaacggcgaggtgagagcctgcagcctgccccactgcagaaccatgaagaacgtgctgaaccacatgacccactgccaggccggcaaggcctgccaggtggcccactgcgccagcagcagacagatcatcagccactggaagaactgcaccagacacgactgccccgtgtgcctgcccctgaagaacgccagcgacaagagaaaccagcagaccatcctgggcagccccgccagcggcatccagaacaccatcggcagcgtgggcaccggccagcagaacgccaccagcctgagcaaccccaaccccatcgaccccagcagcatgcagagagcctacgccgccctgggcctgccctacatgaaccagccccagacccagctgcagccccaggtgcccggccagcagcccgcccagccccagacccaccagcagatgagaaccctgaaccccctgggcaacaaccccatgaacatccccgccggcggcatcaccaccgaccagcagccccccaacctgatcagcgagagcgccctgcccaccagcctgggcgccaccaaccccctgatgaacgacggcagcaacagcggcaacatcggcaccctgagcaccatccccaccgccgccccccccagcagcaccggcgtgagaaagggctggcacgagcacgtgacccaggacctgagaagccacctggtgcacaagctggtgcaggccatcttccccacccccgaccccgccgccctgaaggacagaagaatggagaacctggtggcctacgccaagaaggtggagggcgacatgtacgagagcgccaacagcagagacgagtactaccacctgctggccgagaagatctacaagatccagaaggagctggaggagaagagaagaagcagactgcacaagcagggcatcctgggcaaccagcccgccctgcccgcccccggcgcccagccccccgtgatcccccaggcccagcccgtgagaccccccaacggccccctgagcctgcccgtgaacagaatgcaggtgagccagggcatgaacagcttcaaccccatgagcctgggcaacgtgcagctgccccaggcccccatgggccccagagccgccagccccatgaaccacagcgtgcagatgaacagcatgggcagcgtgcccggcatggccatcagccccagcagaatgccccagccccccaacatgatgggcgcccacaccaacaacatgatggcccaggcccccgcccagagccagttcctgccccagaaccagttccccagcagcagcggcgccatgagcgtgggcatgggccagccccccgcccagaccggcgtgagccagggccaggtgcccggcgccgccctgcccaaccccctgaacatgctgggcccccaggccagccagctgccctgcccccccgtgacccagagccccctgcaccccacccccccccccgccagcaccgccgccggcatgcccagcctgcagcacaccaccccccccggcatgacccccccccagcccgccgcccccacccagcccagcacccccgtgagcagcagcggccagacccccacccccacccccggcagcgtgcccagcgccacccagacccagagcacccccaccgtgcaggccgccgcccaggcccaggtgaccccccagccccagacccccgtgcagccccccagcgtggccaccccccagagcagccagcagcagcccacccccgtgcacgcccagccccccggcacccccctgagccaggccgccgccagcatcgacaacagagtgcccacccccagcagcgtggccagcgccgagaccaacagccagcagcccggccccgacgtgcccgtgctggagatgaagaccgagacccaggccgaggacaccgagcccgaccccggcgagagcaagggcgagcccagaagcgagatgatggaggaggacctgcagggcgccagccaggtgaaggaggagaccgacatcgccgagcagaagagcgagcccatggaggtggacgagaagaagcccgaggtgaaggtggaggtgaaggaggaggaggagagcagcagcaacggcaccgccagccagagcaccagccccagccagcccagaaagaagatcttcaagcccgaggagctgagacaggccctgatgcccaccctggaggccctgtacagacaggaccccgagagcctgcccttcagacagcccgtggacccccagctgctgggcatccccgactacttcgacatcgtgaagaaccccatggacctgagcaccatcaagagaaagctggacaccggccagtaccaggagccctggcagtacgtggacgacgtgtggctgatgttcaacaacgcctggctgtacaacagaaagaccagcagagtgtacaagttctgcagcaagctggccgaggtgttcgagcaggagatcgaccccgtgatgcagagcctgggctactgctgcggcagaaagtacgagttcagcccccagaccctgtgctgctacggcaagcagctgtgcaccatccccagagacgccgcctactacagctaccagaacagataccacttctgcgagaagtgcttcaccgagatccagggcgagaacgtgaccctgggcgacgaccccagccagccccagaccaccatcagcaaggaccagttcgagaagaagaagaacgacaccctggaccccgagcccttcgtggactgcaaggagtgcggcagaaagatgcaccagatctgcgtgctgcactacgacatcatctggcccagcggcttcgtgtgcgacaactgcctgaagaagaccggcagacccagaaaggagaacaagttcagcgccaagagactgcagaccaccagactgggcaaccacctggaggacagagtgaacaagttcctgagaagacagaaccaccccgaggccggcgaggtgttcgtgagagtggtggccagcagcgacaagaccgtggaggtgaagcccggcatgaagagcagattcgtggacagcggcgagatgagcgagagcttcccctacagaaccaaggccctgttcgccttcgaggagatcgacggcgtggacgtgtgcttcttcggcatgcacgtgcaggagtacggcagcgactgccccccccccaacaccagaagagtgtacatcagctacctggacagcatccacttcttcagacccagatgcctgagaaccgccgtgtaccacgagatcctgatcggctacctggagtacgtgaagaagctgggctacgtgaccggccacatctgggcctgcccccccagcgagggcgacgactacatcttccactgccacccccccgaccagaagatccccaagcccaagagactgcaggagtggtacaagaagatgctggacaaggccttcgccgagagaatcatccacgactacaaggacatcttcaagcaggccaccgaggacagactgaccagcgccaaggagctgccctacttcgagggcgacttctggcccaacgtgctggaggagagcatcaaggagctggagcaggaggaggaggagagaaagaaggaggagagcaccgccgccagcgagaccaccgagggcagccagggcgacagcaagaacgccaagaagaagaacaacaagaagaccaacaagaacaagagcagcatcagcagagccaacaagaagaagcccagcatgcccaacgtgagcaacgacctgagccagaagctgtacgccaccatggagaagcacaaggaggtgttcttcgtgatccacctgcacgccggccccgtgatcaacaccctgccccccatcgtggaccccgaccccctgctgagctgcgacctgatggacggcagagacgccttcctgaccctggccagagacaagcactgggagttcagcagcctgagaagaagcaagtggagcaccctgtgcatgctggtggagctgcacacccagggccaggacagattcgtgtacacctgcaacgagtgcaagcaccacgtggagaccagatggcactgcaccgtgtgcgaggactacgacctgtgcatcaactgctacaacaccaagagccacgcccacaagatggtgaagtggggcctgggcctggacgacgagggcagcagccagggcgagccccagagcaagagcccccaggagagcagaagactgagcatccagagatgcatccagagcctggtgcacgcctgccagtgcagaaacgccaactgcagcctgcccagctgccagaagatgaagagagtggtgcagcacaccaagggctgcaagagaaagaccaacggcggctgccccgtgtgcaagcagctgatcgccctgtgctgctaccacgccaagcactgccaggagaacaagtgccccgtgcccttctgcctgaacatcaagcacaagctgagacagcagcagatccagcacagactgcagcaggcccagctgatgagaagaagaatggccaccatgaacaccagaaacgtgccccagcagagcctgcccagccccaccagcgccccccccggcacccccacccagcagcccagcaccccccagaccccccagccccccgcccagccccagcccagccccgtgagcatgagccccgccggcttccccagcgtggccagaacccagccccccaccaccgtgagcaccggcaagcccaccagccaggtgcccgccccccccccccccgcccagcccccccccgccgccgtggaggccgccagacagatcgagagagaggcccagcagcagcagcacctgtacagagtgaacatcaacaacagcatgccccccggcagaaccggcatgggcacccccggcagccagatggcccccgtgagcctgaacgtgcccagacccaaccaggtgagcggccccgtgatgcccagcatgccccccggccagtggcagcaggcccccctgccccagcagcagcccatgcccggcctgcccagacccgtgatcagcatgcaggcccaggccgccgtggccggccccagaatgcccagcgtgcagccccccagaagcatcagccccagcgccctgcaggacctgctgagaaccctgaagagccccagcagcccccagcagcagcagcaggtgctgaacatcctgaagagcaacccccagctgatggccgccttcatcaagcagagaaccgccaagtacgtggccaaccagcccggcatgcagccccagcccggcctgcagagccagcccggcatgcagccccagcccggcatgcaccagcagcccagcctgcagaacctgaacgccatgcaggccggcgtgcccagacccggcgtgcccccccagcagcaggccatgggcggcctgaacccccagggccaggccctgaacatcatgaaccccggccacaaccccaacatggccagcatgaacccccagtacagagagatgctgagaagacagctgctgcagcagcagcagcagcagcagcagcagcagcagcagcagcagcagcagcagcagggcagcgccggcatggccggcggcatggccggccacggccagttccagcagccccagggccccggcggctacccccccgccatgcagcagcagcagagaatgcagcagcacctgcccctgcagggcagcagcatgggccagatggccgcccagatgggccagctgggccagatgggccagcccggcctgggcgccgacagcacccccaacatccagcaggccctgcagcagagaatcctgcagcagcagcagatgaagcagcagatcggcagccccggccagcccaaccccatgagcccccagcagcacatgctgagcggccagccccaggccagccacctgcccggccagcagatcgccaccagcctgagcaaccaggtgagaagccccgcccccgtgcagagccccagaccccagagccagcccccccacagcagccccagccccagaatccagccccagcccagcccccaccacgtgagcccccagaccggcagcccccaccccggcctggccgtgaccatggccagcagcatcgaccagggccacctgggcaaccccgagcagagcgccatgctgccccagctgaacacccccagcagaagcgccctgagcagcgagctgagcctggtgggcgacaccaccggcgacaccctggagaagttcgtggagggcctgtag

SEQ ID NO: 145841 - DNA, 7215 bp, Artificial Sequence
  derived and/or modified sequence
atggccgagaacctgctggacggcccccccaaccccaagagagccaagctgagcagccccggcttcagcgccaacgacagcaccgacttcggcagcctgttcgacctggagaacgacctgcccgacgagctgatccccaacggcggcgagctgggcctgctgaacagcggcaacctggtgcccgacgccgccagcaagcacaagcagctgagcgagctgctgagaggcggcagcggcagcagcatcaaccccggcatcggcaacgtgagcgccagcagccccgtgcagcagggcctgggcggccaggcccagggccagcccaacagcgccaacatggccagcctgagcgccatgggcaagagccccctgagccagggcgacagcagcgcccccagcctgcccaagcaggccgccagcaccagcggccccacccccgccgccagccaggccctgaacccccaggcccagaagcaggtgggcctggccaccagcagccccgccaccagccagaccggccccggcatctgcatgaacgccaacttcaaccagacccaccccggcctgctgaacagcaacagcggccacagcctgatcaaccaggccagccagggccaggcccaggtgatgaacggcagcctgggcgccgccggcagaggcagaggcgccggcatgccctaccccacccccgccatgcagggcgccagcagcagcgtgctggccgagaccctgacccaggtgagcccccagatgaccggccacgccggcctgaacaccgcccaggccggcggcatggccaagatgggcatcaccggcaacaccagccccttcggccagcccttcagccaggccggcggccagcccatgggcgccaccggcgtgaacccccagctggccagcaagcagagcatggtgaacagcctgcccaccttccccaccgacatcaagaacaccagcgtgaccaacgtgcccaacatgagccagatgcagaccagcgtgggcatcgtgcccacccaggccatcgccaccggccccaccgccgaccccgagaagagaaagctgatccagcagcagctggtgctgctgctgcacgcccacaagtgccagagaagagagcaggccaacggcgaggtgagagcctgcagcctgccccactgcagaaccatgaagaacgtgctgaaccacatgacccactgccaggccggcaaggcctgccaggccatcctgggcagccccgccagcggcatccagaacaccatcggcagcgtgggcaccggccagcagaacgccaccagcctgagcaaccccaaccccatcgaccccagcagcatgcagagagcctacgccgccctgggcctgccctacatgaaccagccccagacccagctgcagccccaggtgcccggccagcagcccgcccagccccagacccaccagcagatgagaaccctgaaccccctgggcaacaaccccatgaacatccccgccggcggcatcaccaccgaccagcagccccccaacctgatcagcgagagcgccctgcccaccagcctgggcgccaccaaccccctgatgaacgacggcagcaacagcggcaacatcggcaccctgagcaccatccccaccgccgccccccccagcagcaccggcgtgagaaagggctggcacgagcacgtgacccaggacctgagaagccacctggtgcacaagctggtgcaggccatcttccccacccccgaccccgccgccctgaaggacagaagaatggagaacctggtggcctacgccaagaaggtggagggcgacatgtacgagagcgccaacagcagagacgagtactaccacctgctggccgagaagatctacaagatccagaaggagctggaggagaagagaagaagcagactgcacaagcagggcatcctgggcaaccagcccgccctgcccgcccccggcgcccagccccccgtgatcccccaggcccagcccgtgagaccccccaacggccccctgagcctgcccgtgaacagaatgcaggtgagccagggcatgaacagcttcaaccccatgagcctgggcaacgtgcagctgccccaggcccccatgggccccagagccgccagccccatgaaccacagcgtgcagatgaacagcatgggcagcgtgcccggcatggccatcagccccagcagaatgccccagccccccaacatgatgggcgcccacaccaacaacatgatggcccaggcccccgcccagagccagttcctgccccagaaccagttccccagcagcagcggcgccatgagcgtgggcatgggccagccccccgcccagaccggcgtgagccagggccaggtgcccggcgccgccctgcccaaccccctgaacatgctgggcccccaggccagccagctgccctgcccccccgtgacccagagccccctgcaccccacccccccccccgccagcaccgccgccggcatgcccagcctgcagcacaccaccccccccggcatgacccccccccagcccgccgcccccacccagcccagcacccccgtgagcagcagcggccagacccccacccccacccccggcagcgtgcccagcgccacccagacccagagcacccccaccgtgcaggccgccgcccaggcccaggtgaccccccagccccagacccccgtgcagccccccagcgtggccaccccccagagcagccagcagcagcccacccccgtgcacgcccagccccccggcacccccctgagccaggccgccgccagcatcgacaacagagtgcccacccccagcagcgtggccagcgccgagaccaacagccagcagcccggccccgacgtgcccgtgctggagatgaagaccgagacccaggccgaggacaccgagcccgaccccggcgagagcaagggcgagcccagaagcgagatgatggaggaggacctgcagggcgccagccaggtgaaggaggagaccgacatcgccgagcagaagagcgagcccatggaggtggacgagaagaagcccgaggtgaaggtggaggtgaaggaggaggaggagagcagcagcaacggcaccgccagccagagcaccagccccagccagcccagaaagaagatcttcaagcccgaggagctgagacaggccctgatgcccaccctggaggccctgtacagacaggaccccgagagcctgcccttcagacagcccgtggacccccagctgctgggcatccccgactacttcgacatcgtgaagaaccccatggacctgagcaccatcaagagaaagctggacaccggccagtaccaggagccctggcagtacgtggacgacgtgtggctgatgttcaacaacgcctggctgtacaacagaaagaccagcagagtgtacaagttctgcagcaagctggccgaggtgttcgagcaggagatcgaccccgtgatgcagagcctgggctactgctgcggcagaaagtacgagttcagcccccagaccctgtgctgctacggcaagcagctgtgcaccatccccagagacgccgcctactacagctaccagaacagataccacttctgcgagaagtgcttcaccgagatccagggcgagaacgtgaccctgggcgacgaccccagccagccccagaccaccatcagcaaggaccagttcgagaagaagaagaacgacaccctggaccccgagcccttcgtggactgcaaggagtgcggcagaaagatgcaccagatctgcgtgctgcactacgacatcatctggcccagcggcttcgtgtgcgacaactgcctgaagaagaccggcagacccagaaaggagaacaagttcagcgccaagagactgcagaccaccagactgggcaaccacctggaggacagagtgaacaagttcctgagaagacagaaccaccccgaggccggcgaggtgttcgtgagagtggtggccagcagcgacaagaccgtggaggtgaagcccggcatgaagagcagattcgtggacagcggcgagatgagcgagagcttcccctacagaaccaaggccctgttcgccttcgaggagatcgacggcgtggacgtgtgcttcttcggcatgcacgtgcaggagtacggcagcgactgccccccccccaacaccagaagagtgtacatcagctacctggacagcatccacttcttcagacccagatgcctgagaaccgccgtgtaccacgagatcctgatcggctacctggagtacgtgaagaagctgggctacgtgaccggccacatctgggcctgcccccccagcgagggcgacgactacatcttccactgccacccccccgaccagaagatccccaagcccaagagactgcaggagtggtacaagaagatgctggacaaggccttcgccgagagaatcatccacgactacaaggacatcttcaagcaggccaccgaggacagactgaccagcgccaaggagctgccctacttcgagggcgacttctggcccaacgtgctggaggagagcatcaaggagctggagcaggaggaggaggagagaaagaaggaggagagcaccgccgccagcgagaccaccgagggcagccagggcgacagcaagaacgccaagaagaagaacaacaagaagaccaacaagaacaagagcagcatcagcagagccaacaagaagaagcccagcatgcccaacgtgagcaacgacctgagccagaagctgtacgccaccatggagaagcacaaggaggtgttcttcgtgatccacctgcacgccggccccgtgatcaacaccctgccccccatcgtggaccccgaccccctgctgagctgcgacctgatggacggcagagacgccttcctgaccctggccagagacaagcactgggagttcagcagcctgagaagaagcaagtggagcaccctgtgcatgctggtggagctgcacacccagggccaggacagattcgtgtacacctgcaacgagtgcaagcaccacgtggagaccagatggcactgcaccgtgtgcgaggactacgacctgtgcatcaactgctacaacaccaagagccacgcccacaagatggtgaagtggggcctgggcctggacgacgagggcagcagccagggcgagccccagagcaagagcccccaggagagcagaagactgagcatccagagatgcatccagagcctggtgcacgcctgccagtgcagaaacgccaactgcagcctgcccagctgccagaagatgaagagagtggtgcagcacaccaagggctgcaagagaaagaccaacggcggctgccccgtgtgcaagcagctgatcgccctgtgctgctaccacgccaagcactgccaggagaacaagtgccccgtgcccttctgcctgaacatcaagcacaagctgagacagcagcagatccagcacagactgcagcaggcccagctgatgagaagaagaatggccaccatgaacaccagaaacgtgccccagcagagcctgcccagccccaccagcgccccccccggcacccccacccagcagcccagcaccccccagaccccccagccccccgcccagccccagcccagccccgtgagcatgagccccgccggcttccccagcgtggccagaacccagccccccaccaccgtgagcaccggcaagcccaccagccaggtgcccgccccccccccccccgcccagcccccccccgccgccgtggaggccgccagacagatcgagagagaggcccagcagcagcagcacctgtacagagtgaacatcaacaacagcatgccccccggcagaaccggcatgggcacccccggcagccagatggcccccgtgagcctgaacgtgcccagacccaaccaggtgagcggccccgtgatgcccagcatgccccccggccagtggcagcaggcccccctgccccagcagcagcccatgcccggcctgcccagacccgtgatcagcatgcaggcccaggccgccgtggccggccccagaatgcccagcgtgcagccccccagaagcatcagccccagcgccctgcaggacctgctgagaaccctgaagagccccagcagcccccagcagcagcagcaggtgctgaacatcctgaagagcaacccccagctgatggccgccttcatcaagcagagaaccgccaagtacgtggccaaccagcccggcatgcagccccagcccggcctgcagagccagcccggcatgcagccccagcccggcatgcaccagcagcccagcctgcagaacctgaacgccatgcaggccggcgtgcccagacccggcgtgcccccccagcagcaggccatgggcggcctgaacccccagggccaggccctgaacatcatgaaccccggccacaaccccaacatggccagcatgaacccccagtacagagagatgctgagaagacagctgctgcagcagcagcagcagcagcagcagcagcagcagcagcagcagcagcagcagcagggcagcgccggcatggccggcggcatggccggccacggccagttccagcagccccagggccccggcggctacccccccgccatgcagcagcagcagagaatgcagcagcacctgcccctgcagggcagcagcatgggccagatggccgcccagatgggccagctgggccagatgggccagcccggcctgggcgccgacagcacccccaacatccagcaggccctgcagcagagaatcctgcagcagcagcagatgaagcagcagatcggcagccccggccagcccaaccccatgagcccccagcagcacatgctgagcggccagccccaggccagccacctgcccggccagcagatcgccaccagcctgagcaaccaggtgagaagccccgcccccgtgcagagccccagaccccagagccagcccccccacagcagccccagccccagaatccagccccagcccagcccccaccacgtgagcccccagaccggcagcccccaccccggcctggccgtgaccatggccagcagcatcgaccagggccacctgggcaaccccgagcagagcgccatgctgccccagctgaacacccccagcagaagcgccctgagcagcgagctgagcctggtgggcgacaccaccggcgacaccctggagaagttcgtggagggcctgtag

SEQ ID NO: 145842 - DNA, 7419 bp, Artificial Sequence
  derived and/or modified sequence
ctgagaggcgccgtggccgtggccgagatctggccccccccccccccccccggcctgagaccccccagccccagcgcccccgccagacccctggccgccagagccagaagcagccccagccagcccgccggcccccccacccccgtgagagccctggccggccccgccgccagagccagaggctgcttcagagagcaggtgaagatggccgagaacctgctggacggcccccccaaccccaagagagccaagctgagcagccccggcttcagcgccaacgacagcaccgacttcggcagcctgttcgacctggagaacgacctgcccgacgagctgatccccaacggcggcgagctgggcctgctgaacagcggcaacctggtgcccgacgccgccagcaagcacaagcagctgagcgagctgctgagaggcggcagcggcagcagcatcaaccccggcatcggcaacgtgagcgccagcagccccgtgcagcagggcctgggcggccaggcccagggccagcccaacagcgccaacatggccagcctgagcgccatgggcaagagccccctgagccagggcgacagcagcgcccccagcctgcccaagcaggccgccagcaccagcggccccacccccgccgccagccaggccctgaacccccaggcccagaagcaggtgggcctggccaccagcagccccgccaccagccagaccggccccggcatctgcatgaacgccaacttcaaccagacccaccccggcctgctgaacagcaacagcggccacagcctgatcaaccaggccagccagggccaggcccaggtgatgaacggcagcctgggcgccgccggcagaggcagaggcgccggcatgccctaccccacccccgccatgcagggcgccagcagcagcgtgctggccgagaccctgacccaggtgagcccccagatgaccggccacgccggcctgaacaccgcccaggccggcggcatggccaagatgggcatcaccggcaacaccagccccttcggccagcccttcagccaggccggcggccagcccatgggcgccaccggcgtgaacccccagctggccagcaagcagagcatggtgaacagcctgcccaccttccccaccgacatcaagaacaccagcgtgaccaacgtgcccaacatgagccagatgcagaccagcgtgggcatcgtgcccacccaggccatcgccaccggccccaccgccgaccccgagaagagaaagctgatccagcagcagctggtgctgctgctgcacgcccacaagtgccagagaagagagcaggccaacggcgaggtgagagcctgcagcctgccccactgcagaaccatgaagaacgtgctgaaccacatgacccactgccaggccggcaaggcctgccaggccatcctgggcagccccgccagcggcatccagaacaccatcggcagcgtgggcaccggccagcagaacgccaccagcctgagcaaccccaaccccatcgaccccagcagcatgcagagagcctacgccgccctgggcctgccctacatgaaccagccccagacccagctgcagccccaggtgcccggccagcagcccgcccagccccagacccaccagcagatgagaaccctgaaccccctgggcaacaaccccatgaacatccccgccggcggcatcaccaccgaccagcagccccccaacctgatcagcgagagcgccctgcccaccagcctgggcgccaccaaccccctgatgaacgacggcagcaacagcggcaacatcggcaccctgagcaccatccccaccgccgccccccccagcagcaccggcgtgagaaagggctggcacgagcacgtgacccaggacctgagaagccacctggtgcacaagctggtgcaggccatcttccccacccccgaccccgccgccctgaaggacagaagaatggagaacctggtggcctacgccaagaaggtggagggcgacatgtacgagagcgccaacagcagagacgagtactaccacctgctggccgagaagatctacaagatccagaaggagctggaggagaagagaagaagcagactgcacaagcagggcatcctgggcaaccagcccgccctgcccgcccccggcgcccagccccccgtgatcccccaggcccagcccgtgagaccccccaacggccccctgagcctgcccgtgaacagaatgcaggtgagccagggcatgaacagcttcaaccccatgagcctgggcaacgtgcagctgccccaggcccccatgggccccagagccgccagccccatgaaccacagcgtgcagatgaacagcatgggcagcgtgcccggcatggccatcagccccagcagaatgccccagccccccaacatgatgggcgcccacaccaacaacatgatggcccaggcccccgcccagagccagttcctgccccagaaccagttccccagcagcagcggcgccatgagcgtgggcatgggccagccccccgcccagaccggcgtgagccagggccaggtgcccggcgccgccctgcccaaccccctgaacatgctgggcccccaggccagccagctgccctgcccccccgtgacccagagccccctgcaccccacccccccccccgccagcaccgccgccggcatgcccagcctgcagcacaccaccccccccggcatgacccccccccagcccgccgcccccacccagcccagcacccccgtgagcagcagcggccagacccccacccccacccccggcagcgtgcccagcgccacccagacccagagcacccccaccgtgcaggccgccgcccaggcccaggtgaccccccagccccagacccccgtgcagccccccagcgtggccaccccccagagcagccagcagcagcccacccccgtgcacgcccagccccccggcacccccctgagccaggccgccgccagcatcgacaacagagtgcccacccccagcagcgtggccagcgccgagaccaacagccagcagcccggccccgacgtgcccgtgctggagatgaagaccgagacccaggccgaggacaccgagcccgaccccggcgagagcaagggcgagcccagaagcgagatgatggaggaggacctgcagggcgccagccaggtgaaggaggagaccgacatcgccgagcagaagagcgagcccatggaggtggacgagaagaagcccgaggtgaaggtggaggtgaaggaggaggaggagagcagcagcaacggcaccgccagccagagcaccagccccagccagcccagaaagaagatcttcaagcccgaggagctgagacaggccctgatgcccaccctggaggccctgtacagacaggaccccgagagcctgcccttcagacagcccgtggacccccagctgctgggcatccccgactacttcgacatcgtgaagaaccccatggacctgagcaccatcaagagaaagctggacaccggccagtaccaggagccctggcagtacgtggacgacgtgtggctgatgttcaacaacgcctggctgtacaacagaaagaccagcagagtgtacaagttctgcagcaagctggccgaggtgttcgagcaggagatcgaccccgtgatgcagagcctgggctactgctgcggcagaaagtacgagttcagcccccagaccctgtgctgctacggcaagcagctgtgcaccatccccagagacgccgcctactacagctaccagaacagataccacttctgcgagaagtgcttcaccgagatccagggcgagaacgtgaccctgggcgacgaccccagccagccccagaccaccatcagcaaggaccagttcgagaagaagaagaacgacaccctggaccccgagcccttcgtggactgcaaggagtgcggcagaaagatgcaccagatctgcgtgctgcactacgacatcatctggcccagcggcttcgtgtgcgacaactgcctgaagaagaccggcagacccagaaaggagaacaagttcagcgccaagagactgcagaccaccagactgggcaaccacctggaggacagagtgaacaagttcctgagaagacagaaccaccccgaggccggcgaggtgttcgtgagagtggtggccagcagcgacaagaccgtggaggtgaagcccggcatgaagagcagattcgtggacagcggcgagatgagcgagagcttcccctacagaaccaaggccctgttcgccttcgaggagatcgacggcgtggacgtgtgcttcttcggcatgcacgtgcaggagtacggcagcgactgccccccccccaacaccagaagagtgtacatcagctacctggacagcatccacttcttcagacccagatgcctgagaaccgccgtgtaccacgagatcctgatcggctacctggagtacgtgaagaagctgggctacgtgaccggccacatctgggcctgcccccccagcgagggcgacgactacatcttccactgccacccccccgaccagaagatccccaagcccaagagactgcaggagtggtacaagaagatgctggacaaggccttcgccgagagaatcatccacgactacaaggacatcttcaagcaggccaccgaggacagactgaccagcgccaaggagctgccctacttcgagggcgacttctggcccaacgtgctggaggagagcatcaaggagctggagcaggaggaggaggagagaaagaaggaggagagcaccgccgccagcgagaccaccgagggcagccagggcgacagcaagaacgccaagaagaagaacaacaagaagaccaacaagaacaagagcagcatcagcagagccaacaagaagaagcccagcatgcccaacgtgagcaacgacctgagccagaagctgtacgccaccatggagaagcacaaggaggtgttcttcgtgatccacctgcacgccggccccgtgatcaacaccctgccccccatcgtggaccccgaccccctgctgagctgcgacctgatggacggcagagacgccttcctgaccctggccagagacaagcactgggagttcagcagcctgagaagaagcaagtggagcaccctgtgcatgctggtggagctgcacacccagggccaggacagattcgtgtacacctgcaacgagtgcaagcaccacgtggagaccagatggcactgcaccgtgtgcgaggactacgacctgtgcatcaactgctacaacaccaagagccacgcccacaagatggtgaagtggggcctgggcctggacgacgagggcagcagccagggcgagccccagagcaagagcccccaggagagcagaagactgagcatccagagatgcatccagagcctggtgcacgcctgccagtgcagaaacgccaactgcagcctgcccagctgccagaagatgaagagagtggtgcagcacaccaagggctgcaagagaaagaccaacggcggctgccccgtgtgcaagcagctgatcgccctgtgctgctaccacgccaagcactgccaggagaacaagtgccccgtgcccttctgcctgaacatcaagcacaagctgagacagcagcagatccagcacagactgcagcaggcccagctgatgagaagaagaatggccaccatgaacaccagaaacgtgccccagcagagcctgcccagccccaccagcgccccccccggcacccccacccagcagcccagcaccccccagaccccccagccccccgcccagccccagcccagccccgtgagcatgagccccgccggcttccccagcgtggccagaacccagccccccaccaccgtgagcaccggcaagcccaccagccaggtgcccgccccccccccccccgcccagcccccccccgccgccgtggaggccgccagacagatcgagagagaggcccagcagcagcagcacctgtacagagtgaacatcaacaacagcatgccccccggcagaaccggcatgggcacccccggcagccagatggcccccgtgagcctgaacgtgcccagacccaaccaggtgagcggccccgtgatgcccagcatgccccccggccagtggcagcaggcccccctgccccagcagcagcccatgcccggcctgcccagacccgtgatcagcatgcaggcccaggccgccgtggccggccccagaatgcccagcgtgcagccccccagaagcatcagccccagcgccctgcaggacctgctgagaaccctgaagagccccagcagcccccagcagcagcagcaggtgctgaacatcctgaagagcaacccccagctgatggccgccttcatcaagcagagaaccgccaagtacgtggccaaccagcccggcatgcagccccagcccggcctgcagagccagcccggcatgcagccccagcccggcatgcaccagcagcccagcctgcagaacctgaacgccatgcaggccggcgtgcccagacccggcgtgcccccccagcagcaggccatgggcggcctgaacccccagggccaggccctgaacatcatgaaccccggccacaaccccaacatggccagcatgaacccccagtacagagagatgctgagaagacagctgctgcagcagcagcagcagcagcagcagcagcagcagcagcagcagcagcagcagcagggcagcgccggcatggccggcggcatggccggccacggccagttccagcagccccagggccccggcggctacccccccgccatgcagcagcagcagagaatgcagcagcacctgcccctgcagggcagcagcatgggccagatggccgcccagatgggccagctgggccagatgggccagcccggcctgggcgccgacagcacccccaacatccagcaggccctgcagcagagaatcctgcagcagcagcagatgaagcagcagatcggcagccccggccagcccaaccccatgagcccccagcagcacatgctgagcggccagccccaggccagccacctgcccggccagcagatcgccaccagcctgagcaaccaggtgagaagccccgcccccgtgcagagccccagaccccagagccagcccccccacagcagccccagccccagaatccagccccagcccagcccccaccacgtgagcccccagaccggcagcccccaccccggcctggccgtgaccatggccagcagcatcgaccagggccacctgggcaaccccgagcagagcgccatgctgccccagctgaacacccccagcagaagcgccctgagcagcgagctgagcctggtgggcgacaccaccggcgacaccctggagaagttcgtggagggcctgtag

SEQ ID NO: 145843 - protein, 703 aa, Artificial Sequence
  derived and/or modified sequence
MAELMLLSEIADPTRFFTDNLLSPEDWGLQNSTLYSGLDEVAEEQTQLFRCPEQDVPFDGSSLDVGMDVSPSEPPWELLPIFPDLQVKSEPSSPCSSSSLSSESSRLSTEPSSEALGVGEVLHVKTESLAPPLCLLGDDPTSSFETVQINVIPTSDDSSDVQTKIEPVSPCSSVNSEASLLSADSSSQAFIGEEVLEVKTESLSPSGCLLWDVPAPSLGAVQISMGPSLDGSSGKALPTRKPPLQPKPVVLTTVPMPSRAVPPSTTVLLQSLVQPPPVSPVVLIQGAIRVQPEGPAPSLPRPERKSIVPAPMPGNSCPPEVDAKLLKRQQRMIKNRESACQSRRKKKEYLQGLEARLQAVLADNQQLRRENAALRRRLEALLAENSELKLGSGNRKVVCIMVFLLFIAFNFGPVSISEPPSAPISPRMNKGEPQPRRHLLGFSEQEPVQGVEPLQGSSQGPKEPQPSPTDQPSFSNLTAFPGGAKELLLRDLDQLFLSSDCRHFNRTESLRLADELSGWVQRHQRGRRKIPQRAQERQKSQPRKKSPPVKAVPIQPPGPPERDSVGQLQLYRHPDRSQPAFLDAIDRREDTFYVVSFRRDHLLLPAISHNKTSRPKMSLVMPAMAPNETLSGRGAPGDYEEMMQIECEVMDTRVIHIKTSTVPPSLRKQPSPTPGNATGGPLPVSAASQAHQASHQPLYLNHP

SEQ ID NO: 145844 - protein, 142 aa, Artificial Sequence
  derived and/or modified sequence
  misc_feature (1)..(1): Xaa can be any naturally occurring amino acid
XQPSPTDQPSFSNLTAFPGGAKELLLRDLDQLFLSSDCRHFNRTESLRLADELSGWVQRHQRGRRKIPQRAQERQSLDTSPSRSLSHGRSHLQLRQSPSNPLDPQKGILWASCNYIATQTVRSQHSWMQLTDGKTHFMLSLS

SEQ ID NO: 145845 - DNA, 2622 bp, Artificial Sequence
  derived and/or modified sequence
aaccgtctcctggttggggggtgggggggaaagatggcggagctgatgctgctcagcgagattgctgacccgacgcgtttcttcaccgacaacctgcttagcccggaggactggggtctgcagaacagcaccttgtattctggcctagatgaagtggccgaggagcagacgcagctcttccgttgcccggagcaggatgtcccgtttgacggcagctccctggacgtggggatggatgtcagcccctctgagcccccatgggaactcctgccgatcttcccagatcttcaggtgaagtctgagccatcttccccctgctcttcctcctccctcagctccgagtcatcgcgtctctccacagagccatccagcgaggctcttggggtaggggaggtgctccatgtgaagacagagtccttggcacccccactgtgtctcctgggagatgacccaacatcctcatttgaaaccgtccagatcaacgttatccccacctctgatgattcctcagatgtccagaccaagatagaacctgtctctccatgttcttccgtcaactctgaggcctccctgctctcagccgactcctccagccaggcttttataggagaggaggtcctggaagtgaagacagagtccctgtccccttcaggatgcctcctgtgggatgtcccagccccctcacttggagctgtccagatcagcatgggcccatcccttgatggctcctcaggcaaagccctgcccacccggaagccgccactgcagcccaaacctgtagtgctaaccactgtcccaatgccatccagagctgtgcctcccagcaccacagtccttctgcagtccctcgtccagccacccccagtgtccccagttgtcctcatccagggtgctattcgagtccagcctgaagggccggctccctctctaccacggcctgagaggaagagcatcgttcccgctcctatgcctggaaactcctgcccgcctgaagtggatgcaaagctgctgaagcggcagcagcgaatgatcaagaaccgggagtcagcctgccagtcccggagaaagaagaaagagtatctgcagggactggaggctcggctgcaagcagtactggctgacaaccagcagctccgccgagagaatgctgccctccggcggcggctggaggccctgctggctgaaaacagcgagctcaagttagggtctggaaacaggaaggtggtctgcatcatggtcttccttctcttcattgccttcaactttggacctgtcagcatcagtgagcctccttcagctcccatctctcctcggatgaacaagggggagcctcaaccccggagacacttgctggggttctcagagcaagagccagttcagggagttgaacctctccaggggtcctcccagggccctaaggagccccagcccagccccacagaccagcccagtttcagcaacctgacagccttccctgggggcgccaaggagctactactaagagacctagaccagctcttcctctcctctgattgccggcacttcaaccgcactgagtccctgaggcttgctgacgagttgagtggctgggtccagcgccaccagagaggccggaggaagatccctcagagggcccaggagagacagaagtctcagccacggaagaagtcacctccagttaaggcagtccccatccaaccccctggacccccagaaagggattctgtgggccagctgcaactatatcgccacccagaccgttcgcagccagcattcttggatgcaattgaccgacgggaagacacattttatgttgtctctttccgaagggaccacctgctgctcccagccatcagccacaacaagacctcccggcccaagatgtccctggtgatgcctgccatggcccccaatgagaccctgtcaggccgtggggccccgggggactatgaggagatgatgcagatcgagtgtgaggtcatggacaccagggtgattcacatcaagacctccacagtgcccccctcgctccgaaaacagccatccccaaccccaggcaatgccacaggtggccccttgccagtctctgcagccagccaggcccaccaggcctcccaccagcccctctacctcaatcatccctgacctctgccattcacactgacttagaacggggggagggggtaccaggtggccaggtgggactgtttcaaatttccctgatccccaggcttggggcaattggtaaaggaaagagcaggtgtgggggttaagcacttatttgaggtgggggtgttcacctctcttctcatcccttttcagaatatagggctcctctcattcctgtgaacccccagtcctggcttctttgtttgaggggattgtgtgaggttcagttgtggggtgggtggtgagctgctgcatattttttattttgtttctctagtgttatggcagtggaggtgggaatttagtccccaggtgggacaagggaagttttttcattttggagctagttactgggagtaagggagggtggggtgggggggagttcaggtttatgtgtgtgcatttcttttttattattattaaataaacaacttggagggagttgaaaaaaaa

SEQ ID NO: 145846 - DNA, 2112 bp, Artificial Sequence
  derived and/or modified sequence
atggccgaactaatgctactcagcgagatcgctgaccctacccgtttttttacagataacttactgtcaccagaagactggggattacagaactcaacgctatactccggcctcgacgaggtagcggaagagcaaactcagctgtttcgctgtcctgaacaggacgtgcctttcgatggctcatcactggatgtaggcatggatgtcagcccatctgaacccccctgggagttactgccaatttttccagacctacaggtcaagagcgagccttcgtcgccgtgctcatcttctagtttatcttccgaaagcagccggctatcaacagagccatccagcgaggcgttaggcgtaggggaggttctgcacgtgaaaaccgagagtctggctcctcccctctgtctcttgggcgatgaccctaccagtagttttgaaactgttcagattaatgtaatccctacaagtgatgacagcagtgatgtgcagaccaaaattgagcccgtcagcccttgctctagtgtcaatagcgaagcatcgctgctctcggctgattcctcgtcccaggcctttattggggaggaggtccttgaagttaagacagaatcactgtcacccagcgggtgtctgctttgggacgtgccggctccaagcttaggagcagtgcaaatttccatgggtccctccctggacggctcaagcggcaaggccctgcctactcgcaagccaccactccagcctaagcccgttgtgctcactaccgtaccaatgccaagtcgggcagttccaccaagcacaacggtgctgcttcaaagtttggtgcagccaccccctgttagtccagtcgtactgattcagggggctatccgggtgcagccagagggacctgcgccctccctgcctaggcccgagcgcaagtccattgtgcctgcccctatgcccgggaacagctgtccgcctgaggttgatgcgaagcttctcaagaggcagcagcggatgattaagaatcgcgagtcagcatgccagtctcggagaaagaagaaggaatatctgcagggcttagaagctcggctccaggccgtgctcgcagataaccagcagctgcgcagggagaatgccgccctgcgccgccgacttgaggctttactggcagagaacagcgaactcaaactggggagcggcaataggaaggtagtgtgtatcatggtattcctgctctttatcgcgtttaactttgggccagtcagcatctcagagcccccatctgctcctatcagcccgcgaatgaacaaaggcgagccacagcctcgccgacatcttctgggattttcagagcaagagccagtacagggggtcgagccactccaaggcagctcacagggaccgaaggagcctcaacctagtcccacagaccaaccatctttctctaatcttacagcgtttccaggcggggccaaggagctccttctgagagatctcgatcagctcttcctgtcaagcgactgtaggcatttcaataggactgagtcgttacggctagcagacgagctttcaggctgggtccagagacaccaaagaggaagacgtaagatacctcagagagcccaggaaagacagaagtctcagcctagaaaaaaatctcccccagtaaaggccgttcccattcagcccccggggcctccagagagagactccgtcgggcagctgcagctgtacaggcaccctgatcgtagtcagcctgcctttctcgatgcaattgataggcgagaagacaccttctatgtcgtcagcttcaggagggaccatctgcttctgccagctatctcacataataagacctccaggcctaagatgtctctcgtgatgcccgctatggcgcctaatgagacactttctggcagaggggcacccggagactacgaggagatgatgcaaatcgaatgtgaggttatggacactagagtgatacatattaaaacttccactgtcccacctagcctgcgcaaacagcccagtcctacccccggaaatgcgacaggcggacctcttcccgttagcgcagcctcccaggcccaccaggcaagtcaccagccattatacctgaaccacccttag

SEQ ID NO: 145847 - DNA, 2112 bp, Artificial Sequence
  derived and/or modified sequence
atggccgagctcatgctactttctgagatagccgaccccacccggttttttacagataatctgcttagcccggaggactggggcctgcagaattcaacgctctattctgggctggatgaagtagccgaagagcagacacaattgtttagatgcccagaacaagacgtcccattcgatgggtccagtctcgatgtgggcatggatgtgagcccaagcgagcccccttgggaactgctgccgatttttcccgacctgcaggttaagagcgagccatcatcaccctgctcttccagttccctatcatcggagtccagccggttgtctaccgagccttcgtccgaggctctcggcgtgggcgaggtcttgcacgtgaaaacagagtcactggcccctcctctgtgtctcttaggtgacgacccgacaagctcgttcgagacagtccagataaatgttatccctacatccgatgattcatcggatgtgcaaacaaagatcgagccggtgagcccatgttctagtgtgaacagcgaagcttcgctgttatcagccgacagttccagccaggctttcataggcgaggaagtattagaagtaaagacggaatcactgagcccctctgggtgtctcctgtgggatgtcccagctccttcactaggcgctgtacagattagcatgggtcccagcctggatggatcctctggaaaggcccttcccaccaggaaaccccccctccaaccgaaacccgtggtactaactacggtgcctatgccatcacgggccgtccctccttctactacagtcctgctgcagtctctggtgcagccaccgcccgtttctccagtcgtcctgatacaaggagccatcagagtacaacccgagggccctgcgcctagcttaccgaggccggagaggaaatcaattgtccccgcacctatgcccggtaacagctgtccgcctgaagttgatgcgaaattgctcaagcgtcagcagaggatgataaagaaccgggagtctgcctgtcagtcccgcaggaagaaaaaggagtatctgcagggcctcgaggcacggttgcaagccgtccttgctgacaatcagcagttgcgcagggaaaatgcggctctgagaaggcgactggaagccctattggctgagaattcggagttgaagctcggcagcgggaataggaaggtggtctgtattatggtatttctgctcttcattgctttcaattttggccctgtaagcattagcgagcctccctctgctcccataagccctcgcatgaacaaaggcgaaccacagccccgtcgccatcttctcggattctcagaacaggagcccgtccagggagttgagccactgcagggatcctcccagggcccaaaggagccccagccctccccaactgaccaaccttcattctcaaacctcaccgcgttccctgggggagctaaggagctgcttctcagagacttggatcagctcttcctttcgagcgactgcaggcattttaatagaaccgagtcactaaggttagccgacgagctgagcggttgggtacagagacatcaacgcgggaggcggaaaataccacagagggctcaggagagacaaaagagccaacctcgcaaaaaaagcccccccgttaaggccgtaccaatccagccaccggggccccctgagcgcgactccgtggggcagctgcaactataccggcaccctgaccgtagccaacctgcattcctcgacgccatcgacagacgggaggacactttttacgtggttagcttccggagagatcacttgctcctacctgccatttctcataacaagacatctaggcccaaaatgtctctggtgatgcccgccatggctccaaatgaaactttgagcggcagaggcgctccaggcgactatgaagaaatgatgcagattgagtgtgaggtaatggacacccgggtcattcacatcaaaacatccacagttcctccctccttacggaagcagccctctccgacccctggcaatgctactggaggacccctgcctgtctccgccgcctctcaagcgcatcaagcctctcatcagccgctctacctgaaccatccatag

SEQ ID NO: 145848 - DNA, 429 bp, Artificial Sequence
  derived and/or modified sequence
tgacaaccttcacctacagaccagccatcgtttagcaaccttaccgcttttcccgggggtgctaaagagctgcttctccgggacttggaccagttattcctgtcttccgactgtcggcattttaaccggactgagagcctgaggctagctgacgaattgagcggctgggtgcagcgccatcagcgcggcagacggaagattcctcagagggctcaggagagacaaagcctggacacctcaccttcacgttcactctcccacggaaggagccacctgcaattgaggcagagccccagcaacccactggacccccaaaagggtatcctctgggccagctgtaactacatcgctacgcagactgtgagaagtcagcacagctggatgcagcttaccgacggaaagacccacttcatgctgtcactgtcttag

SEQ ID NO: 145849 - DNA, 2112 bp, Artificial Sequence
  derived and/or modified sequence
atggccgagctgatgctcttatcagaaatagctgatcctacacgatttttcaccgataatctgctctcgcccgaggactggggactccagaattcaacactgtatagtggattggacgaggttgctgaagaacagactcagttatttcgctgtcctgagcaggatgtcccttttgacggatcttcacttgacgttgggatggacgtgagtcctagcgagcctccttgggaactgctgccgatcttccctgaccttcaggtgaaatctgaaccctcatccccatgctccagctcctccctctcatctgagtccagtagattgagcactgagccgagtagcgaggccctcggtgttggcgaagtgttacatgtgaagaccgagtctctcgcgcctcctctgtgcttgcttggtgatgatcccactagcagttttgagaccgttcaaattaatgtgattcctacatcagatgattcatccgacgttcagacgaagattgaaccagtgtcaccttgttcctcagttaatagcgaagcatccttacttagtgccgactcgagttcacaggcctttatcggggaagaagtcctcgaggtgaaaacagagtccctgtcaccttcaggctgcctcctttgggatgttccggcgcccagcctgggggcagttcagatctctatgggaccaagtctcgatggatcttctgggaaagccctccctacgagaaagcccccactccagccgaaacccgtagtgttgactactgtgcctatgcccagtcgggcagtgccaccctcaacaacggtactcctacagtcactagttcagcctcctccagtgagcccagtcgtactcattcagggggctattcgtgtgcaacctgaaggcccggccccatcactgccacgcccagagaggaagagcatcgtaccggcaccaatgccaggcaactcttgtccgccagaagtagatgcaaaactgttgaagcggcaacagcggatgattaagaatcgcgaatccgcttgtcaatcaagacggaagaaaaaagagtatctccagggactcgaagctcggctgcaggcagtgctggccgacaaccagcagttgcggagggagaatgccgccctcagaaggcggctcgaggctctgctcgccgagaacagcgaactgaaactgggatccggcaatcggaaagttgtatgtatcatggtgtttttactctttattgctttcaactttggaccggtctcaatcagtgagcctccaagtgccccgattagtccaaggatgaataagggggagccacagccacggagacacctgctgggatttagtgagcaagagccagtgcagggagtggagccactacagggtagttcccaagggccgaaagaaccccaaccaagcccaaccgaccagccctcctttagtaacctgacagcttttccgggcggcgccaaagaactcctgttaagagacctcgaccaactgtttctgtccagcgattgtcgccacttcaacagaacagaatcactgcgcttagcagatgagttgagcgggtgggttcagcgacaccagcgcggacggcgcaaaataccacagcgggctcaggagcgccagaagagccagcctcgaaaaaagagtccacctgtgaaggccgtcccgattcagcctccggggccacccgaacgggatagcgttggccagcttcagctgtacaggcatcctgacagatcccagcccgcgttcctcgatgccatcgacaggagggaggatacattttacgtcgtgtcttttcggcgtgatcacctcctgctgccagctattagccacaataaaacttctcgccccaagatgtctctagtgatgcccgccatggctcctaacgagacactgtccggaaggggcgctcctggcgactacgaggagatgatgcagattgagtgtgaagtaatggacacaagagtgattcacattaagacatctactgtgccacctagtctgaggaagcagcccagccctactcccggaaatgccacaggcggacccctaccagtgagcgccgcatcccaagcccatcaggcgtcccatcagcctctgtacctcaatcacccttag

SEQ ID NO: 145850 - DNA, 2112 bp, Artificial Sequence
  derived and/or modified sequence
atggccgagcttatgctcctgtctgaaattgccgatccgactcgtttcttcaccgacaacctgctctcaccagaggattgggggctgcagaactccactctgtattccgggctggatgaggttgccgaggaacagacacaacttttcaggtgcccagagcaggatgtgcctttcgacggctcttccttagatgtaggaatggatgtgagtccctccgagccaccttgggagctgcttcccatctttcccgatctgcaagtgaagagcgaacccagttcaccgtgcagctcctcttctctctcctccgagtcctccagactgtctacggaacctagcagtgaagccctgggcgtgggggaggttctccatgtgaagaccgaatctcttgctcctcccctgtgtctgctgggggacgatcccacctcctcctttgagaccgtacaaattaatgtcattcccacctcggatgattcatccgacgtgcagactaaaatcgaacccgtttctccttgttcctctgtcaactcagaggcgagtcttctgtcagccgacagcagcagtcaggcgttcataggggaagaggtgctggaagtaaagaccgagtcactcagtccttcaggctgcttgctgtgggacgtgcctgcaccatcccttggagccgtgcaaatctccatgggtccctccctcgatgggtcatcgggaaaagcattgccgacaagaaaaccgcccctgcaacccaagcccgtggtattgaccactgttcctatgccgagcagggcagtacccccgtccacgaccgtgttgctgcaatccttagtacagcctccgcccgttagcccggtggtgcttatccagggagccattagagttcagccagagggaccagctcctagcctccccaggcccgaacgcaaatcaatcgtgcccgctccgatgccaggaaactcctgcccccccgaagtggatgccaaactactaaaaaggcaacagcggatgattaaaaacagggagagtgcctgccagtccaggcgcaaaaaaaaagagtacctccagggattggaagctaggctgcaagccgtgcttgctgataaccagcagctgcgtcgcgagaacgcggcactgagacgacgcctcgaagctttactggctgaaaattctgagttgaaacttggctctggtaacagaaaggtcgtgtgcattatggtttttctcctcttcatagcctttaatttcgggcccgtctccatctccgaaccaccatcagctccgattagccccagaatgaataagggggagcctcagccaaggcgacacctgctaggattttctgagcaggagccagtgcagggcgtggaaccgttgcaagggagctcgcaaggtcctaaggaaccccaaccctctcccacagatcagccctcgttttcgaacctcacagctttccctggtggagctaaggagctattactgcgtgaccttgatcagctgtttctgtccagcgactgtcgccattttaataggaccgagagtcttcggctggctgatgaattgagcggctgggttcaaaggcatcagcgcggcaggcggaagatacctcagcgggcccaggagcgtcaaaaatcacagccacggaaaaagtctccgcccgtgaaagcagtgcccatccaacccccaggccctcccgagcgggactccgtgggtcagctgcagctctaccggcatcctgacaggtctcagccagcttttctcgacgccattgatcgacgggaagatacattctacgtcgtttccttcagaagggatcaccttctactcccagccatcagccacaacaaaacatctaggccaaaaatgagtcttgtcatgcccgcgatggccccaaacgaaaccttgagtggaagaggcgcaccgggggactacgaggagatgatgcagatcgagtgcgaagtcatggataccagagtgattcacatcaagacatcaactgtgcccccaagtttgaggaaacagccttctcctacccccggtaacgctactggcggcccactccccgtgagcgctgcatcccaggctcatcaagcctcacatcagccactttatctgaaccacccatag

SEQ ID NO: 145851 - DNA, 429 bp, Artificial Sequence
  derived and/or modified sequence
tgacagccaagcccaaccgaccagccatccttcagcaacttaaccgcctttcccggaggcgcaaaggagctgcttctgagagacttggaccagctgtttcttagctccgactgccgccattttaatagaacggagtccctgagacttgccgacgagctgagcggctgggttcagaggcatcagcgcgggcgcagaaaaatccctcagagggcccaggaaagacaaagcctggatacttctccatctaggtctctgagccatgggaggtctcacttacagctgcggcaaagtccatccaacccactggacccacaaaagggtatcctctgggcttcctgtaattatatcgctacccaaactgtcagatcacagcatagctggatgcaacttacagacggaaaaactcactttatgttgagtctgagctag

SEQ ID NO: 145852 - DNA, 429 bp, Artificial Sequence
  derived and/or modified sequence
tgacagccgtcacccactgaccaacccagcttctcaaatcttacagcctttcctggaggggcaaaagagctcttactccgcgaccttgaccagctgtttctcagctccgactgccgacacttcaaccgcaccgagtccctgcggctggcagatgaattatccggctgggtgcagcggcaccagcgcggccggagaaagatacctcaacgcgcacaagagcggcagtctctggacacctcaccttcgagatccctgtctcacggtaggtcacatctgcagcttcgacagtcccctagcaacccactggacccacaaaaggggatactgtgggctagctgtaattacattgctactcagaccgtcaggagccagcacagctggatgcagctaactgatggaaagacgcattttatgctgtcactcagctag

SEQ ID NO: 145853 - DNA, 2112 bp, Artificial Sequence
  derived and/or modified sequence
atggccgagctgatgctgctgtctgaaattgctgaccccacccgcttcttcacagacaacctgctgagccctgaggactggggcctgcagaacagcaccctgtacagcggcctggatgaggtggccgaggagcagacccagctgttccgctgcccagagcaggatgtgccctttgatggcagcagcctggatgtgggcatggatgtgagccccagcgagcccccctgggagctgctgcccatcttcccagacctgcaggtgaagtctgagcccagcagcccctgcagcagcagcagcctgagcagcgagagcagccggctgagcacagagcccagcagcgaggccctgggcgtgggggaggtgctgcacgtgaagacagagagcctggccccacccctgtgcctgctgggagatgaccccaccagcagctttgagaccgtgcagatcaacgtcatccccaccagtgatgacagcagtgatgtgcagaccaagattgagcctgtgagcccctgcagctctgtgaacagcgaggccagcctgctgtctgctgacagcagcagccaggccttcatcggggaggaggtgctggaggtgaagacagagagcctgagccccagcggctgcctgctgtgggatgtgcctgcccccagcctgggcgctgtgcagatctccatgggccccagcctggatggcagcagcggcaaggccctgcccaccaggaagccacccctgcagcccaagcctgtggtgctgaccaccgtgcccatgcccagcagagctgtgccccccagcaccaccgtgctgctgcagagcctggtgcagcccccacctgtgtcccctgtggtgctgatccagggcgccatccgggtgcagcctgagggccctgcccccagcctgcccaggcctgagaggaagagcatcgtgcctgcccccatgcctggcaacagctgccccccagaggtggatgccaagctgctgaagaggcagcagaggatgatcaagaaccgggagagcgcctgccagagcaggaggaagaagaaggagtacctgcagggcctggaggcccggctgcaggccgtgctggccgacaaccagcagctgcggcgggagaatgctgccctgcggcggcggctggaggccctgctggccgagaacagcgagctgaagctgggcagcggcaacaggaaggtggtgtgcatcatggtgttcctgctcttcatcgccttcaactttggacctgtgtccatcagcgagcccccatctgcccccatcagccccaggatgaacaagggggagccccagccccggcggcacctgctgggcttcagcgagcaggagcctgtgcagggcgtggagcccctgcagggcagcagccagggccccaaggagccccagcccagccccacagaccagcccagcttcagcaacctgacagccttccctggaggagccaaggagctgctgctgcgggacctggaccagctgttcctgagcagtgactgccgccacttcaacagaacagagagcctgcggctggctgatgagctgagcggctgggtgcagaggcaccagagaggaagaaggaagatcccccagagggcccaggagcggcagaagagccagcccaggaagaagagcccccctgtgaaggctgtgcccatccagcccccaggccccccagagcgggacagcgtgggccagctgcagctgtaccgccacccagacaggagccagcctgccttcctggatgccatcgacagaagagaggacaccttctacgtggtgtccttccggcgggaccacctgctgctgcctgccatcagccacaacaagaccagccggcccaagatgagcctggtgatgcctgccatggccccaaatgagaccctgagcggccgcggggcccctggggactatgaggagatgatgcagattgaatgtgaggtgatggacaccagggtcatccacatcaagaccagcacagtgccccccagcctgaggaagcagcccagccccaccccaggaaatgccaccggcggccccctgcctgtgtctgctgccagccaggcccaccaggccagccaccagcccctgtacctgaaccacccctag

SEQ ID NO: 145854 - DNA, 429 bp, Artificial Sequence
  derived and/or modified sequence
tgacagcccagccccacagaccagcccagcttcagcaacctgacagccttccctgggggcgccaaggagctgctgctgcgggacctggaccagctgttcctgagcagtgactgccgccacttcaacagaacagagagcctgcggctggctgatgagctgagcggctgggtgcagaggcaccagaggggccgcaggaagatcccccagagggcccaggagcggcagagcctggacaccagccccagccgcagcctgagccacggccgcagccacctgcagctgcggcagagccccagcaaccccctggacccccagaagggcatcctgtgggccagctgcaactacatcgccacccagacagtgcgcagccagcacagctggatgcagctgacagatggcaagacccacttcatgctgagcctgtcctag

SEQ ID NO: 145855 - DNA, 2112 bp, Artificial Sequence
  derived and/or modified sequence
atggccgagctgatgctgctgagcgagatcgccgaccccacccggttttttacggacaaccttctctcacccgaggactggggtctccaaaactccacgctgtactctgggctagacgaagtggctgaggaacagacacagctgtttagatgtccagaacaggatgtgccatttgacggcagcagcctcgacgtggggatggacgtgtccccctcggagccaccttgggagcttcttcccatctttccggatctccaggtaaaatccgagccctcttccccatgctcaagcagcagcttgagttctgaatctagccggctgagtacggagcccagttctgaagcactgggcgtcggagaggtgctccatgtcaagactgaaagcctggcccctccactctgcctattgggtgacgatcccacctcctccttcgagacagtccagattaacgttatcccgacctctgatgatagttcagacgtccagacgaaaatcgagcccgtatctccatgtagtagcgttaactcagaggcatctttgctctccgcagactccagttcacaagcttttattggagaagaggtactggaagtgaagactgaaagtctgtcacctagtgggtgtctgctgtgggacgtgccagcccccagcttaggtgcggtccagatctcaatgggaccctcattggacggctctagtggtaaggctttgcccaccaggaaacccccactccagccaaagcctgtcgtgttgaccactgtaccaatgccttctagagcagttccaccttccaccacggtgctgcttcagtcgcttgtgcagccgccaccggtgtctccggtggtgctgatccaaggggcgatacgggtccagcctgagggacccgctccctctctaccacgtccggagcgaaaatccattgtccctgcccctatgccgggaaattcttgtccacctgaagtggatgccaagctgctcaagaggcagcaacgtatgattaagaatcgggagtcagcttgtcaaagcaggcggaaaaagaaggagtatctgcagggtttggaagccaggcttcaggcagtacttgcagataatcagcagcttaggcgggagaatgcagcgttgaggcgccgcctggaggcactgctcgccgaaaattcggagttaaaactgggatcaggaaaccggaaagttgtttgcatcatggtctttctcctgtttatcgcgtttaactttggcccagtcagcatctctgaaccccccagcgcccccatttctccaagaatgaacaaaggcgagccccagccgaggagacacctccttggcttctccgagcaggaaccagtccagggagtggagcctctgcagggatcatcccaaggtccaaaggaaccacaaccttctccgactgatcagccctctttctccaatctcactgctttccctggcggagcaaaggaattgttgctgcgggatctggatcaactgtttctatcttccgattgtcgccacttcaatcgcactgagtccctgaggctggctgatgaacttagcggctgggtccagaggcatcaaagagggcggcgtaaaatccctcagagagctcaggaaagacaaaaaagccagcctcggaagaaaagcccccccgtgaaggcagttcctattcagcctcccgggcccccagagcgggactctgtggggcaactgcaattgtataggcatccagatcgttctcagcctgcattccttgatgctatcgatagaagagaggacacgttttatgtggtttccttccggcgagaccacctcctgctccctgccatcagccacaataagacttcaaggcccaaaatgagcctggtgatgcctgccatggctcctaatgagaccctgtcaggcaggggcgctccgggggattacgaggagatgatgcagatcgaatgcgaggtcatggacactagggtgattcatatcaagaccagcacagtgcctccctcattgaggaaacaaccctcgcctactccagggaatgccacaggaggccctctaccagtgagcgcagccagccaggcccatcaggcctcccaccagcccttgtatctgaatcacccgtag

SEQ ID NO: 145856 - DNA, 2112 bp, Artificial Sequence
  derived and/or modified sequence
atggccgagctgatgctgctgagcgagatcgccgaccccacccggttcttcactgacaatttgttatcccctgaggattggggcctgcaaaacagtaccctgtacagcggtttggatgaggtggccgaggagcaaacgcagctgttcagatgtcctgagcaggatgtcccatttgatggtagttcattagacgtcggtatggacgtctccccttccgaacccccgtgggaactgttgcctatctttcctgacctgcaagtcaagagcgagccctcttccccatgctcgtccagtagcctgtccagtgagagttcgcggctttccacagagcccagctcagaggccctgggagtgggcgaggtattgcatgtgaaaactgagtctcttgccccccccttatgtctgttaggtgacgatcctaccagttccttcgagactgtgcagattaatgtgattcccacaagtgacgactcttcagacgttcagaccaaaatcgagccagtctcgccatgttccagcgtcaattccgaggcaagtctcctgagcgccgattcatcctcccaggcctttataggagaggaagttcttgaagtcaaaaccgagagcctgtcacccagcggctgcttgctttgggacgtacctgctcctagcctgggggccgttcagatttcaatgggcccgtccctcgatggctcatctggaaaggccctgccaaccaggaagccacctctgcaaccgaagcccgtagtgctcacgacggtccctatgcccagccgggccgtccccccttcgactaccgttttgttacagtcactcgtgcaaccccctccagtgagtcctgtggtgctaatccaaggtgctatcagagtacagccagaaggccccgcccctagccttccgagacctgaaaggaagagcatcgtgcctgccccaatgcctgggaactcttgcccaccagaagtagacgcaaaactgctcaagagacaacagcgcatgatcaagaaccgcgaatccgcttgtcagtcaagacggaagaagaaggagtacctgcagggactcgaggcgagacttcaggcggtcctagccgataaccagcagttgagaagagagaacgccgcactcaggcggcgcttggaggcactcctcgccgaaaactctgaactgaagctgggtagcggaaataggaaggtggtgtgcatcatggtcttcctcttatttatcgcattcaattttggaccagtcagtatttccgaacctccatccgcaccaatcagtccccggatgaacaaaggagagccccagcccaggagacacttgctgggcttcagtgagcaagagcccgtccaaggcgtggagcctctccagggcagtagtcaggggccaaaagaacctcagccctcacccacggatcagccatcctttagcaacctcacagcttttcctggcggggcaaaagagctgttgctgcgggatctggaccagctctttttaagctcagattgccgccactttaatcgcacggaatcgctgagactggcggacgagctgtccggatgggtgcagcggcaccagagaggccgccggaagattcctcaacgagctcaggagcggcaaaagtctcagccacgaaagaagtctcctcccgtgaaggccgttccaattcagcccccaggcccccccgagagagattccgtcggccagctacaactgtacagacaccccgaccgttcccagcctgcctttcttgatgctatagatcgcagagaggatacattttacgttgtgtcttttcgccgcgatcacctgctcttaccggccatcagccacaataagaccagccgccctaagatgagtctggtcatgcctgctatggcccctaacgagaccctctcagggaggggggcccccggtgattacgaggagatgatgcagatagaatgcgaggtcatggacacaagggtgatccacatcaaaacttcaaccgtgccaccttcactgagaaaacagccctcacctactcctggaaacgcaacaggcggccctcttccagtctccgccgcttcccaagcccatcaggcctctcatcagcccctatacctgaaccacccctag

SEQ ID NO: 145857 - DNA, 429 bp, Artificial Sequence
  derived and/or modified sequence
tgacagcccagccccaccgaccagcccagcttcagcaacctgaccgcctttcctggaggggccaaagaacttctgttacgagacttggaccagctattcttatcctccgattgccggcacttcaatcggactgagagcctgcgtctggccgacgaactgtcaggatgggtgcagcggcatcagaggggacgaagaaagattccgcagcgggcccaggagcgccagtcgctggatacaagcccctcacgcagtctgtcacatgggcgcagccatctgcaactgagacagtctccgagcaatccgttggacccacagaaaggtatactatgggcctcttgcaactacatcgcaacccagaccgtcagaagtcagcactcatggatgcagttgacggacgggaaaacacattttatgctctccttgagctag

SEQ ID NO: 145858 - DNA, 429 bp, Artificial Sequence
  derived and/or modified sequence
tgacagcccagccccaccgaccagcccagcttcagcaacctgaccgccttccctggtggggccaaggaattactcctgagggacctggatcagctgttccttagtagcgactgcagacatttcaatagaactgagtcccttcggttagcagacgagctttctggatgggtacagcgacatcagaggggacgaagaaagatccctcagcgggctcaggaacgccaaagcctggacacctccccaagccgctcccttagtcatgggcggtcccatctgcagctgagacaatcccctagcaatccactggacccacagaaaggcattctgtgggcctcctgtaattatatcgccacacagaccgtacgctcccagcatagctggatgcaactcaccgacggcaagacccacttcatgctatctttgagctag

SEQ ID NO: 145859 - DNA, 2112 bp, Artificial Sequence
  derived and/or modified sequence
atggccgagctgatgctgctgagcgagatcgccgaccccacccggttctttactgataatctgttatcaccagaggactggggcctgcagaattccactctctactctggcttggatgaagtggccgaggaacagacgcagcttttccggtgcccagagcaagatgtacccttcgatggatcatcactggacgttgggatggatgtatccccatccgagccaccttgggagttgcttcccattttccccgacttacaggtgaagtccgagccgagctctccctgtagctcctctagtctgtctagcgagagctctcgtcttagtacagagccctccagcgaggccttaggagtaggggaagtgcttcacgtgaagacggagtcattggcacccccactatgcctgctgggcgatgaccctacgtcctcattcgagactgtccagatcaatgtgataccgacatccgacgatagtagcgacgtccagacaaaaattgaacccgtctcaccatgttccagcgtgaactccgaagcgtccctgttatctgccgatagctccagccaggcatttatcggagaggaggtcttggaggtcaaaacagagagcctgtccccatctggctgtctgctgtgggatgtgccggcccctagtctcggggccgtgcaaatctccatggggccaagcctggacggcagttcagggaaggcccttccaacacggaagccccctctccaacccaagcctgtggtactcactaccgtgccaatgccctcaagggccgtccccccttctactaccgtgcttctgcagtccttggtgcaacctccacctgtgtcgccggtcgtgctgattcagggcgctatccgagttcagcctgaagggcccgctccaagcctccccagacccgagcggaagtccatagtcccagcccctatgccaggcaactcttgcccccccgaggtcgatgctaagctcttgaagagacagcaacgcatgattaaaaaccgcgaatcagcttgtcaatcccggcgcaagaaaaaggagtaccttcaggggctggaggctcggttgcaggcagtgttagccgataatcagcagctgaggcgggagaacgccgctctgaggaggcggctcgaagccctcctcgctgagaattccgaactgaaactggggtccggaaatcgtaaggtggtgtgcattatggtgttcctgctgtttatcgccttcaactttggacccgtgagcatctccgaaccaccgagtgcgcctatctcacccaggatgaacaaaggtgaaccccagccacggcggcatctcctgggcttctcagaacaggaaccagtccagggtgtggagccccttcaagggtcctctcaaggaccaaaggaaccacaaccctcacctacagatcagccgagtttttctaacctgactgccttccccggaggtgcgaaagaactcctcctaagggacttagatcaactgttcctgtcaagtgattgcagacatttcaacagaacagaaagtcttcgacttgccgacgagctgagtgggtgggtccagcggcatcaacggggacgcagaaaaattccccagcgggcccaggagaggcagaagtcacagcccaggaagaagtccccaccagttaaagcagtaccgatccagcctccggggcccccagaaagagatagtgtggggcagctgcagctgtacagacatcctgaccgttcacagcctgcctttcttgacgctattgacagacgtgaagacaccttctacgtcgtttcttttcgcagagaccatctgctgctgcccgcaatatcacacaataagacatcaagaccaaagatgtcattagtcatgcctgctatggctcctaatgaaactctttccggacgaggagcccctggggactatgaagaaatgatgcaaattgagtgtgaagttatggatacccgtgtcatccacataaaaaccagcaccgtgcccccttctctgcgtaagcagccttcacccacccccggcaatgcaacaggcggtccgttacctgtctcagcagctagccaggcacaccaggccagccaccagcccctatacctgaaccatccctag

SEQ ID NO: 145860 - DNA, 2112 bp, Artificial Sequence
  derived and/or modified sequence
atggccgagctgatgctgctgagcgagatcgccgaccccacccggttttttacagataaccttctgtcacccgaggattggggcttgcagaattccaccctttactccggcctcgacgaggtggcggaggaacagacgcagctgtttcgctgcccggaacaggatgtgcctttcgacggttcatctctcgacgtgggcatggatgtctcacccagcgagcccccctgggaactcttgccgatcttccccgacttacaagtgaagtccgaaccgtccagcccctgcagttcctcctccctttcctccgagtccagcagattaagcactgaaccatccagcgaggcactgggcgtgggagaggtgctccatgtgaaaaccgagagtctggcgcctccactttgcttgctcggggatgatccaaccagctcattcgaaacagtgcagattaacgtcattcccacatccgacgacagtagcgacgttcaaacaaaaatcgagcccgtcagtccctgttccagcgtgaactccgaagcgtcactgctgtcggcggactcttcatcccaggcatttatcggagaggaggtactcgaggtcaaaaccgaatccttatccccatcggggtgtcttctgtgggacgttcccgctccttccctgggtgcagtgcagataagtatggggccctctctggacggatctagcgggaaggccctccctacacgcaagccacccctccagccaaaacctgtcgtattaacgaccgtacctatgccctccagagctgtgcccccaagtaccactgtactgctacagtcactcgtgcagccacctcctgtgtctcctgtggttctgatacagggtgcaatcagagtacagccggaaggccctgccccatccttacctaggccggaaagaaagtcaattgtgcctgcccctatgcctggcaactcatgccctccggaagtagatgccaagctactgaagcgacagcagcggatgataaagaaccgggagtccgcatgccagagccgcaggaaaaaaaaggaatatctgcagggcctggaagcgcggcttcaggccgttctggccgataatcagcagctcagacgcgagaatgccgctctcaggcggcggctggaggctctgcttgcggagaattccgaacttaaattggggtctggaaatcgaaaggtggtatgcatcatggtctttctgctcttcatcgcattcaacttcggtccagtttcaatctcagagcctcccagcgctcctatctccccaaggatgaacaagggagagccccagccccggcgccacctgctggggttcagtgaacaggagccagtgcaaggggttgaaccattgcaggggagtagtcagggccccaaggaaccccagcccagcccaactgatcagccctccttttcaaatctcaccgctttcccgggtggggccaaagaattattgctgagggacctagatcagttattcctctcctccgactgtcggcatttcaatcgcactgagtcactgaggctggcagatgagctgagcggatgggtccaacgtcaccagaggggccgacgcaagattcctcaacgggcacaagaacggcaaaaatctcagcctagaaagaaatctccccccgtgaaggctgtgccaatccagccccccggacctccagaaagggacagtgtgggccagctgcagttgtatcgccatcctgatagaagtcagcccgcctttttggatgcgattgaccgccgggaagacacattttacgtagtctcatttcggagggaccaccttctgctgccagcaatctcacataacaagacaagtcggcccaagatgtctctggtaatgcctgcgatggcccctaacgagacactgtccgggagaggggcacccggagactatgaagagatgatgcaaatcgagtgtgaggtgatggacacccgcgttattcatataaaaacaagcacagtcccaccctccctgcggaagcagccatccccgaccccaggtaatgctacaggtggtcctctacctgtgagtgctgcaagccaggctcaccaggcaagccaccagcctttgtatctcaatcatccgtag

SEQ ID NO: 145861 - DNA, 429 bp, Artificial Sequence
  derived and/or modified sequence
tgacagcccagccccaccgaccagcccagcttcagcaacctgaccgcttttcccggaggggctaaagaactcctgctcagggacctggaccagttgttcctgagctcagattgcaggcacttcaaccgcacggagtcactccgactggcggatgagttgtccggttgggtgcagcggcaccagaggggaaggagaaagattccgcagcgagcacaagagcgtcagtcacttgacacatcgcccagcagaagtctgagtcacgggcgtagtcacctacagctgagacaaagtccctctaatcctctcgacccacagaaaggaatcctctgggcatcttgcaactacatcgcaacccaaactgtcaggtcccagcacagttggatgcaactgactgacgggaagacacacttcatgctgagtttatcttag

SEQ ID NO: 145862 - DNA, 429 bp, Artificial Sequence
  derived and/or modified sequence
tgacagcccagccccaccgaccagcccagcttcagcaacctgaccgcattccctgggggagcaaaggagctgttactgcgggacttagatcaattgtttcttagcagtgactgtaggcacttcaaccgcaccgagagtctgcgactggccgacgaactaagcggatgggtccaacgacatcagagaggacggcgcaaaatcccccaacgagctcaggaacgccagagcctcgatacatcaccctccagatcacttagccacgggcgaagccaccttcagctccgccagtctcctagtaatcccttggacccccagaaaggcatcctgtgggccagttgcaattacattgcaacccagaccgtgagatcccagcacagttggatgcagctaactgacggcaaaactcactttatgttatcgctctcatag

SEQ ID NO: 145863 - DNA, 2112 bp, Artificial Sequence
  derived and/or modified sequence
atggccgaacttatgttgttatctgagattgcagaccctacccggttttttaccgacaacctcttgagtcccgaagattggggcctgcagaactctactctgtacagcgggttagacgaagtggctgaagagcaaacccagctgttcaggtgtcccgagcaggacgtgccatttgacggaagtagtctcgacgtgggaatggacgtgtctccttcagagcctccctgggagctcttacccatcttccccgatctccaagtcaaatcagagccctccagcccatgtagcagctcaagcctgtcatctgagtcatccagattgagcaccgagccatcttcagaagccttaggtgttggagaagtgctacacgtgaagactgaaagcctcgcgcctcccctgtgtctgctaggggacgatcctacctcttccttcgaaacggttcagatcaacgtgatcccgactagcgacgatagtagcgacgttcagaccaaaattgaacccgtgagcccttgttcttccgtcaattcagaagcatccctgctcagtgcagattcatcttctcaagcgttcataggggaagaagtgctagaggtgaagacagagtcgctttctccttcaggttgcctgctgtgggacgtgcccgcaccctctttgggggctgtgcagataagcatggggccaagcctcgacggcagctccggcaaggcactgcctaccagaaaacctccactgcagcccaagcctgtagtgctgacaaccgtgcccatgccatcccgggctgtgccgccatcaacaaccgtgctgctgcagtcactggtccaaccacctccggtgagcccggtcgtactaatccagggcgctatcagggttcagccagagggtcccgcaccttcattacctcgcccagagcggaagtcgattgttcctgcccctatgccaggcaactcttgtccaccagaagtcgacgcaaagttgctgaaaaggcaacagcggatgataaagaaccgggagagtgcatgccagtccagacgaaaaaaaaaggagtatcttcaagggctggaggcgagactgcaagccgtgttggctgacaaccagcagctgaggcgggagaacgcggcactccgccgacggctggaagcccttctagccgagaattcagagctgaagttaggaagcggtaatcgtaaggtggtctgcattatggtatttttactcttcattgccttcaatttcgggccagtgagcattagcgagccaccgagcgctcctatctctcccagaatgaacaagggcgagccacaacctcgtagacacctgctgggattcagtgaacaggagcctgtgcagggggtggaaccactgcaaggttcctctcagggacccaaggagccccaaccttcacctactgatcagcctagctttagtaacctcacagcctttccgggtggagccaaagagctcctgttgcgagatctggatcagttattcctcagttccgactgccgccacttcaaccggacagagtctttgcgcctggcagacgagctctcagggtgggtgcaaagacatcagcgaggaagacgaaagatccctcagcgggcacaggagagacagaaatcacagcctcgcaagaagtcaccacccgtcaaagctgtacccattcaacctccgggtccccctgagcgggattcagtagggcagctccaattgtaccgacatccagacaggagtcaaccagcattcctggacgcaatcgacagaagggaggacacattttacgtggtgtccttccgaagggaccatctgctgctacctgctatcagccacaacaagaccagccgaccaaagatgtcccttgtgatgcctgcaatggctcccaacgagacattgtcgggcaggggagcgccaggggactacgaagagatgatgcagatcgagtgtgaagttatggacaccagggtaatccacatcaaaacgtcaaccgtgccccctagtctccggaaacagccctctcctacgccaggcaacgccaccggaggcccactgccggtctccgccgcttctcaggcccatcaggcctctcaccagcccttatacctgaatcacccatag

SEQ ID NO: 145864 - DNA, 2112 bp, Artificial Sequence
  derived and/or modified sequence
atggcagaactaatgctgttgtccgagatcgctgacccaactcgcttcttcaccgacaatctcctgtcccccgaggactgggggctccagaattccactctgtattctggattggatgaagtagctgaggagcaaacacaactgttccgctgtccagagcaagatgttccattcgatgggtcctctctcgatgtgggtatggacgtttccccatctgagcctccctgggagctgctccccatcttccctgacttgcaggtcaaatctgaacccagttccccttgttccagctccagcctgagctccgaaagttctcggttgtcgacagagccatcaagcgaggcacttggtgtaggcgaagtcctacacgtaaagactgaatccctggcaccccctctgtgcttgctgggagatgatccaacctcatcattcgaaactgtccagataaacgtaattccaacctcggacgattcatcagatgtgcagaccaaaattgagccagtctctccctgttccagtgtgaacagcgaggcatccttgctgtctgcagattcctcttcacaggccttcataggtgaggaggtcctcgaagttaagaccgaaagcctgtcgccctcagggtgcctactttgggatgtaccggctccctccttaggggcagtacagatttcgatgggcccatctctggacggctccagcggaaaggcactgcccacccgtaagcctcccttacagcctaaacccgtagtcttgaccactgtccccatgccatcacgcgcagtacccccaagtacaaccgtgctcctacagtcactagtgcagcctccacccgttagccccgtggtcctgatccagggggcaatcagagtgcagcctgagggtcccgcaccaagtctcccccgaccagagagaaagtcaatagtccccgcacctatgccaggaaactcctgtccccctgaggttgatgcaaaactgctcaagcgacagcagaggatgataaaaaatagagagagtgcatgccagtctcgaaggaaaaagaaagaatatctccaaggactggaggccaggcttcaggccgtattggcagataatcagcaattacgcagggagaacgcagcccttcgtaggcgccttgaagcgctattggctgaaaacagcgaacttaaactggggagtggcaataggaaagtagtctgtataatggtgtttttgctgttcatcgcctttaattttgggcctgtgtccatctcagaaccgccttccgcgcctattagtccacggatgaacaagggcgagcctcagcctagacggcacctgttagggttctctgagcaagaacccgtacagggggtcgaacctctccaggggtcctcccagggcccaaaggaaccgcagccctcccccaccgaccagccttctttttccaatttaaccgcattcccaggaggtgccaaggagctgctgttacgagatctggaccaactcttcctgtctagtgactgtcgccattttaacaggacagagtcccttcggcttgctgatgaactgtcgggttgggtgcagcgccaccagagggggaggcgaaaaattccacaaagggcacaggagcgacagaagagccagcccaggaagaagtctccccctgtgaaggccgtccctatccagcctcctggccctcccgaaagggatagtgtcggacaacttcagttatatagacatccagacagaagtcagcctgctttcctggacgctatcgaccggagggaggacaccttctatgtcgtaagctttagacgcgaccacctgctactccctgccatctcccataataaaacaagtcggcctaagatgtccctggtgatgcccgcaatggctccaaacgagacgttgtctggcagaggggcacctggtgactacgaagaaatgatgcagatagagtgcgaagtaatggatactagagtgatacacataaagacttccaccgtgccacccagcttaagaaagcagcccagccctacacccggaaatgccaccgggggtcctttacctgtgtcagcagcctcacaggctcatcaggcatcgcatcaacctctctacctgaatcatccatag

SEQ ID NO: 145865 - DNA, 429 bp, Artificial Sequence
  derived and/or modified sequence
tgacagccatcccctacagaccagcctagctttagcaatctgacggcatttcctggcggagccaaggagttactactacgagacctagaccaactcttcctgagttcagactgtcgtcattttaacagaactgaatccttacggctggccgacgaactgtctggatgggtgcagagacatcaaagagggcgacgaaagattccacagcgtgctcaagagcgacaatctttggataccagcccgtcacgctcattgagtcacggcagatcgcacctacagcttcgtcagtcaccctcaaaccccttggaccctcaaaagggaattctttgggcatcgtgtaattacatcgccacccaaaccgtgcggtctcagcacagttggatgcaattgacagacgggaagactcacttcatgctttccctgtcctag

SEQ ID NO: 145866 - DNA, 2112 bp, Artificial Sequence
  derived and/or modified sequence
atggcggagcttatgctgctcagcgaaatcgcagatcccacacgattctttacagataatctgttgtcaccagaagactggggtctgcagaacagtacactctatagcggccttgatgaagtcgcagaggaacagacacaactgtttaggtgccctgaacaggacgtgccatttgacgggagttccctggatgtggggatggacgtgtctcccagtgaaccgccttgggaactgctgcccatttttcctgatctgcaagtaaagagcgaaccatccagcccatgctcttcgtcttctctctcatccgaatccagtaggttaagcacagaaccgtcatcagaagccctgggtgtcggtgaagtgctgcatgtgaagaccgagtctttggcccctcccttgtgcctgctcggggacgacccaacatccagttttgagaccgtccagataaatgtcattcccacctcagacgattctagcgatgtgcagaccaagattgagcccgtctcaccatgtagttccgtcaacagcgaggcaagtttactgagtgccgatagctcatcacaggcctttatcggtgaggaagtgctggaggtgaaaaccgagagcttgtcaccttctggttgtctcctctgggatgtgccagccccatctctgggcgcagttcagattagcatgggaccaagcctggacggctcttcagggaaagctctccctacaagaaaaccacccctgcagcccaaacctgtagttctgacaactgtgccaatgccatcccgggctgttccaccatccacaacagtgctgctacagagtcttgtccagccccctcccgttagcccagttgtgctgatccagggtgccatacgtgtccagcctgaagggcctgctcctagtctcccccgacccgaacgcaaatccattgttccagctccaatgccaggcaactcatgtcctcccgaggtcgatgccaagctcctgaaacggcaacaacgtatgataaagaaccgagagagcgcatgtcagtctcggagaaaaaaaaaagagtacctccaagggctcgaagcacgtctgcaggccgtgctcgctgataaccagcaactccgaagagagaatgccgctctcaggcgtaggcttgaagccctgctggccgagaattccgagctcaaactggggagtgggaatcggaaggtggtctgtatcatggtctttctcttgttcattgccttcaactttggaccggtgagtatatcagaacctccaagtgctccaatcagccctcggatgaacaaaggcgaaccgcagccaagacggcacctcttggggtttagcgagcaagagcccgtgcagggcgttgaaccccttcaagggtcatcacagggtccaaaagagccccaaccgagtccaaccgaccagccctccttttctaatctcaccgctttccccggaggcgctaaggagcttctcctcagagacctggaccagctgtttctgtctagcgattgccggcactttaatcgtaccgaatccctgcgattggcagatgaattgagcggttgggtacagaggcaccaaaggggcagaaggaagatcccgcagagggcacaggagagacagaaaagccaaccgaggaagaagtcccctcccgtaaaagctgtgccaatccagcctccaggaccgccagaacgggattctgttgggcaattgcaactctaccgccaccccgatagaagtcagcctgcctttttggatgctattgatcgcagggaagacactttttacgtggtgagtttccggagagaccatcttctactgccagccatctcacataacaagaccagccggcctaaaatgtctctggtaatgcctgccatggcaccaaatgaaacactcagcggacggggagcccctggggactatgaggagatgatgcagatcgaatgtgaggtgatggacactagggttatacatatcaagacaagtactgttccacctagtcttcgcaaacaaccaagcccgactcccggtaacgccaccgggggacctcttcccgtgagcgcagccagccaggcccaccaggcgtcccatcaaccattgtacctcaatcatccctag

SEQ ID NO: 145867 - DNA, 2112 bp, Artificial Sequence
  derived and/or modified sequence
atggcggaattgatgctactttcagagatcgccgatcccacacggttcttcactgacaatctgctctctcctgaggattggggtctgcagaattccactctgtactccggactggatgaagtggcagaagaacaaacccagctctttcgctgtccggagcaggacgtcccctttgatggttcctctctcgatgtgggtatggacgtgagcccttcggagcctccttgggaactgttaccaatctttccagatctccaagttaaatctgaaccaagtagcccttgtagctcaagtagcctgtctagtgagagctcccggctcagtactgagcccagtagcgaagcgctgggagttggagaagtgctgcatgtgaagaccgagtcactggctccgcctctctgtcttctgggcgacgaccccacctcctctttcgagacggtccagatcaacgtgattcccactagtgatgactccagcgatgtgcagacaaaaattgaacccgtgagcccttgctcttccgtgaattctgaagcaagcttgctcagcgctgatagtagctctcaggcgtttataggggaagaggtcctggaggtcaaaacagaatccttgtcaccaagcgggtgcctcctctgggatgtgcctgcgcctagcctgggcgctgtgcaaatctcaatgggtccctctctggacgggtctagcggaaaagctctgccaacccgaaagccacccctccagcccaagcccgtggtgctgaccactgtgccaatgcctagtcgcgctgtgcctccttccacgaccgtccttctccaatcgctcgtacaaccccctcctgtctcgcccgtcgttctgattcaaggagccattcgcgtccagccagaaggtccagccccttctctccccagacccgaaaggaaaagtatcgtaccagctccaatgcctggaaattcatgtcctccagaggttgacgcgaagctcttaaagcgccagcaacgcatgattaaaaaccgggagtccgcatgccagagccgtaggaaaaagaaagagtacctgcaaggattagaggccagactgcaggccgtcctggctgataaccagcagttacgcagagaaaatgcagctctacgcaggagattagaagcgctgctcgccgaaaactctgagctgaagctggggtccggtaataggaaagttgtctgtatcatggtgttcctcctctttatcgcattcaactttggcccagttagcattagcgaacccccttcagccccaatctcccctagaatgaacaagggagaacctcaaccgcgacgccatctgctgggctttagcgaacaagagcccgtacagggcgttgagccactccagggaagctcccagggacctaaggaaccccagccgagtcccaccgatcaaccatccttctcaaacttaaccgcattccctggtggcgctaaagagctgctattgagggatctcgatcagctgtttctgtcctccgactgtagacatttcaaccggactgagtcactacggctggctgatgagttgtctgggtgggtccagcggcaccagagggggcgtcgaaagatccctcaaagggcacaggagagacaaaaaagccagcctcgaaagaagtcccctcctgtaaaggctgtacctatccagcccccaggaccaccagaacgggacagtgttggccagctccagctgtatagacatcccgatcgctcacagcctgccttcttggatgcaatagacaggcgagaagataccttctatgtggtgtctttcaggcgcgaccacctgctgctccctgctatctcccacaacaagacctcccgcccaaaaatgtcgctggtcatgccggcaatggccccaaatgagaccctgtctgggcgtggggcaccaggcgattatgaggaaatgatgcaaatagagtgcgaagtcatggacactagagttatccatatcaagacctctaccgtgccaccaagtttgcggaagcagcccagcccaactccgggaaacgcaactgggggacctctccccgtgtctgcagcgtcacaggcacaccaggcctcacatcagcccctgtatttaaaccacccttag

SEQ ID NO: 145868 - DNA, 429 bp, Artificial Sequence
  derived and/or modified sequence
tgacaaccctctcccactgatcagccatctttctcgaacctgaccgcattcccgggtggagccaaagagctccttctgagggatctcgaccaattattcctgtcatccgattgtcgccattttaatagaacagagtctctgaggctggcagacgagctgagcggatgggttcagaggcaccaaagagggaggcgcaagatccctcagagggcccaggagcggcagtccctggatacatccccttctcgttcgctgagccatggcagaagccacctgcaactgagacaaagcccatcgaaccctctggatccgcaaaaaggcatactgtgggcttcgtgtaattatattgccactcagacagtccggagccaacacagctggatgcagttgaccgatggaaagactcattttatgctgagcttgagttag

SEQ ID NO: 145869 - DNA, 429 bp, Artificial Sequence
  derived and/or modified sequence
taacagcccagccccacagaccagccttccttttctaacctaacagcgttcccaggcggtgctaaagagctgctcctgagggacctcgaccagttgttcctatcctcagattgtagacactttaataggactgagtccctccgcctggccgatgaattgtccgggtgggtgcagagacatcagaggggtagacgaaaaatcccacaacgtgcacaggagagacagtcacttgacacatctcccagccggagcctgtcacacggcaggtcccatctgcagctccgacagagtccctctaacccgttggatccccaaaagggcattttgtgggcatcatgtaattacatagctacccagactgtgagaagtcaacattcctggatgcagttaaccgatggcaagacacatttcatgctgtcactgtcatag

SEQ ID NO: 145870 - DNA, 2620 bp, Artificial Sequence
  derived and/or modified sequence
aaccgtctcctggttggggggtgggggggaaagatggcggagctgatgctgctcagcgagattgctgacccgacgcgtttcttcaccgacaacctgcttagcccggaggactggggtctgcagaacagcaccttgtattctggcctagatgaagtggccgaggagcagacgcagctcttccgttgcccggagcaggatgtcccgtttgacggcagctccctggacgtggggatggatgtcagcccctctgagcccccatgggaactcctgccgatcttcccagatcttcaggtgaagtctgagccatcttccccctgctcttcctcctccctcagctccgagtcatcgcgtctctccacagagccatccagcgaggctcttggggtaggggaggtgctccatgtgaagacagagtccttggcacccccactgtgtctcctgggagatgacccaacatcctcatttgaaaccgtccagatcaacgttatccccacctctgatgattcctcagatgtccagaccaagatagaacctgtctctccatgttcttccgtcaactctgaggcctccctgctctcagccgactcctccagccaggcttttataggagaggaggtcctggaagtgaagacagagtccctgtccccttcaggatgcctcctgtgggatgtcccagccccctcacttggagctgtccagatcagcatgggcccatcccttgatggctcctcaggcaaagccctgcccacccggaagccgccactgcagcccaaacctgtagtgctaaccactgtcccaatgccatccagagctgtgcctcccagcaccacagtccttctgcagtccctcgtccagccacccccagtgtccccagttgtcctcatccagggtgctattcgagtccagcctgaagggccggctccctctctaccacggcctgagaggaagagcatcgttcccgctcctatgcctggaaactcctgcccgcctgaagtggatgcaaagctgctgaagcggcagcagcgaatgatcaagaaccgggagtcagcctgccagtcccggagaaagaagaaagagtatctgcagggactggaggctcggctgcaagcagtactggctgacaaccagcagctccgccgagagaatgctgccctccggcggcggctggaggccctgctggctgaaaacagcgagctcaagttagggtctggaaacaggaaggtggtctgcatcatggtcttccttctcttcattgccttcaactttggacctgtcagcatcagtgagcctccttcagctcccatctctcctcggatgaacaagggggagcctcaaccccggagacacttgctggggttctcagagcaagagccagttcagggagttgaacctctccaggggtcctcccagggccctaaggagccccagcccagccccacagaccagcccagtttcagcaacctgacagccttccctgggggcgccaaggagctactactaagagacctagaccagctcttcctctcctctgattgccggcacttcaaccgcactgagtccctgaggcttgctgacgagttgagtggctgggtccagcgccaccagagaggccggaggaagatccctcagagggcccaggagagacagaagtctcagccacggaagaagtcacctccagttaaggcagtccccatccaaccccctggacccccagaaagggattctgtgggccagctgcaactatatcgccacccagaccgttcgcagccagcattcttggatgcaattgaccgacgggaagacacattttatgttgtctctttccgaagggaccacctgctgctcccagccatcagccacaacaagacctcccggcccaagatgtccctggtgatgcctgccatggcccccaatgagaccctgtcaggccgtggggccccgggggactatgaggagatgatgcagatcgagtgtgaggtcatggacaccagggtgattcacatcaagacctccacagtgcccccctcgctccgaaaacagccatccccaaccccaggcaatgccacaggtggccccttgccagtctctgcagccagccaggcccaccaggcctcccaccagcccctctacctcaatcatccctgacctctgccattcacactgacttagaacggggggagggggtaccaggtggccaggtgggactgtttcaaatttccctgatccccaggcttggggcaattggtaaaggaaagagcaggtgtgggggttaagcacttatttgaggtgggggtgttcacctctcttctcatcccttttcagaatatagggctcctctcattcctgtgaacccccagtcccggcttctttgtttgaggggattgtgtgaggttcagttgtggggtgggtggtgagctgctgcatattttttattttgtttctctagtgttatggcagtggaggtgggaatttagtccccaggtgggacaagggaagttttttcattttggagctagttactgggagtaagggagggtggggtgggggggagttcaggtttatgtgtgtgcatttcttttttattattattaaataaacaacttggagggagttgaaggaa

SEQ ID NO: 145871 - DNA, 2112 bp, Artificial Sequence
  derived and/or modified sequence
atggccgagctgatgctgctgagcgagatcgccgaccccaccagattcttcaccgacaacctgctgagccccgaggactggggcctgcagaacagcaccctgtacagcggcctggacgaggtggccgaggagcagacccagctgttcagatgccccgagcaggacgtgcccttcgacggcagcagcctggacgtgggcatggacgtgagccccagcgagcccccctgggagctgctgcccatcttccccgacctgcaggtgaagagcgagcccagcagcccctgcagcagcagcagcctgagcagcgagagcagcagactgagcaccgagcccagcagcgaggccctgggcgtgggcgaggtgctgcacgtgaagaccgagagcctggccccccccctgtgcctgctgggcgacgaccccaccagcagcttcgagaccgtgcagatcaacgtgatccccaccagcgacgacagcagcgacgtgcagaccaagatcgagcccgtgagcccctgcagcagcgtgaacagcgaggccagcctgctgagcgccgacagcagcagccaggccttcatcggcgaggaggtgctggaggtgaagaccgagagcctgagccccagcggctgcctgctgtgggacgtgcccgcccccagcctgggcgccgtgcagatcagcatgggccccagcctggacggcagcagcggcaaggccctgcccaccagaaagccccccctgcagcccaagcccgtggtgctgaccaccgtgcccatgcccagcagagccgtgccccccagcaccaccgtgctgctgcagagcctggtgcagcccccccccgtgagccccgtggtgctgatccagggcgccatcagagtgcagcccgagggccccgcccccagcctgcccagacccgagagaaagagcatcgtgcccgcccccatgcccggcaacagctgcccccccgaggtggacgccaagctgctgaagagacagcagagaatgatcaagaacagagagagcgcctgccagagcagaagaaagaagaaggagtacctgcagggcctggaggccagactgcaggccgtgctggccgacaaccagcagctgagaagagagaacgccgccctgagaagaagactggaggccctgctggccgagaacagcgagctgaagctgggcagcggcaacagaaaggtggtgtgcatcatggtgttcctgctgttcatcgccttcaacttcggccccgtgagcatcagcgagccccccagcgcccccatcagccccagaatgaacaagggcgagccccagcccagaagacacctgctgggcttcagcgagcaggagcccgtgcagggcgtggagcccctgcagggcagcagccagggccccaaggagccccagcccagccccaccgaccagcccagcttcagcaacctgaccgccttccccggcggcgccaaggagctgctgctgagagacctggaccagctgttcctgagcagcgactgcagacacttcaacagaaccgagagcctgagactggccgacgagctgagcggctgggtgcagagacaccagagaggcagaagaaagatcccccagagagcccaggagagacagaagagccagcccagaaagaagagcccccccgtgaaggccgtgcccatccagccccccggcccccccgagagagacagcgtgggccagctgcagctgtacagacaccccgacagaagccagcccgccttcctggacgccatcgacagaagagaggacaccttctacgtggtgagcttcagaagagaccacctgctgctgcccgccatcagccacaacaagaccagcagacccaagatgagcctggtgatgcccgccatggcccccaacgagaccctgagcggcagaggcgcccccggcgactacgaggagatgatgcagatcgagtgcgaggtgatggacaccagagtgatccacatcaagaccagcaccgtgccccccagcctgagaaagcagcccagccccacccccggcaacgccaccggcggccccctgcccgtgagcgccgccagccaggcccaccaggccagccaccagcccctgtacctgaaccacccctag

SEQ ID NO: 145872 - DNA, 429 bp, Artificial Sequence
  derived and/or modified sequence
tgacagcccagccccaccgaccagcccagcttcagcaacctgaccgccttccccggcggcgccaaggagctgctgctgagagacctggaccagctgttcctgagcagcgactgcagacacttcaacagaaccgagagcctgagactggccgacgagctgagcggctgggtgcagagacaccagagaggcagaagaaagatcccccagagagcccaggagagacagagcctggacaccagccccagcagaagcctgagccacggcagaagccacctgcagctgagacagagccccagcaaccccctggacccccagaagggcatcctgtgggccagctgcaactacatcgccacccagaccgtgagaagccagcacagctggatgcagctgaccgacggcaagacccacttcatgctgagcctgagctag

SEQ ID NO: 145873 - DNA, 2620 bp, Artificial Sequence
  derived and/or modified sequence
aaccgtctcctggttggggggtgggggggaaagatggcggagctgatgctgctcagcgagattgctgacccgacgcgtttcttcaccgacaacctgcttagcccggaggactggggtctgcagaacagcaccttgtattctggcctagatgaagtggccgaggagcagacgcagctcttccgttgcccggagcaggatgtcccgtttgacggcagctccctggacgtggggatggatgtcagcccctctgagcccccatgggaactcctgccgatcttcccagatcttcaggtgaagtctgagccatcttccccctgctcttcctcctccctcagctccgagtcatcgcgtctctccacagagccatccagcgaggctcttggggtaggggaggtgctccatgtgaagacagagtccttggcacccccactgtgtctcctgggagatgacccaacatcctcatttgaaaccgtccagatcaacgttatccccacctctgatgattcctcagatgtccagaccaagatagaacctgtctctccatgttcttccgtcaactctgaggcctccctgctctcagccgactcctccagccaggcttttataggagaggaggtcctggaagtgaagacagagtccctgtccccttcaggatgcctcctgtgggatgtcccagccccctcacttggagctgtccagatcagcatgggcccatcccttgatggctcctcaggcaaagccctgcccacccggaagccgccactgcagcccaaacctgtagtgctaaccactgtcccaatgccatccagagctgtgcctcccagcaccacagtccttctgcagtccctcgtccagccacccccagtgtccccagttgtcctcatccagggtgctattcgagtccagcctgaagggccggctccctctctaccacggcctgagaggaagagcatcgttcccgctcctatgcctggaaactcctgcccgcctgaagtggatgcaaagctgctgaagcggcagcagcgaatgatcaagaaccgggagtcagcctgccagtcccggagaaagaagaaagagtatctgcagggactggaggctcggctgcaagcagtactggctgacaaccagcagctccgccgagagaatgctgccctccggcggcggctggaggccctgctggctgaaaacagcgagctcaagttagggtctggaaacaggaaggtggtctgcatcatggtcttccttctcttcattgccttcaactttggacctgtcagcatcagtgagcctccttcagctcccatctctcctcggatgaacaagggggagcctcaaccccggagacacttgctggggttctcagagcaagagccagttcagggagttgaacctctccaggggtcctcccagggccctaaggagccccagcccagccccacagaccagcccagtttcagcaacctgacagccttccctgggggcgccaaggagctactactaagagacctagaccagctcttcctctcctctgattgccggcacttcaaccgcactgagtccctgaggcttgctgacgagttgagtggctgggtccagcgccaccagagaggccggaggaagatccctcagagggcccaggagagacagaagtctcagccacggaagaagtcacctccagttaaggcagtccccatccaaccccctggacccccagaaagggattctgtgggccagctgcaactatatcgccacccagaccgttcgcagccagcattcttggatgcaattgaccgacgggaagacacattttatgttgtctctttccgaagggaccacctgctgctcccagccatcagccacaacaagacctcccggcccaagatgtccctggtgatgcctgccatggcccccaatgagaccctgtcaggccgtggggccccgggggactatgaggagatgatgcagatcgagtgtgaggtcatggacaccagggtgattcacatcaagacctccacagtgcccccctcgctccgaaaacagccatccccaaccccaggcaatgccacaggtggccccttgccagtctctgcagccagccaggcccaccaggcctcccaccagcccctctacctcaatcatccctgacctctgccattcacactgacttagaacggggggagggggtaccaggtggccaggtgggactgtttcaaatttccctgatccccaggcttggggcaattggtaaaggaaagagcaggtgtgggggttaagcacttatttgaggtgggggtgttcacctctcttctcatcccttttcagaatatagggctcctctcattcctgtgaacccccagtcctggcttctttgtttgaggggattgtgtgaggttcagttgtggggtgggtggtgagctgctgcatattttttattttgtttctctagtgttatggcagtggaggtgggaatttagtccccaggtgggacaagggaagttttttcattttggagctagttactgggagtaagggagggtggggtgggggggagttcaggtttatgtgtgtgcatttcttttttattattattaaataaacaacttggagggagttgaaggaa

SEQ ID NO: 145874 - DNA, 425 bp, Artificial Sequence
  derived and/or modified sequence
ccagcccagccccacagaccagcccagtttcagcaacctgacagccttccctgggggcgccaaggagctactactaagagacctagaccagctcttcctctcctctgattgccggcacttcaaccgcactgagtccctgaggcttgctgacgagttgagtggctgggtccagcgccaccagagaggccggaggaagatccctcagagggcccaggagagacagtccttagatacttctccttccagaagtctcagccacggaagaagtcacctccagttaaggcagtccccatccaaccccctggacccccagaaagggattctgtgggccagctgcaactatatcgccacccagaccgttcgcagccagcattcttggatgcaattgaccgacgggaagacacattttatgttgtctctttccg

SEQ ID NO: 145875 - DNA, 2620 bp, Artificial Sequence
  derived and/or modified sequence
aaccgtctcctggttggggggtgggggggaaagatggcggagctgatgctgctcagcgagattgctgacccgacgcgtttcttcaccgacaacctgcttagcccggaggactggggtctgcagaacagcaccttgtattctggcctagatgaagtggccgaggagcagacgcagctcttccgttgcccggagcaggatgtcccgtttgacggcagctccctggacgtggggatggatgtcagcccctctgagcccccatgggaactcctgccgatcttcccagatcttcaggtgaagtctgagccatcttccccctgctcttcctcctccctcagctccgagtcatcgcgtctctccacagagccatccagcgaggctcttggggtaggggaggtgctccatgtgaagacagagtccttggcacccccactgtgtctcctgggagatgacccaacatcctcatttgaaaccgtccagatcaacgttatccccacctctgatgattcctcagatgtccagaccaagatagaacctgtctctccatgttcttccgtcaactctgaggcctccctgctctcagccgactcctccagccaggcttttataggagaggaggtcctggaagtgaagacagagtccctgtcgccttcaggatgcctcctgtgggatgtcccagccccctcacttggagctgtccagatcagcatgggcccatcccttgatggctcctcaggcaaagccctgcccacccggaagccgccactgcagcccaaacctgtagtgctaaccactgtcccaatgccatccagagctgtgcctcccagcaccacagtccttctgcagtccctcgtccagccacccccagtgtccccagttgtcctcatccagggtgctattcgagtccagcctgaagggccggctccctctctaccacggcctgagaggaagagcatcgttcccgctcctatgcctggaaactcctgcccgcctgaagtggatgcaaagctgctgaagcggcagcagcgaatgatcaagaaccgggagtcagcctgccagtcccggagaaagaagaaagagtatctgcagggactggaggctcggctgcaagcagtactggctgacaaccagcagctccgccgagagaatgctgccctccggcggcggctggaggccctgctggctgaaaacagcgagctcaagttagggtctggaaacaggaaggtggtctgcatcatggtcttccttctcttcattgccttcaactttggacctgtcagcatcagtgagcctccttcagctcccatctctcctcggatgaacaagggggagcctcaaccccggagacacttgctggggttctcagagcaagagccagttcagggagttgaacctctccaggggtcctcccagggccctaaggagccccagcccagccccacagaccagcccagtttcagcaacctgacagccttccctgggggcgccaaggagctactactaagagacctagaccagctcttcctctcctctgattgccggcacttcaaccgcactgagtccctgaggcttgctgacgagttgagtggctgggtccagcgccaccagagaggccggaggaagatccctcagagggcccaggagagacagaagtctcagccacggaagaagtcacctccagttaaggcagtccccatccaaccccctggacccccagaaagggattctgtgggccagctgcaactatatcgccacccagaccgttcgcagccagcattcttggatgcaattgaccgacgggaagacacattttatgttgtctctttccgaagggaccacctgctgctcccagccatcagccacaacaagacctcccggcccaagatgtccctggtgatgcctgccatggcccccaatgagaccctgtcaggccgtggggccccgggggactatgaggagatgatgcagatcgagtgtgaggtcatggacaccagggtgattcacatcaagacctccacagtgcccccctcgctccgaaaacagccatccccaaccccaggcaatgccacaggtggccccttgccagtctctgcagccagccaggcccaccaggcctcccaccagcccctctacctcaatcatccctgacctctgccattcacactgacttagaacggggggagggggtaccaggtggccaggtgggactgtttcaaatttccctgatccccaggcttggggcaattggtaaaggaaagagcaggtgtgggggttaagcacttatttgaggtgggggtgttcacctctcttctcatcccttttcagaatatagggctcctctcattcctgtgaacccccagtcctggcttctttgtttgaggggattgtgtgaggttcagttgtggggtgggtggtgagctgctgcatattttttattttgtttctctagtgttatggcagtggaggtgggaatttagtccccaggtggaacaagggaagttttttcattttggagctagttactgggagtaagggagggtggggtgggggggagttcaggtttatgtgtgtgcatttcttttttattattattaaataaacaacttggagggagttgaaggaa

SEQ ID NO: 145876 - DNA, 2620 bp, Artificial Sequence
  derived and/or modified sequence
aaccgtctcctggttgtggggtgggggggaaagatggcggagctgatgctgctcagcgagattgctgacccgacgcgtttcttcaccgacaacctgcttagcccggaggactggggtctgcagaacagcaccttgtattctggcctagatgaagtggccgaggagcagacgcagctcttccgttgcccggagcaggatgtcccgtttgacggcagctccctggacgtggggatggatgtcagcccctctgagcccccatgggaactcctgccgatcttcccagatcttcaggtgaagtctgagccatcttccccctgctcttcctcctccctcagctccgagtcatcgcgtctctccacagagccatccagcgaggctcttggggtaggggaggtgctccatgtgaagacagagtccttggcacccccactgtgtctcctgggagatgacccaacatcctcatttgaaaccgtccagatcaacgttatccccacctctgatgattcctcagatgtccagaccaagatagaacctgtctctccatgttcttccgtcaactctgaggcctccctgctctcagccgactcctccagccaggcttttataggagaggaggtcctggaagtgaagacagagtccctgtccccttcaggatgcctcctgtgggatgtcccagccccctcacttggagctgtccagatcagcatgggcccatcccttgatggctcctcaggcaaagccctgcccacccggaagccgccactgcagcccaaacctgtagtgctaaccactgtcccaatgccatccagagctgtgcctcccagcaccacagtccttctgcagtccctcgtccagccacccccagtgtccccagttgtcctcatccagggtgctattcgagtccagcctgaagggccggctccctctctaccacggcctgagaggaagagcatcgttcccgctcctatgcctggaaactcctgcccgcctgaagtggatgcaaagctgctgaagcggcagcagcgaatgatcaagaaccgggagtcagcctgccagtcccggagaaagaagaaagagtatctgcagggactggaggctcggctgcaagcagtactggctgacaaccagcagctccgccgagagaatgctgccctccggcggcggctggaggccctgctggctgaaaacagcgagctcaagttagggtctggaaacaggaaggtggtctgcatcatggtcttccttctcttcattgccttcaactttggacctgtcagcatcagtgagcctccttcagctcccatctctcctcggatgaacaagggggagcctcaaccccggagacacttgctggggttctcagagcaagagccagttcagggagttgaacctctccaggggtcctcccagggccctaaggagccccagcccagccccacagaccagcccagtttcagcaacctgacagccttccctgggggcgccaaggagctactactaagagacctagaccagctcttcctctcctctgattgccggcacttcaaccgcactgagtccctgaggcttgctgacgagttgagtggctgggtccagcgccaccagagaggccggaggaagatccctcagagggcccaggagagacagaagtctcagccacggaagaagtcacctccagttaaggcagtccccatccaaccccctggacccccagaaagggattctgtgggccagctgcaactatatcgccacccagaccgttcgcagccagcattcttggatgcaattgaccgacgggaagacacattttatgttgtctctttccgaagggaccacctgctgctcccagccatcagccacaacaagacctcccggcccaagatgtccctggtgatgcctgccatggcccccaatgagaccctgtcaggccgtggggccccgggggactatgaggagatgatgcagatcgagtgtgaggtcatggacaccagggtgattcacatcaagacctccacagtgcccccctcgctccgaaaacagccatccccaaccccaggcaatgccacaggtggccccttgccagtctctgcagccagccaggcccaccaggcctcccaccagcccctctacctcaatcatccctgacctctgccattcacactgacttagaacggggggagggggtaccaggtggccaggtgggactgtttcaaatttccctgatccccaggcttggggcaattggtaaaggaaagagcaggtgtgggggttaagcacttatttgaggtgggggtgttcacctctcttctcatcccttttcagaatatagggctcctctcattcctgtgaacccccagtcctggcttctttgtttgaggggattgtgtgaggttcagttgtggggtgggtggtgagctgctgcatattttttattttgtttctctagtgttatggcagtggaggtgggaatttagtccccaggtgggacaagggaagttttttcattttggagctagttactgggagtaagggagggtggggtgggggggagttcaggtttatgtgtgtgcatttcttttttattattattaaataaacaacttggagggagttgaaggaa

SEQ ID NO: 145877 - protein, 415 aa, Artificial Sequence
  derived and/or modified sequence
MGGHPQLRLVKALLLLGLNPVSASLQDQHCESLSLASNISGLQCNASVDLIGTCWPRSPAGQLVVRPCPAFFYGVRYNTTNNGYRECLANGSWAARVNYSECQEILNEEKKSKVHYHVAVIINYLGHCISLVALLVAFVLFLRLRSIRCLRNIIHWNLISAFILRNATWFVVQLTMSPEVHQSNVGWCRLVTAAYNYFHVTNFFWMFGEGCYLHTAIVLTYSTDRLRKWMFICIGWGVPFPIIVAWAIGKLYYDNEKCWFGKRPGVYTDYIYQGPMILVLLINFIFLFNIVRILMTKLRASTTSETIQYRKAVKATLVLLPLLGITYMLFFVNPGEDEVSRVVFIYFNSFLESFQGFFVSVFYCFLNSEVRSAIRKRWHRWQDKHSIRARVARAMSIPTSPTRVSFHSIKQSTAV

SEQ ID NO: 145878 - DNA, 1618 bp, Artificial Sequence
  derived and/or modified sequence
ctttcagataccttctcgaaacaaaagattttcctacctgcttatacttggtaaccgagggaattactaagacttcttgctcatttctgagtattgtctttatatcctgacactatgaatgctacttggatgcctcttaagggtctcttctgcagggtccccatgaattgtggctgaagttgtgcacaaacaagtatctccagtgacaggagtgccttctgaggcagccattgcatcttcatctgctgacactctgctaggctgacttctgtagttttcaccactgatcttcagtccacctcacagagctctataaaacgcttaaatcctctttacatcatagactttcagctacttgaagatagccatcagccgctacgtgactcttttctccaggcccttctccttctggggctgaaccccgtctctgcctccctccaggaccagcactgcgagagcctgtccctggccagcaacatctcaggactgcagtgcaacgcatccgtggacctcattggcacctgctggccccgcagccctgcggggcagctagtggttcggccctgccctgcctttttctatggtgtccgctacaataccacaaacaatggctaccgggagtgcctggccaatggcagctgggccgcccgcgtgaattactccgagtgccaggagatcctcaatgaggagaaaaaaagcaaggtgcactaccatgtcgcagtcatcatcaactacctgggccactgtatctccctggtggccctcctggtggcctttgtcctctttctgcggctcaggagcatccggtgcctgcgaaacatcatccactggaacctcatctccgccttcatcctgcgcaacgccacctggttcgtggtccagctaaccatgagccccgaggtccaccagagcaacgtgggctggtgcaggttggtgacagccgcctacaactacttccatgtgaccaacttcttctggatgttcggcgagggctgctacctgcacacagccatcgtgctcacctactccaccgaccggctgcgcaaatggatgttcatctgcattggctggggtgtgcccttccccatcattgtggcctgggccattgggaagctgtactacgacaatgagaagtgttggtttggcaaaaggcctggggtgtacaccgactacatctaccagggccccatgatcctggtcctgctgatcaatttcatcttccttttcaacatcgtccgcatcctcatgaccaagctccgggcatccaccacgtctgagaccattcagtacaggaaggctgtgaaagccactctggtgctgctgcccctcctgggcatcacctacatgctgttcttcgtcaatcccggggaggatgaggtctcccgggtcgtcttcatctacttcaactccttcctggaatccttccagggcttctttgtgtctgtgttctactgtttcctcaatagtgaggtccgttctgccatccggaagaggtggcaccggtggcaggacaagcactcgatccgtgcccgagtggcccgtgccatgtccatccccacctccccaacccgtgtcagctttcacagcatcaagcagtccacagcagtctgagctggca

SEQ ID NO: 145879 - DNA, 2577 bp, Artificial Sequence
  derived and/or modified sequence
ggcgaggccggcaagaggcggccgcgggccgggctgcgtcgggaaacggcggccagacttccccgggaaggggcgagcgagagccgggccgggccgggccgggccgcggggccgggaagcgccgagccgggcatctcctcaccaggcagcgaccgaggagcccggccgcccaccccgtgccgcccgagcccgcagccgcccgccggtccctctgggatgtccgtaggacccgggcattcaggacggtagccgagcgagcccgaggatgggagggcacccgcagctccgtctcgtcaaggcccttctccttctggggctgaaccccgtctctgcctccctccaggaccagcactgcgagagcctgtccctggccagcaacatctcaggactgcagtgcaacgcatccgtggacctcattggcacctgctggccccgcagccctgcggggcagctagtggttcggccctgccctgcctttttctatggtgtccgctacaataccacaaacaatggctaccgggagtgcctggccaatggcagctgggccgcccgcgtgaattactccgagtgccaggagatcctcaatgaggagaaaaaaagcaaggtgcactaccatgtcgcagtcatcatcaactacctgggccactgtatctccctggtggccctcctggtggcctttgtcctctttctgcggctcaggagcatccggtgcctgcgaaacatcatccactggaacctcatctccgccttcatcctgcgcaacgccacctggttcgtggtccagctaaccatgagccccgaggtccaccagagcaacgtgggctggtgcaggttggtgacagccgcctacaactacttccatgtgaccaacttcttctggatgttcggcgagggctgctacctgcacacagccatcgtgctcacctactccaccgaccggctgcgcaaatggatgttcatctgcattggctggggtgtgcccttccccatcattgtggcctgggccattgggaagctgtactacgacaatgagaagtgttggtttggcaaaaggcctggggtgtacaccgactacatctaccagggccccatgatcctggtcctgctgatcaatttcatcttccttttcaacatcgtccgcatcctcatgaccaagctccgggcatccaccacgtctgagaccattcagtacaggaaggctgtgaaagccactctggtgctgctgcccctcctgggcatcacctacatgctgttcttcgtcaatcccggggaggatgaggtctcccgggtcgtcttcatctacttcaactccttcctggaatccttccagggcttctttgtgtctgtgttctactgtttcctcaatagtgaggtccgttctgccatccggaagaggtggcaccggtggcaggacaagcactcgatccgtgcccgagtggcccgtgccatgtccatccccacctccccaacccgtgtcagctttcacagcatcaagcagtccacagcagtctgagctggcaggtcatggagcagcccccaaacagctgtggctggggggatgacggccaggctccctgaccaccctgcctgtggaggtgacctgttaggtctcatgcccactcccccaggagcagctggcactgacagcctggggggggccgctcttcccctgcagccgtgcaggactctagctcatgagtggaaagtcacctacaggactgggccgggcccagggcctctggcttccctgcccaatcctccctggagaagggacatgggaatgaattgaaatggggcgctggacacctacagcagcacgcatgtccctccaaggctgccttctcccagagcacaagaaggccagcccactggggcctggggctgccctcggcaaccgtggggaggccatttgctgccctggggcatcatgggcaactcgtgacagcctctgactcaccacgatgatgcctctggacctcggtgatgccttccgacaccactgggaaccaagggccctcgctcaggaaccctggagacagaagtcaggtgtcatcatcagacttgcggccacagcactagagtcacccccccaggcctccagaacctcactggcactgtggcactgccaccagcaatgccctgccttgctgccttcaccctgaacatttactaccctgcaggccaggccagcttcccctcacttaaccaccccacaccagtcacctcctgctccttttcctcttttgtgagaagatgggggctggagggggcagagtggcctgtgagcaagagccaggggtgtcccagtcccagcctctggggcagagcttgtagccctggatggcctctggggcaggaccactagctaagcaagccaggagaagacccctgcccaagtggctcttgggacaacgtgctgcttacactccaggtgtggaccggccgcagcccccactgacctgcccatgtccagagggactggacagccagggcagggctttggggggcactagaagatgagggtgtcggctgtgaggcgggtggctggtataaataatatttatcttttcaaccagc

SEQ ID NO: 145880 - DNA, 1577 bp, Artificial Sequence
  derived and/or modified sequence
agattttcctacctgcttatacttggtaaccgagggaattactaagacttcttgctcatttctgagtattgtctttatatcctgacactatgaatgctacttggatgcctcttaagggtctcttctgcagggtccccatgaattgtggctgaagttgtgcacaaacaagtatctccagtgacaggagtgccttctgaggcagccattgcatcttcatctgctgacactctgctaggctgacttctgtagttttcaccactgatcttcagtccacctcacagagctctataaaacgcttaaatcctctttacatcatagactttcagctacttgaagatagccatcagccgctacgtgactcttttctccaggaacgaggggtccctgagggaaaggactggggctccttcatctctgtgatcctagtgcagtgtctgaaggcatcaggcccttctccttctggggctgaaccccgtctctgcctccctccaggaccagcactgcgagagcctgtccctggccagcaacatctcaggactgcagtgcaacgcatccgtggacctcattggcacctgctggccccgcagccctgcggggcagctagtggttcggccctgccctgcctttttctatggtgtccgctacaataccacaaaaaaaaagcaaggtgcactaccatgtcgcagtcatcatcaactacctgggccactgtatctccctggtggccctcctggtggcctttgtcctctttctgcggctcaggagcatccggtgcctgcgaaacatcatccactggaacctcatctccgccttcatcctgcgcaacgccacctggttcgtggtccagctaaccatgagccccgaggtccaccagagcaacgtgggctggtgcaggttggtgacagccgcctacaactacttccatgtgaccaacttcttctggatgttcggcgagggctgctacctgcacacagccatcgtgctcacctactccaccgaccggctgcgcaaatggatgttcatctgcattggctggggtgtgcccttccccatcattgtggcctgggccattgggaagctgtactacgacaatgagaagtgttggtttggcaaaaggcctggggtgtacaccgactacatctaccagggccccatgatcctggtcctgctgatcaatttcatcttccttttcaacatcgtccgcatcctcatgaccaagctccgggcatccaccacgtctgagaccattcagtacagggcttctttgtgtctgtgttctactgtttcctcaatagtgaggtccgttctgccatccggaagaggtggcaccggtggcaggacaagcactcgatccgtgcccgagtggcccgtgccatgtccatccccacctccccaacccgtgtcagctttcacagcatcaagcagtccacagcagtctgagctggcaggtcatggagcagcccccaaacagctgtggctggggggatgacggccaggctccctgaccaccctgcctgtggaggtgacctgttaggtctcatgcccactcccccaggagcagctggcactgacagcct

SEQ ID NO: 145881 - DNA, 1248 bp, Artificial Sequence
  derived and/or modified sequence
atgggcggccacccccagctgagactggtgaaggccctgctgctgctgggcctgaaccccgtgagcgccagcctgcaggaccagcactgcgagagcctgagcctggccagcaacatcagcggcctgcagtgcaacgccagcgtggacctgatcggcacctgctggcccagaagccccgccggccagctggtggtgagaccctgccccgccttcttctacggcgtgagatacaacaccaccaacaacggctacagagagtgcctggccaacggcagctgggccgccagagtgaactacagcgagtgccaggagatcctgaacgaggagaagaagagcaaggtgcactaccacgtggccgtgatcatcaactacctgggccactgcatcagcctggtggccctgctggtggccttcgtgctgttcctgagactgagaagcatcagatgcctgagaaacatcatccactggaacctgatcagcgccttcatcctgagaaacgccacctggttcgtggtgcagctgaccatgagccccgaggtgcaccagagcaacgtgggctggtgcagactggtgaccgccgcctacaactacttccacgtgaccaacttcttctggatgttcggcgagggctgctacctgcacaccgccatcgtgctgacctacagcaccgacagactgagaaagtggatgttcatctgcatcggctggggcgtgcccttccccatcatcgtggcctgggccatcggcaagctgtactacgacaacgagaagtgctggttcggcaagagacccggcgtgtacaccgactacatctaccagggccccatgatcctggtgctgctgatcaacttcatcttcctgttcaacatcgtgagaatcctgatgaccaagctgagagccagcaccaccagcgagaccatccagtacagaaaggccgtgaaggccaccctggtgctgctgcccctgctgggcatcacctacatgctgttcttcgtgaaccccggcgaggacgaggtgagcagagtggtgttcatctacttcaacagcttcctggagagcttccagggcttcttcgtgagcgtgttctactgcttcctgaacagcgaggtgagaagcgccatcagaaagagatggcacagatggcaggacaagcacagcatcagagccagagtggccagagccatgagcatccccaccagccccaccagagtgagcttccacagcatcaagcagagcaccgccgtgtag

SEQ ID NO: 145882 - DNA, 1248 bp, Artificial Sequence
  derived and/or modified sequence
atgggagggcacccacaattaagactggtgaaggcgctgcttttgttgggccttaacccagtgagcgccagcctgcaagatcagcattgtgagtctttgtccctggcctccaatatatcaggcttacaatgtaacgcatccgtggacttgattgggacttgctggccgaggtctcccgcaggccagcttgtcgttcgtccctgtccagcctttttctacggcgtccgttataacaccacaaataacggctatcgcgagtgcctggcaaacggctcttgggccgcgcgcgttaattatagcgaatgtcaggagatactgaacgaagaaaaaaaaagcaaggtacactatcacgtggccgtgatcatcaactatctgggccattgcattagcctggtagcactgctggttgcttttgtactatttctgcggctccgtagcatccgttgcctcagaaacataatccactggaaccttattagcgcctttatcttacgtaatgcaacatggttcgtagtgcagctgaccatgtcaccagaggtgcaccaatccaatgtcggctggtgtcggctcgtcacggctgcgtataactactttcacgttaccaacttcttttggatgttcggagagggttgttatctgcacactgccatcgtactgacgtactctaccgatcgccttagaaagtggatgttcatctgtattggctggggagtcccattccccatcatcgtcgcctgggctataggcaaactgtattatgataatgagaagtgttggtttgggaagaggccgggtgtttataccgactacatctaccaggggcccatgatcctcgtcctcctaattaacttcatatttctttttaatattgtgcgtatcctaatgacaaaactgcgggccagtacgacgtccgagactatccaatacaggaaagcagtgaaggccactctggtgctgctcccactgctggggataacctatatgctcttcttcgtgaaccctggagaagacgaagtgtcccgggtggtcttcatctactttaattcgtttcttgagagcttccagggatttttcgtgtccgtgttctactgcttcctgaactctgaagttcggtcagcaatccggaaaagatggcataggtggcaggacaagcacagcatcagggccagagtggctcgggctatgagtatacccacaagccccaccagggtctcctttcactccattaagcaatctacggctgtatag

SEQ ID NO: 145883 - DNA, 1248 bp, Artificial Sequence
  derived and/or modified sequence
atgggcggccacccccagctgcggctggtgaaggccctgctgctgctgggcctgaaccctgtgtctgccagcctgcaggaccagcactgtgagagcctgagcctggccagcaacatcagcggcctgcagtgcaatgcctctgtggacctgattggcacctgctggcccaggagccctgctggccagctggtggtgcggccctgcccagccttcttctatggagtgcgctacaacaccaccaacaacggctaccgggagtgcctggccaacggctcctgggccgcccgggtgaactacagcgagtgccaggagatcctgaatgaggagaagaagagcaaggtgcactaccacgtggccgtcatcatcaactacctgggccactgcatcagcctggtggccctgctggtggcctttgtgctcttcctgcggctgcggagcatccgctgcctgaggaacatcatccactggaacctgatcagcgccttcatcctgagaaatgccacctggtttgtggtgcagctgaccatgagccctgaggtgcaccagagcaatgtgggctggtgccgcctggtgacagctgcctacaactacttccacgtgaccaacttcttctggatgtttggagagggctgctacctgcacacagccatcgtgctgacctacagcacagaccggctgaggaagtggatgttcatctgcatcggctggggcgtgcccttccccatcatcgtggcctgggccatcggcaagctgtactatgacaatgagaagtgctggtttgggaagaggcctggggtgtacacagactacatctaccagggccccatgatcctggtgctgctgatcaacttcatcttcctgttcaacatcgtgcgcatcctgatgaccaagctgcgggccagcaccaccagcgagaccatccagtacaggaaggctgtgaaggccaccctggtgctgctgcccctgctgggcatcacctacatgctgttctttgtgaaccctggagaagatgaggtgtcccgggtggtgttcatctacttcaacagcttcctggagagcttccagggcttctttgtgtctgtgttctactgcttcctgaacagcgaggtgcgcagcgccatcaggaagcgctggcaccgctggcaggacaagcacagcatccgggcccgggtggcccgggccatgagcatccccaccagccccaccagggtgtccttccacagcatcaagcagagcacagctgtgtag

SEQ ID NO: 145884 - DNA, 1248 bp, Artificial Sequence
  derived and/or modified sequence
atgggcggccacccccagctgcggctggtgaaggccctgctgctgctgggattaaaccccgtgtcagccagtctgcaagatcagcattgcgaatccctcagcctggcgagcaacataagtggcctccagtgtaacgccagcgtcgatctcattgggacgtgctggccccgctcccctgctggacagctggtcgtcagaccatgcccagcctttttttacggtgtgcggtataacacaaccaacaacggatacagggaatgcctcgccaatgggagttgggctgcccgcgtgaattactccgaatgtcaggagatcctcaatgaggaaaagaagagcaaagttcactaccacgtggccgtaatcattaactatctcgggcattgtatcagcctggttgctctgctcgttgccttcgtcctgttcttgagattacgatctatacgctgcttgcgaaacataattcactggaaccttatctccgcttttattctccgcaatgctacctggttcgtggttcaactgacgatgagcccagaagtgcaccagtctaacgtgggctggtgccgactggtgaccgcagcatacaactacttccacgtcactaacttcttttggatgttcggggaaggctgctatctccacaccgcaattgtgctgacatacagcactgatcgactaaggaaatggatgttcatttgtattgggtggggtgtgccctttccaataatcgtcgcatgggctatcgggaagctgtactacgataacgagaaatgctggtttggaaaacggcccggagtctacacagattacatctatcaaggcccaatgatcttggtgctgctcatcaactttattttcctcttcaatatcgttagaatcctgatgactaagctgcgcgcctcaacaacttccgagaccatccaatatcgaaaggcggtgaaagctactctggtgctattgcccctactggggatcacatacatgctgttttttgtaaacccaggggaagacgaggtcagccgggtggtattcatctattttaattccttcctggaatcattccagggcttctttgtatctgtgttttactgtttcctgaattcagaggtaagatcggccatccgcaagcggtggcacagatggcaagataaacactccatcagggctcgtgtcgcgcgggctatgtcaattcctaccagccctactcgggtgtctttccactcaataaagcaatctaccgccgtgtag

SEQ ID NO: 145885 - DNA, 1248 bp, Artificial Sequence
  derived and/or modified sequence
atgggaggtcaccctcaattgcgcctcgtaaaagccttactcctactgggccttaaccctgtgtccgcctctctgcaagatcagcattgcgaatcactatctttggcatccaatatcagcggcctgcaatgtaatgcctccgtagacttgattggtacgtgctggccgcgttccccagctggacagcttgtggtgcgaccatgccccgcatttttttacggcgttcgctacaatacgaccaacaatggctacagagagtgtctggctaatggcagctgggcagccagggtgaactacagtgagtgccaagaaatactcaatgaggagaagaaatcaaaagtgcactaccacgtggccgtgatcatcaattatttggggcactgtatcagcctggttgccctcctggtggcattcgtcctcttcctgcgtttgcgatccatcaggtgtctgcgcaatattatccattggaatctgatatctgcctttattctgaggaatgccacttggttcgtggtgcagctgacaatgagccctgaggtgcaccagtctaacgttggatggtgcaggttagttacagcggcatacaattacttccatgtgaccaacttcttttggatgttcggtgagggctgttatctgcatactgcaatagtcttaacctattctactgaccggctacgaaagtggatgttcatctgcattggctggggagtcccattccctatcatagtcgcctgggcgatcgggaagctctactatgacaacgagaagtgctggttcgggaaaaggcctggagtctatacagactacatctaccagggccctatgattctggtcctgctgatcaacttcatttttctgttcaacatcgtacggatactgatgacaaagcttagggcatctacgacctcagagaccatccagtatcgcaaggccgtgaaagccaccctggttttgttgcccttgctcggaataacatacatgctttttttcgtcaacccaggcgaagatgaagtgtcacgcgtagtttttatctacttcaatagttttttggagagctttcagggcttctttgtgagcgtcttttattgctttctgaatagtgaagtacggtctgctatcaggaagaggtggcatagatggcaggataagcactctatccgggctagggtggcaagagcaatgtctattccaacttcaccaactagagtcagctttcactccatcaagcagtcaacggcagtatag

SEQ ID NO: 145886 - DNA, 1248 bp, Artificial Sequence
  derived and/or modified sequence
atgggtggacacccccaactgaggctggtcaaggctctcctgctcctgggcctcaaccctgtgtccgcatctctccaggatcagcattgtgaatccctctctctggcctctaacatctctgggctccagtgtaatgccagcgtggacctgatcgggacttgttggccacggtccccagccgggcagctggttgtaaggccctgtcccgccttcttctatggggttagatacaacacaacaaataatggataccgagagtgtctggcgaatggcagttgggctgcccgagtgaactattctgaatgtcaggaaatcctgaacgaagagaagaagtcaaaagtgcattatcacgtggccgtgatcatcaactacctcggccactgcatcagtcttgtggccttgcttgtggcttttgtcctgtttttgcgtctgaggtctattagatgtctaagaaacattattcactggaatcttatttcagccttcatccttcgcaacgccacatggttcgtggtgcagctgactatgtcgccagaagtacaccaatctaacgtggggtggtgccgcttagttaccgccgcatacaactattttcacgttacaaacttcttttggatgttcggagaaggctgctacctacacactgccattgtgctcacttactcaaccgatcggcttagaaaatggatgtttatttgcattggctggggtgtgcctttccccatcatcgtagcttgggcgatcggcaaactgtattatgacaacgagaagtgttggttcggcaagcgccctggcgtgtatactgattacatttaccaaggacctatgatcttggtgctcctgattaactttatctttttgtttaatatcgtccggattctcatgaccaaactgagggccagcaccaccagcgagacgattcagtaccggaaggccgtcaaggccacactggttctgctgcctttgttgggaataacctacatgcttttttttgttaaccccggcgaggacgaggttagcagggtggtgttcatctactttaactctttcctggagtctttccaaggattcttcgtaagcgttttttattgttttttgaattccgaagtgcgatccgccattaggaaaaggtggcacaggtggcaagacaagcattccattagggcaagagttgcgcgtgcaatgagcatccctacctcccctacgagggtgagtttccacagcatcaagcagagcacagccgtgtag

SEQ ID NO: 145887 - DNA, 1248 bp, Artificial Sequence
  derived and/or modified sequence
atgggcggccacccccagctgcggctggtgaaggccctgctgctgctcggcctgaacccagtctcagcctctttgcaggaccagcactgcgagtctttgagtctagcttcaaacattagcggacttcaatgcaacgcgtctgttgatctgatcggtacctgttggccccgtagcccagctggtcagctggtggtccgtccatgtcccgctttcttttatggggtgcggtataatactactaataacgggtatcgcgagtgtttagccaatgggtcctgggcagcacgcgtgaattatagcgagtgtcaagaaattcttaacgaggagaaaaaatcaaaagtgcattaccatgtggcagtcatcattaactatcttggacattgcatctcactggtcgcacttctggtggcttttgtcttattcttgcgcctccggtctatccggtgtttgcgcaatattatccactggaatctcatatccgcattcatcctgcggaatgcaacgtggttcgtggtgcagcttactatgtctcctgaggtccaccaatccaacgtggggtggtgccggctggttacagcggcctacaactatttccatgtgaccaactttttctggatgtttggcgaaggttgctatttgcatactgccattgtcctaacatacagtacggatcgccttcgtaaatggatgttcatatgtatcgggtggggcgttccattcccaatcatcgttgcttgggccatcgggaaactttactacgataatgagaaatgctggtttggtaagaggcccggtgtctacactgattatatttaccaaggaccgatgatcctcgtcctgctaatcaatttcatctttttgtttaacatcgtgcgaattttgatgactaaactgcgggcatccacaacgtcagagacgatacagtataggaaagccgtgaaggcgaccctggtgctcctacccctgctgggcatcacatatatgctgttcttcgtgaatcccggcgaggatgaagtttccagggtcgtcttcatctattttaactcgttcctcgaatcatttcagggtttcttcgtaagcgtcttctactgctttctcaactcggaggtgaggtctgcaatccgcaagcgctggcatcgatggcaggacaaacatagcattagagctagagttgctagagctatgtccatccccacatcccctaccagagtctcattccatagtatcaagcagagtacggccgtctag

SEQ ID NO: 145888 - DNA, 1248 bp, Artificial Sequence
  derived and/or modified sequence
atggggggacatccgcagttgaggcttgtaaaggccttgctactccttggtctgaatccagtctccgcatctctgcaggaccagcattgcgagtccctatcattggctagcaacatctccggattacaatgtaatgcatccgtggacctaattggcacgtgttggcccaggtctcctgctgggcagctggtggttcgtccctgtcccgcatttttctatggggtcaggtataatactactaataatggatacagggaatgcctcgctaacggctcctgggccgctcgggtgaattacagcgagtgtcaggaaatcttaaatgaggagaaaaagagcaaagtgcactatcatgtggctgtcatcatcaactatctgggtcattgtataagtttagtggccctgctggtggcctttgttttattcctgcggctgcgttcaatccgctgtctgaggaacatcattcactggaacttaatttctgccttcatattaagaaatgccacctggtttgtggtacagctgacaatgagccccgaggttcaccagtctaacgtagggtggtgccggctggtgaccgccgcatacaattattttcatgtcaccaattttttctggatgttcggagagggctgctacctgcacaccgctattgttctgacatactccactgatcgccttcgcaagtggatgttcatttgcattggttggggggtgccctttccaattatagttgcgtgggccatcggaaaactatactacgacaacgaaaaatgttggtttgggaagagaccaggagtgtataccgattacatctaccaggggcctatgattttggttctgcttatcaacttcatctttctgttcaatatagtgcgtatcctgatgacaaagctgcgagcctcaactacatccgagaccatccagtatcggaaggccgtgaaggccacccttgtgcttcttcctttactcgggattacctacatgcttttcttcgttaatcctggcgaagacgaggtcagccgcgtggtttttatctactttaactccttcctggagagtttccaaggctttttcgtgagcgttttctattgctttttgaattccgaagtccggagcgcaattcggaagcgctggcatagatggcaggacaagcatagtattcgggcaagagtggccagagctatgtctattccaactagtcccacccgcgtgtcatttcatagcattaagcagtcaacagctgtgtag

SEQ ID NO: 145889 - DNA, 1618 bp, Artificial Sequence
  derived and/or modified sequence
ctttcagataccttctcgaaacaaaagattttcctacctgcttatacttggtaaccgagggaatttctaagacttcttgctcatttctgagtattgtctttatatcctgacactatgaatgctacttggatgcctcttaagggtctcttctgcagggtccccatgaattgtggctgaagttgtgcacaaacaagtatctccagtgacaggagtgccttctgaggcagccattgcatcttcatctgctgacactctgctaggctgacttctgtagttttcaccactgatcttcagtccacctcacagagctctataaaacgcttaaatcctctttacatcatagactttcagctacttgaagatagccatcagccgctacgtgactcttttctccaggcccttctccttctggggctgaaccccgtctctgcctccctccaggaccagcactgcgagagcctgtccctggccagcaacatctcaggactgcagtgcaacgcatccgtggacctcattggcacctgctggccccgcagccctgcggggcagctagtggttcggccctgccctgcctttttctatggtgtccgctacaataccacaaacaatggctaccgggagtgcctggccaatggcagctgggccgcccgcgtgaattactccgagtgccaggagatcctcaatgaggagaaaaaaagcaaggtgcactaccatgtcgcagtcatcatcaactacctgggccactgtatctccctggtggccctcctggtggcctttgtcctctttctgcggctcaggagcatccggtgcctgcgaaacatcatccactggaacctcatctccgccttcatcctgcgcaacgccacctggttcgtggtccagctaaccatgagccccgaggtccaccagagcaacgtgggctggtgcaggttggtgacagccgcctacaactacttccatgtgaccaacttcttctggatgttcggcgagggctgctacctgcacacagccatcgtgctcacctactccactgaccggctgcgcaaatggatgttcatctgcattggctggggtgtgcccttccccatcattgtggcctgggccattgggaagctgtactacgacaatgagaagtgctggtttggcaaaaggcctggggtgtacaccgactacatctaccagggccccatgatcctggtcctgctgatcaatttcatcttccttttcaacatcgtccgcatcctcatgaccaagctccgggcatccaccacgtctgagaccattcagtacaggaaggctgtgaaagccactctggtgctgctgcccctcctgggcatcacctacatgctgttcttcgtcaatcccggggaggatgaggtctcccgggtcgtcttcatctacttcaactccttcctggaatccttccagggcttctttgtgtctgtgttctactgtttcctcaatagtgaggtccgttctgccatccggaagaggtggcaccggtggcaggacaagcactcgatccgtgcccgagtggcccgtgccatgtccatccccacctccccaacccgtgtcagctttcacagcatcaagcagtccacagcagtctgagctggca

SEQ ID NO: 145890 - DNA, 2576 bp, Artificial Sequence
  derived and/or modified sequence
ggcgaggccggcaagaggcggccgcgggccgggctgcgtcgggaaacggcggccagacttccccgggaaggggcgagcgagagccgggccgggccgggccgggccgcggggccgggaagcgccgagccgggcatctcctcaccaggcagcgaccgaggagcccggccgcccaccccgtgccgcccgagcccgcagccgcccgccggtccctctgggatgtccgtaggacccgggcattcaggacggtagccgagcgagcccgaggatgggagggcacccgcagctccgtctcgtcaaggcccttctccttctggggctgaaccccgtctctgcctccctccaggaccagcactgcgagagcctgtccctggccagcaacatctcaggactgcagtgcaacgcatccgtggacctcattggcacctgctggccccgcagccctgcggggcagctagtggttcggccctgccctgcctttttctatggtgtccgctacaataccacaaacaatggctaccgggagtgcctggccaatggcagctgggccgcccgcgtgaattactccgagtgccaggagatcctcaatgaggagaaaaaaagcaaggtgcactaccatgtcgcagtcatcatcaactacctgggccactgtatctccctggtggccctcctggtggcctttgtcctctttctgcggctcaggagcatccggtgcctgcgaaacatcatccactggaacctcatctccgccttcatcctgcgcaacgccacctggttcgtggtccagctaaccatgagccccgaggtccaccagagcaacgtgggctggtgcaggttggtgacagccgcctacaactacttccatgtgaccaacttcttctggatgttcggcgagggctgctacctgcacacagccatcgtgctcacctactccactgaccggctgcgcaaatggatgttcatctgcattggctggggtgtgcccttccccatcattgtggcctgggccattgggaagctgtactacgacaatgagaagtgctggtttggcaaaaggcctggggtgtacaccgactacatctaccagggccccatgatcctggtcctgctgatcaatttcatcttccttttcaacatcgtccgcatcctcatgaccaagctccgggcatccaccacgtctgagaccattcagtacaggaaggctgtgaaagccactctggtgctgctgcccctcctgggcatcacctacatgctgttcttcgtcaatcccggggaggatgaggtctcccgggtcgtcttcatctacttcaactccttcctggaatccttccagggcttctttgtgtctgtgttctactgtttcctcaatagtgaggtccgttctgccatccggaagaggtggcaccggtggcaggacaagcactcgatccgtgcccgagtggcccgtgccatgtccatccccacctccccaacccgtgtcagctttcacagcatcaagcagtccacagcagtctgagctggcaggtcatggagcagcccccaaagagctgtggctggggggatgacggccaggctccctgaccaccctgcctgtggaggtgacctgttaggtctcatgcccactcccccaggagcagctggcactgacagcctgggggggccgctctccccctgcagccgtgcaggactctagctcatgagtggaaagtcacctacaggactgggccgggcccagggcctctggcttccctgcccaatcctccctggagaagggacatgggaatgaattgaaatggggcgctggacacctacagcagcacgcatgtccctccaaggctgtcttctcccagagcacaagaaggccagcccactgggccctggggctgccctcggcaaccgtggggaggccatttgctgccctggggcatcatgggcaactcgtgacagcctctgactcaccacgatgacgcctctggacctcggtgatgccttccgacaccactgggaaccaagggccctcactcaggaaccctggagacagaagtcaggtgtcatcatcagacttgcggccacagcactagagtcacccccccaggcctccagaaccttactggcactgtggcactgccaccagcaatgccctgccttgctgccttcaccctgaacatttagtaccctgcaggccaggccagcttcccctcacttaaccaccccataccagtcacctcctgctccttttcctcttttgtgagaagatgggggctggagggggcagagtggcctgtgagcaagagccaggggtgtcccagtcccagcctctggggcagagcttgtagccctggatggcctctggggcaggaccactagctaagcaagccaggagaagacccctgcccaagtggctcttgggacaacgtgctgcttacactccaggtgtggaccggccgcagcccccactgacctgcccatgtccagagggactggacagccagggcagggctttggggggcactagaagatgagggtgtcggctgtgaggcgggtggctggtataaataatatttatcttttcaaccagc

SEQ ID NO: 145891 - DNA, 1577 bp, Artificial Sequence
  derived and/or modified sequence
agattttcctacctgcttatacttggtaaccgagggaatttctaagacttcttgctcatttctgagtattgtctttatatcctgacactatgaatgctacttggatgcctcttaagggtctcttctgcagggtccccatgaattgtggctgaagttgtgcacaaacaagtatctccagtgacaggagtgccttctgaggcagccattgcatcttcatctgctgacactctgctaggctgacttctgtagttttcaccactgatcttcagtccacctcacagagctctataaaacgcttaaatcctctttacatcatagactttcagctacttgaagatagccatcagccgctacgtgactcttttctccaggaacgaggggtccctgagggaaaggactggggctccttcatctctatgatcctagtgcagtgtctgaaggcatcaggcccttctccttctggggctgaaccccgtctctgcctccctccaggaccagcactgcgagagcctgtccctggccagcaacatctcaggactgcagtgcaacgcatccgtggacctcattggcacctgctggccccgcagccctgcggggcagctagtggttcggccctgccctgcctttttctatggtgtccgctacaataccacaaaaaaaaagcaaggtgcactaccatgtcgcagtcatcatcaactacctgggccactgtatctccctggtggccctcctggtggcctttgtcctctttctgcggctcaggagcatccggtgcctgcgaaacatcatccactggaacctcatctccgccttcatcctgcgcaacgccacctggttcgtggtccagctaaccatgagccccgaggtccaccagagcaacgtgggctggtgcaggttggtgacagccgcctacaactacttccatgtgaccaacttcttctggatgttcggcgagggctgctacctgcacacagccatcgtgctcacctactccactgaccggctgcgcaaatggatgttcatctgcattggctggggtgtgcccttccccatcattgtggcctgggccattgggaagctgtactacgacaatgagaagtgctggtttggcaaaaggcctggggtgtacaccgactacatctaccagggccccatgatcctggtcctgctgatcaatttcatcttccttttcaacatcgtccgcatcctcatgaccaagctccgggcatccaccacgtctgagaccattcagtacagggcttctttgtgtctgtgttctactgtttcctcaatagtgaggtccgttctgccatccggaagaggtggcaccggtggcaggacaagcactcgatccgtgcccgagtggcccgtgccatgtccatccccacctccccaacccgtgtcagctttcacagcatcaagcagtccacagcagtctgagctggcaggtcatggagcagcccccaaagagctgtggctggggggatgacggccaggctccctgaccaccctgcctgtggaggtgacctgttaggtctcatgcccactcccccaggagcagctggcactgacagcct

SEQ ID NO: 145892 - protein, 447 aa, Artificial Sequence
  derived and/or modified sequence
MENKKKDKDKSDDRMARPSGRSGHNTRGTGSSSSGVLMVGPNFRVGKKIGCGNFGELRLGKNLYTNEYVAIKLEPMKSRAPQLHLEYRFYKQLGSGDGIPQVYYFGPCGKYNAMVLELLGPSLEDLFDLCDRTFSLKTVLMIAIQLISRMEYVHSKNLIYRDVKPENFLIGRPGNKTQQVIHIIDFGLAKEYIDPETKKHIPYREHKSLTGTARYMSINTHLGKEQSRRDDLEALGHMFMYFLRGSLPWQGLKADTLKERYQKIGDTKRATPIEVLCENFPEMATYLRYVRRLDFFEKPDYDYLRKLFTDLFDRKGYMFDYEYDWIGKQLPTPVGAVQQDPALSSNREAHQHRDKMQQSKNQSADHRAAWDSQQANPHHLRAHLAADRHGGSVQVVSSTNGELNTDDPTAGRSNAPITAPTEVEVMDETKCCCFFKRRKRKTIQRHK

SEQ ID NO: 145893 - DNA, 1344 bp, Artificial Sequence
  derived and/or modified sequence
atggagaataagaaaaaggataaagataaaagcgacgatcggatggctagacctagtggtcggtcgggccacaacacacgcggcaccgggtcctcatcaagcggcgtgctgatggtcggccccaactttcgagtgggaaagaagatcggctgtggcaatttcggggagctgcgattgggaaagaacctctatacaaacgagtacgtagccatcaagctggagcctatgaagagccgcgcgccacagctccatttggaataccgtttttataaacagctggggtcaggtgacggaattccgcaggtttattattttggcccatgtggtaaatacaacgctatggtattggaactcctgggcccgtccctagaggacctttttgatttgtgtgaccggaccttctcactgaagaccgtgttaatgatagctattcagttgattagcagaatggagtatgtgcattccaagaacctgatctatcgagacgtcaagcccgaaaactttctgatcggacgacccgggaacaagactcagcaggttatccacattatcgacttcggcctcgctaaggaatacatcgatcctgagactaagaagcatattccttacagggaacataagtcactgaccgggactgctcgctacatgtctatcaacacccatcttgggaaagagcaatcccgccgtgacgacctcgaagctctcggtcacatgttcatgtatttccttcgcgggtcacttccctggcaaggcttaaaagctgacaccctcaaagagcgataccagaagattggtgatacaaaacgcgcaactccaatcgaagtgctctgtgagaacttcccggaaatggctacatatttaaggtacgtgcgaagacttgacttctttgaaaagcccgattatgactatctccgaaaactgtttacagatcttttcgaccggaagggttacatgttcgactatgaatacgactggatcgggaaacagctgccaactccggtcggcgccgttcaacaggaccctgcccttagttctaaccgtgaagcgcaccagcacagggacaaaatgcaacagtccaagaatcagagcgctgatcatcgggccgcatgggactctcagcaagccaatcctcaccatttacgagcacatctagcggcggaccggcatggggggtcagtccaggttgtgagttctaccaacggagaactgaatacagatgacccaaccgccggcaggagcaatgcccccatcactgcgcctactgaggtagaggtaatggacgaaaccaagtgctgctgtttcttcaaaagaagaaaaaggaagaccattcagaggcataaatag

SEQ ID NO: 145894 - DNA, 1344 bp, Artificial Sequence
  derived and/or modified sequence
atggagaataaaaaaaaggacaaagacaagtccgatgatcgaatggcaagaccttctggccgctctggtcataatactaggggcaccgggagcagctcctctggcgttcttatggttggccccaattttagagttgggaagaagatcggctgtggtaacttcggcgagctaaggttgggaaagaacttgtacaccaacgagtacgtggctatcaagctcgagccaatgaagagccgggctccccaactgcatttagagtatcggttttacaagcagctcggctccggtgacgggattccccaggtctactattttggcccttgcggtaagtacaacgctatggtcttggagttacttggcccatctcttgaagacttgttcgatctctgcgatcgcacattttcactgaaaacagtcctgatgattgcgatccagcttattagcagaatggaatatgtgcatagtaaaaacctcatttatcgggacgtgaaacctgagaatttcctcattgggcggcccgggaacaaaacccaacaggtgattcatatcatcgactttgggctggctaaggaatatatcgacccagagaccaagaagcacataccatatcgcgaacacaaaagccttacaggcaccgcccgctatatgagtattaatacacatctgggaaaagagcagtccaggagagacgaccttgaggccttgggccatatgtttatgtattttctcagaggctctctcccgtggcaggggctcaaagcagacacactgaaggagagatatcagaagatcggagacaccaagcgcgctactcctatcgaagtgctctgtgagaattttcctgagatggccacatacctgagatatgttcgccgcctggacttttttgagaaaccggactatgactacctcaggaagctttttacagaccttttcgatcgcaaaggatacatgtttgactacgagtacgattggatcggtaagcagctgcccactccggttggggcagtacagcaggatccagcccttagtagtaatcgagaagctcatcaacaccgggataagatgcagcagagcaaaaatcaatcggccgatcacagggcagcctgggattctcaacaggccaacccacatcacctgcgggcccacctcgcagcagatcggcacggcgggagtgtgcaggtggtgagctcaacaaatggggaactcaacaccgatgacccaactgccgggcggagtaacgcccctattactgcccccaccgaggtggaggtgatggacgaaacgaaatgttgctgcttctttaagcggagaaaaaggaaaactattcagcggcataaatag

SEQ ID NO: 145895 - DNA, 1344 bp, Artificial Sequence
  derived and/or modified sequence
atggagaacaagaagaaggacaaggacaagagtgatgacaggatggcccggcccagcggccgcagcggccacaacacccggggcaccggcagcagcagcagcggcgtgctgatggtgggccccaacttccgggtgggcaagaagattggctgcggcaactttggagagctgcggctgggcaagaacctgtacaccaatgaatatgtggccatcaagctggagcccatgaagagccgggccccccagctgcacctggagtaccgcttctacaagcagctgggcagcggagatggcatcccccaggtgtactacttcggcccctgtgggaagtacaatgccatggtgctggagctgctgggccccagcctggaggacctgtttgacctgtgtgacaggaccttcagcctgaagacagtgctgatgattgccatccagctgatcagcaggatggagtatgtgcacagcaagaacctgatctacagagatgtgaagccagagaacttcctgattggccggcccggcaacaagacccagcaggtgatccacatcatcgactttggcctggccaaggagtacattgatcctgagaccaagaagcacatcccctaccgggagcacaagagcctgaccggcacagcccgctacatgagcatcaacacccacctgggcaaggagcagagcagaagagatgacctggaggccctgggccacatgttcatgtacttcctgcggggcagcctgccctggcagggcctgaaggctgacaccctgaaggagcgctaccagaagatcggggacaccaagagggccacccccatcgaggtgctgtgtgagaacttccctgagatggccacctacctgcgctacgtgcggcggctggacttctttgagaagccagactatgactacctgaggaagctgttcacagacctgtttgacaggaagggctacatgtttgattatgaatatgactggattggcaagcagctgcccacccctgtgggcgctgtgcagcaggaccctgccctgagcagcaaccgggaggcccaccagcaccgggacaagatgcagcagagcaagaaccagagcgctgaccaccgggccgcctgggacagccagcaggccaacccccaccacctgcgggcccacctggccgctgacagacatggaggctctgtgcaggtggtgagcagcaccaacggggagctgaacacagatgaccccacagctggccgcagcaatgcccccatcacagcccccacagaggtggaggtgatggatgagaccaagtgctgctgcttcttcaagaggaggaagaggaagaccatccagaggcacaagtag

SEQ ID NO: 145896 - DNA, 1344 bp, Artificial Sequence
  derived and/or modified sequence
atggagaacaagaagaaggacaaggacaagagcgacgaccggatggcccggccctcaggaagaagtgggcataatacccggggaaccggtagcagcagtagtggggtcctgatggtggggcccaactttagggtgggaaagaagataggctgcggtaattttggtgaactgagactggggaagaatttgtatacgaatgagtatgtggcaatcaaacttgaacctatgaaatcaagagcacctcagttgcacctggaatacagattctataaacagctgggatcgggcgacggaattccgcaagtgtactatttcggtccatgcggaaaatacaacgctatggttttggagttgctagggccaagtctggaggacctctttgatttgtgtgacagaactttctccctgaagactgtgcttatgatagccatacaattaatcagtcgaatggaatacgtgcactctaaaaacctgatatatcgggatgtgaaacctgaaaattttctcattggcaggcctggcaacaaaacccaacaggtcatccacataattgactttggactggcgaaagaatacatcgaccccgagaccaaaaagcacataccataccgggaacacaaaagtctcacaggtactgccagatacatgtccatcaacacacatctgggcaaggagcagtctcgccgggatgatctggaggcattaggtcacatgttcatgtatttcctgcggggatctctgccttggcaggggttaaaggctgacacactcaaggagaggtaccagaaaatcggggacactaaaagagccactccaatagaggtgctctgtgaaaactttcccgagatggctacttatctgcggtatgtgagacgcctcgatttttttgagaagccagactacgattatctacgaaagctcttcaccgacttgttcgacaggaagggctacatgtttgattatgagtatgactggatagggaagcagctccctacaccagtcggggcagtccagcaagatccagcactcagctctaatcgagaggcccatcagcaccgcgacaagatgcagcagagcaaaaatcagtctgccgaccatcgggctgcttgggatagtcagcaggccaatccacaccacttgagagctcaccttgccgccgataggcatggcgggtccgtccaagtggtgtccagtaccaatggtgaattaaatactgacgacccaactgccgggcgcagtaatgcaccgattacagcgcccacggaagtcgaggtgatggatgagacgaagtgctgctgtttttttaagcgcaggaaacgaaagaccattcaacggcataaatag

SEQ ID NO: 145897 - DNA, 1344 bp, Artificial Sequence
  derived and/or modified sequence
atggagaacaagaagaaggacaaggacaagagcgacgaccggatggcccggccgtctggcagatcaggtcacaatactcgggggacaggaagcagctcctcaggtgtactcatggtaggccctaacttccgtgtcggtaaaaagatcggatgtgggaacttcggtgaacttcgtctgggaaagaacctctacactaatgagtatgtagcgataaagttggagcctatgaagagcagagctccacagctccacctcgaataccgattctataaacaactaggttctggcgacggtattcctcaggtttattactttggcccatgcggcaagtataatgccatggtgctcgagttgcttgggcccagcctggaagaccttttcgatctttgtgaccgcactttctctcttaaaactgtcctgatgatcgctatccaactgatatctcgcatggagtatgtgcactcaaagaacctaatatatagagacgtgaagcccgaaaactttcttatcggccgccccgggaataaaacccagcaagtgatccacattatagactttggccttgctaaggagtatatcgaccctgagacaaaaaaacacatcccgtatagggagcacaagtcactcacaggcactgctaggtacatgtccataaacacgcacctggggaaggagcagagcagacgagacgacctggaggcacttggacacatgtttatgtatttcctgcggggtagtctgccatggcaaggccttaaggccgataccttgaaagagcgatatcagaagatcggggacactaaaagagccacgccaattgaggttctgtgtgaaaattttcccgagatggctacatacctacgatatgtgagacgactggattttttcgagaagcccgattatgactatctgcgcaagttattcaccgatttgttcgaccgcaaaggctatatgttcgattacgagtacgactggatcggaaaacaactcccaacgcctgtaggagcggtacagcaagacccagctctgtcttcaaatcgggaggctcatcagcatcgtgataagatgcagcagagcaaaaatcaatcagccgaccatagggctgcctgggatagtcaacaagcaaatccccaccacctgcgggcccaccttgccgcagacaggcacggtggctcggtccaggtagtgagttccacaaacggcgaattaaacaccgacgatccaacggcgggtcggtccaatgcacccatcacggctccaactgaggtggaagtgatggacgagacaaaatgttgttgcttctttaagcggcgcaagcggaagactattcagcgacataaatag

SEQ ID NO: 145898 - DNA, 1344 bp, Artificial Sequence
  derived and/or modified sequence
atggagaacaaaaaaaaagacaaagacaagtccgacgatcgtatggccagaccgtctgggcgatcaggccataacacccgcggaacaggtagttcctcttctggcgttcttatggtgggtcctaactttcgtgtagggaaaaagatcgggtgtgggaattttggagagctgagattagggaagaacctatataccaatgagtatgtagctattaaattagagcccatgaaaagccgcgcaccccaacttcatctggaatacaggttttacaagcaactaggcagtggcgatggaattccacaggtgtactacttcggcccatgtgggaagtacaacgccatggtgcttgaactgctggggccaagcttagaggacctgtttgacctatgcgacaggacttttagcctgaagaccgtgctgatgatcgcaattcaacttatctcacggatggagtacgtgcacagcaaaaacttaatctacagggatgtcaaaccagagaactttcttataggacgtccgggaaataagacacagcaggttattcatattattgacttcgggctggctaaagaatacattgatccagaaaccaagaaacatattccctatcgggagcataagtccctgaccggcacagccagatacatgtcaattaacacacacttgggcaaagagcaatcacggagagacgatctggaggctttagggcatatgttcatgtattttctgaggggatctctgccgtggcagggccttaaagccgacaccctgaaggagcggtatcagaaaatcggggacacaaaacgggcaaccccaattgaggtgctgtgcgagaacttcccagagatggcaacatacctcagatatgtaagacggctggattttttcgaaaagccagattatgattacctcagaaaactgttcacggatttattcgatcggaaggggtacatgttcgactacgaatatgattggattggtaagcagctgcctactccagtgggagcagtgcagcaggaccccgcactgtcctctaatcgagaagctcaccagcatcgggacaagatgcaacaaagcaaaaatcaatccgcagaccaccgcgcagcatgggattcccagcaagccaatccacaccatcttagggcccacctcgcagcagatcgacatgggggtagcgttcaggttgtgtctagtacgaatggcgagttaaataccgatgatccaaccgctggtaggtcgaatgctccgatcacagccccaaccgaagtggaagtgatggacgagacaaagtgctgttgctttttcaagcgtaggaagagaaaaactatccagaggcacaaatag

SEQ ID NO: 145899 - DNA, 1344 bp, Artificial Sequence
  derived and/or modified sequence
atggaaaataaaaaaaaggacaaggataaatctgacgacagaatggccaggccctcaggaaggagtggacataatactcgtggcacaggctcgagctcctcaggcgtattgatggtgggccctaacttccgagtgggaaagaaaatcggatgtggtaacttcggggagctacgtctcggaaagaacctgtataccaatgagtacgtcgcgatcaagctcgagcctatgaagagccgggctcctcagttgcatctggaatatcgcttctataagcagctcggtagcggagacggcataccgcaggtgtattacttcggaccttgcggaaaatacaatgctatggtgttggaattactgggtccctcactcgaggacctgttcgatctgtgcgataggacattctcccttaaaactgtgcttatgatcgccattcagctcataagcaggatggaatatgtgcacagcaaaaatctaatctatagggatgtcaagcctgaaaattttctgatcggcaggccaggtaacaagactcaacaggttatccacattattgactttggtctggctaaggagtacatcgaccccgagaccaagaagcacattccgtatagggagcataaatccctaacaggcactgctagatacatgtctattaacactcacttaggaaaggagcaaagtcggagagacgacctggaggctctgggacacatgtttatgtactttttgcgtgggtccctgccttggcagggattaaaggcagacacactaaaagagagatatcagaagatcggggacacaaagcgagcaacaccaattgaggtactgtgcgagaactttccagagatggccacctatctacggtacgtgagacggctggatttttttgaaaagcccgattacgactacctgagaaagctgtttactgatctcttcgatagaaaagggtacatgttcgactatgagtatgattggatagggaaacagctgccaaccccagttggggcagtgcagcaagatcctgcactgagctctaatcgtgaggcgcaccagcacagagataagatgcaacagtccaagaatcaaagcgccgaccatagggcggcttgggactctcagcaagcaaatcctcatcatttacgcgctcatctagccgcagacaggcacggcggtagcgtgcaggtggtgagcagcacaaacggcgagttaaacaccgacgacccaactgctgggaggagcaatgcccctatcaccgcgccaacagaagtggaggttatggatgaaaccaaatgctgctgcttctttaagcggagaaaacgcaaaaccattcaacgacataaatag

SEQ ID NO: 145900 - DNA, 2424 bp, Artificial Sequence
  derived and/or modified sequence
gaattcaaagtggagtaccgcaaacttgatatggaaaataaaaagaaagacaaggacaaatcagatgatagaatggcacgacctagtggtcgatcgggacacaacactcgaggaactgggtcttcatcgtctggagttttaatggttggacctaactttagagttggaaaaaaaattggatgtggcaattttggagaattacgattagggaaaaatttatacacaaatgaatatgtggcaattaagttggagcccatgaaatcaagagcaccacagctacatttggaatacagattctataagcagttaggatctggagatggtatacctcaagtttactatttcggcccttgtggtaaatacaatgctatggtgctggaactgctgggacctagtttggaagacttgtttgacttgtgtgacagaacattttctcttaaaacagttctcatgatagctatacaactgatttctcgcatggaatatgtccattcaaagaacttgatatacagagatgtaaaacctgagaacttcttaataggacgaccaggaaacaaaacccagcaagttattcacattatagattttggtttggcaaaggaatatattgatccggagacaaagaaacacataccatacagagaacacaagagccttacaggaacagctagatatatgagcataaacacacatttaggaaaagaacaaagtagaagagacgatttagaagctttaggtcatatgttcatgtattttctgagaggcagtcttccttggcaaggcttaaaggctgacacattaaaggagaggtatcagaaaattggagatacaaaacgggctacaccaatagaagtgttatgtgaaaattttccagaaatggcaacatatcttcgttatgtaagaaggctagatttttttgaaaaaccagactatgactacttaagaaagctttttactgacttgtttgatcgaaaaggatatatgtttgattatgaatatgactggattggtaaacagttgcctactccagtgggtgcagttcagcaagatcctgctctgtcatcaaacagagaagcacatcaacacagagataagatgcaacaatccaaaaaccagtcggcagaccacagggcagcttgggactcccagcaggcaaatccccaccatttgagagctcaccttgcagcagacagacatggtggctcggtacaggttgtaagttctacaaatggagagttaaacacagatgaccccaccgcaggacgttcaaatgcacccatcacagcccctactgaagtagaagtgatggatgaaaccaagtgctgctgttttttcaaacgaaggaaaaggaaaaccatacagcgccacaaatgactctggacacagacagatcctggggagttacttacatgttcatctgctgtcttgtgattaaaatcatctctgtagtgaccacgtatattttcaaggactcactcttagaaacaaaaatgtcatactttcatacttcattttgtggttgtcttacattctttttctttttttttttttctctaatttaacctttatggaagctttaaagttttgtcaaaacatgagtgctttgcccatcagtgaatggaatggaccaatgaggtggtatcaatgaatatagttccatagaacattttccagaagttcttctgttgtagaaagcagtacagtatcttaagtgtcaaccagttatatacctaatctggttttttataacttctgtaagagcataatcaaacaggaattttcttttctcagtggataatacaacagagaaaacagagttgcccaaatatttaaaagaagttattccttgagaagttcatattttgtgacatctgcattgatttcagtattactgatggtactgttattcataagtcatattaacattctctccgtgaaatcatggtacagtcactgcccagaggtactgaggaaaaagcaatatgggttcggcagatggtggtggtaaaatgaatcttaaggagtgtggtaaatatgtgctccgcttttgttgcatcactatgtgaagtactgtgttgcagaagtggcaaaagcgcttatttttaaaaatgcaaaatatttgtacaatgtaactttatgcttccaaataataatgtatgttagacagcaagaaatgaatactttaaaaagtgatgtatgttggagttataaagaaatacactaaggagaggtagtaaatgtgaaccttgttgcagtgtataaggtggaagcctaaagaaatctcaccgaaacttactgctgaatgattacattctcccttaagcagaaaactttggatgtgccatgcaatggtgtctgtgtaattattttgctctttgattaaaaaaaagacccccagcaataaaaagtgggtcactctatgcc

SEQ ID NO: 145901 - DNA, 4438 bp, Artificial Sequence
  derived and/or modified sequence
actcggctgttttcgctgatgcgggcagcttgggggccgccgccgctaaacagacgctttcctttttaattttttttccatgtgttcacttccgggtccggcgtcgatccggatgcccgaggcagaaggatgtttgacctccggataagcgaggcgctgctgtgcattcattccgggctgcatcggtggcgacagcagaggctcgggcggcgactctccggccagcggcggcggtaggaggcaccagcggcagtgcagggaccgaatccgagcagcgctgcgttacctctctctctcgctccttcccccctacctcgctcgctcgctcgctcgctccctgcgtggctcgctttcctcctccggccgccggcgggtgtgatgtgccgccgccgctgcccccgccggcgctgacggactgggggcgccgcccgcgcccgggaccgacccctctgctcgcggccgcgcctttgagctctctatcaatatcagctcacatcattgaaaagataattttgaagacatgttttgctgaaaagacactaagaaaaattttacgaatgggatgaacatgctccagttaattgactacctactgcaatttgaatgttaacattacccatctggtacagttacctagtgatgtacctattttcacaataccctgtttcagtgtgcttgtcttgattaaagaattcaaagtggagtaccgcaaacttgatatggaaaataaaaagaaagacaaggacaaatcagatgatagaatggcacgacctagtggtcgatcgggacacaacactcgaggaactgggtcttcatcgtctggagttttaatggttggacctaactttagagttggaaaaaaaattggatgtggcaattttggagaattacgattagggaaaaatttatacacaaatgaatatgtggcaattaagttggagcccatgaaatcaagagcaccacagctacatttggaatacagattctataagcagttaggatctggagatggtatacctcaagtttactatttcggcccttgtggtaaatacaatgctatggtgctggaactgctgggacctagtttggaagacttgtttgacttgtgtgacagaacattttctcttaaaacagttctcatgatagctatacaactgatttctcgcatggaatatgtccattcaaagaacttgatatacagagatgtaaaacctgagaacttcttaataggacgaccaggaaacaaaacccagcaagttattcacattatagattttggtttggcaaaggaatatattgatccggagacaaagaaacacataccatacagagaacacaagagccttacaggaacagctagatatatgagcataaacacacatttaggaaaagaacaaagtagaagagacgatttagaagctttaggtcatatgttcatgtattttctgagaggcagtcttccttggcaaggcttaaaggctgacacattaaaggagaggtatcagaaaattggagatacaaaacgggctacaccaatagaagtgttatgtgaaaattttccagaaatggcaacatatcttcgttatgtaagaaggctagatttttttgaaaaaccagactatgactacttaagaaagctttttactgacttgtttgatcgaaaaggatatatgtttgattatgaatatgactggattggtaaacagttgcctactccagtgggtgcagttcagcaagatcctgctctgtcatcaaacagagaagcacatcaacacagagataagatgcaacaatccaaaaaccagtcggcagaccacagggcagcttgggactcccagcaggcaaatccccaccatttgagagctcaccttgcagcagacagacatggtggctcggtacaggttgtaagttctacaaatggagagttaaacacagatgaccccaccgcaggacgttcaaatgcacccatcacagcccctactgaagtagaagtgatggatgaaaccaagtgctgctgttttttcaaacgaaggaaaaggaaaaccatacagcgccacaaatgactctggacacagacagatcctggggagttacttacatgttcatctgctgtcttgtgattaaaatcatctctgtagtgaccacgtatattttcaaggactcactcttagaaacaaaaatgtcatactttcatacttcattttgtggttgtcttacattctttttctttttttttttttctctaatttaacctttatggaagctttaaagttttgtcaaaacatgagtgctttgcccatcagtgaatggaatggaccaatgaggtggtatcaatgaatatagttccatagaacattttccagaagttcttctgttgtagaaagcagtacagtatcttaagtgtcaaccagttatatacctaatctggttttttataacttctgtaagagcataatcaaacaggaattttcttttctcagtggataatacaacagagaaaacagagttgcccaaatatttaaaagaagttattccttgagaagttcatattttgtgacatctgcattgatttcagtattactgatggtactgttattcataagtcatattaacattctctccgtgaaatcatggtacagtcactgcccagaggtactgaggaaaaagcaatatgggttcggcagatggtggtggtaaaatgaatcttaaggagtgtggtaaatatgtgctccgcttttgttgcatcactatgtgaagtactgtgttgcagaagtggcaaaagcgcttatttttaaaaatgcaaaatatttgtacaatgtaactttatgcttccaaataataatgtatgttagacagcaagaaatgaatactttaaaaagtgatgtatgttggagttataaagaaatacactaaggagaggtagtaaatgtgaaccttgttgcagtgtataaggtggaagcctaaagaaatctcaccgaaacttactgctgaatgattacattctcccttaagcagaaaactttggatgtgccatgcaatggtgtctgtgtaattattttgctctttgattaaaaaaaagacccccagcaataaaaagtgggtcactctatgccctctgtgcacattagtctcttgtattcaactttgctgattctctggaattttcctactctttagcataattttgatgattgaaaaatattttggaaaggatgggtcaggtgctttgcctccatagtcttttgaagtgcctgcatatgaacaacaacaacaacaacaaaaaattctgtaaaaaaggaagcccattccacttttcaagtatgctttgttttaagccataaagacacacatgtagttttgtcacattctactagccaaaattttcaagaagggttaaaacaaagactggctagaaagataattattttgaataaatctcatattcatctttcatttatataattgttacttattcctcccatgcagtctcttcgttgtctttaagtgtgtgcctccaggcatgcttatttatttttattgtctcaaggtaacatttaagatgtatattaaagtaaagctacatttttttacttcattattgcatttacagggatttaattgtactttgtaatttatttttcttattagccaaaagtttaatgcatttttttttgatgaattaggcacccacatgaacaccacaaatcaggacattgtttatcattgttgctatgaatcctatgaatgatcttttttttattttaaagacctacacttaacctacaaaacatttgctgtataatttggtcaacagtttctatctatctgtatactgtcatgatgtcttaaactgcaggagttacatactgagtttatatttttatttgctttgagcaaggtagataaacattttggccattataatgtgaaaccacttcttctttctttacagtatttgaccaaacttgtgtgtctatgatatttgtaaatacatgcgaatatctgtatttcttatcataagcctatttagttttattctcagtagggttttttggattgtacagtgtttatatgatctgaactccttatacataagaaggtgtgtatattaatccaattatggacttaaaatattttaaaagtataaatacccttatttgctgcaaagaccagtgtgtaggcatttgctttttagcaatatttttaagtgctccattttaatgccgaggaataagtcttttggcaacacaaactggtcaataataggtaatgcaggtatgttcaggttaagccaacaatgttttgcatttttatgcttattttctgtcaacactaatgaagtcaacattgcctgaatgtctgaataatgaaacacatccctgtttaaaagtatgtaactgaaaaagaaataaaaaaaaataaaagtagtttttttaaa

SEQ ID NO: 145902 - DNA, 1344 bp, Artificial Sequence
  derived and/or modified sequence
atggagaacaagaagaaggacaaggacaagagcgacgacagaatggccagacccagcggcagaagcggccacaacaccagaggcaccggcagcagcagcagcggcgtgctgatggtgggccccaacttcagagtgggcaagaagatcggctgcggcaacttcggcgagctgagactgggcaagaacctgtacaccaacgagtacgtggccatcaagctggagcccatgaagagcagagccccccagctgcacctggagtacagattctacaagcagctgggcagcggcgacggcatcccccaggtgtactacttcggcccctgcggcaagtacaacgccatggtgctggagctgctgggccccagcctggaggacctgttcgacctgtgcgacagaaccttcagcctgaagaccgtgctgatgatcgccatccagctgatcagcagaatggagtacgtgcacagcaagaacctgatctacagagacgtgaagcccgagaacttcctgatcggcagacccggcaacaagacccagcaggtgatccacatcatcgacttcggcctggccaaggagtacatcgaccccgagaccaagaagcacatcccctacagagagcacaagagcctgaccggcaccgccagatacatgagcatcaacacccacctgggcaaggagcagagcagaagagacgacctggaggccctgggccacatgttcatgtacttcctgagaggcagcctgccctggcagggcctgaaggccgacaccctgaaggagagataccagaagatcggcgacaccaagagagccacccccatcgaggtgctgtgcgagaacttccccgagatggccacctacctgagatacgtgagaagactggacttcttcgagaagcccgactacgactacctgagaaagctgttcaccgacctgttcgacagaaagggctacatgttcgactacgagtacgactggatcggcaagcagctgcccacccccgtgggcgccgtgcagcaggaccccgccctgagcagcaacagagaggcccaccagcacagagacaagatgcagcagagcaagaaccagagcgccgaccacagagccgcctgggacagccagcaggccaacccccaccacctgagagcccacctggccgccgacagacacggcggcagcgtgcaggtggtgagcagcaccaacggcgagctgaacaccgacgaccccaccgccggcagaagcaacgcccccatcaccgcccccaccgaggtggaggtgatggacgagaccaagtgctgctgcttcttcaagagaagaaagagaaagaccatccagagacacaagtag

SEQ ID NO: 145903 - protein, 3396 aa, Artificial Sequence
  derived and/or modified sequence
MFINIKSILWMCSTLIVTHALHKVKVGKSPPVRGSLSGKVSLPCHFSTMPTLPPSYNTSEFLRIKWSKIEVDKNGKDLKETTVLVAQNGNIKIGQDYKGRVSVPTHPEAVGDASLTVVKLLASDAGLYRCDVMYGIEDTQDTVSLTVDGVVFHYRAATSRYTLNFEAAQKACLDVGAVIATPEQLFAAYEDGFEQCDAGWLADQTVRYPIRAPRVGCYGDKMGKAGVRTYGFRSPQETYDVYCYVDHLDGDVFHLTVPSKFTFEEAAKECENQDARLATVGELQAAWRNGFDQCDYGWLSDASVRHPVTVARAQCGGGLLGVRTLYRFENQTGFPPPDSRFDAYCFKPKEATTIDLSILAETASPSLSKEPQMVSDRTTPIIPLVDELPVIPTEFPPVGNIVSFEQKATVQPQAITDSLATKLPTPTGSTKKPWDMDDYSPSASGPLGKLDISEIKEEVLQSTTGVSHYATDSWDGVVEDKQTQESVTQIEQIEVGPLVTSMEILKHIPSKEFPVTETPLVTARMILESKTEKKMVSTVSELVTTGHYGFTLGEEDDEDRTLTVGSDESTLIFDQIPEVITVSKTSEDTIHTHLEDLESVSASTTVSPLIMPDNNGSSMDDWEERQTSGRITEEFLGKYLSTTPFPSQHRTEIELFPYSGDKILVEGISTVIYPSLQTEMTHRRERTETLIPEMRTDTYTDEIQEEITKSPFMGKTEEEVFSGMKLSTSLSEPIHVTESSVEMTKSFDFPTLITKLSAEPTEVRDMEEDFTATPGTTKYDENITTVLLAHGTLSVEAATVSKWSWDEDNTTSKPLESTEPSASSKLPPALLTTVGMNGKDKDIPSFTEDGADEFTLIPDSTQKQLEEVTDEDIAAHGKFTIRFQPTTSTGIAEKSTLRDSTTEEKVPPITSTEGQVYATMEGSALGEVEDVDLSKPVSTVPQFAHTSEVEGLAFVSYSSTQEPTTYVDSSHTIPLSVIPKTDWGVLVPSVPSEDEVLGEPSQDILVIDQTRLEATISPETMRTTKITEGTTQEEFPWKEQTAEKPVPALSSTAWTPKEAVTPLDEQEGDGSAYTVSEDELLTGSERVPVLETTPVGKIDHSVSYPPGAVTEHKVKTDEVVTLTPRIGPKVSLSPGPEQKYETEGSSTTGFTSSLSPFSTHITQLMEETTTEKTSLEDIDLGSGLFEKPKATELIEFSTIKVTVPSDITTAFSSVDRLHTTSAFKPSSAITKKPPLIDREPGEETTSDMVIIGESTSHVPPTTLEDIVAKETETDIDREYFTTSSPPATQPTRPPTVEDKEAFGPQALSTPQPPASTKFHPDINVYIIEVRENKTGRMSDLSVIGHPIDSESKEDEPCSEETDPVHDLMAEILPEFPDIIEIDLYHSEENEEEEEECANATDVTTTPSVQYINGKHLVTTVPKDPEAAEARRGQFESVAPSQNFSDSSESDTHPFVIAKTELSTAVQPNESTETTESLEVTWKPETYPETSEHFSGGEPDVFPTVPFHEEFESGTAKKGAESVTERDTEVGHQAHEHTEPVSLFPEESSGEIAIDQESQKIAFARATEVTFGEEVEKSTSVTYTPTIVPSSASAYVSEEEAVTLIGNPWPDDLLSTKESWVEATPRQVVELSGSSSIPITEGSGEAEEDEDTMFTMVTDLSQRNTTDTLITLDTSRIITESFFEVPATTIYPVSEQPSAKVVPTKFVSETDTSEWISSTTVEEKKRKEEEGTTGTASTFEVYSSTQRSDQLILPFELESPNVATSSDSGTRKSFMSLTTPTQSEREMTDSTPVFTETNTLENLGAQTTEHSSIHQPGVQEGLTTLPRSPASVFMEQGSGEAAADPETTTVSSFSLNVEYAIQAEKEVAGTLSPHVETTFSTEPTGLVLSTVMDRVVAENITQTSREIVISERLGEPNYGAEIRGFSTGFPLEEDFSGDFREYSTVSHPIAKEETVMMEGSGDAAFRDTQTSPSTVPTSVHISHISDSEGPSSTMVSTSAFPWEEFTSSAEGSGEQLVTVSSSVVPVLPSAVQKFSGTASSIIDEGLGEVGTVNEIDRRSTILPTAEVEGTKAPVEKEEVKVSGTVSTNFPQTIEPAKLWSRQEVNPVRQEIESETTSEEQIQEEKSFESPQNSPATEQTIFDSQTFTETELKTTDYSVLTTKKTYSDDKEMKEEDTSLVNMSTPDPDANGLESYTTLPEATEKSHFFLATALVTESIPAEHVVTDSPIKKEESTKHFPKGMRPTIQESDTELLFSGLGSGEEVLPTLPTESVNFTEVEQINNTLYPHTSQVESTSSDKIEDFNRMENVAKEVGPLVSQTDIFEGSGSVTSTTLIEILSDTGAEGPTVAPLPFSTDIGHPQNQTVRWAEEIQTSRPQTITEQDSNKNSSTAEINETTTSSTDFLARAYGFEMAKEFVTSAPKPSDLYYEPSGEGSGEVDIVDSFHTSATTQATRQESSTTFVSDGSLEKHPEVPSAKAVTADGFPTVSVMLPLHSEQNKSSPDPTSTLSNTVSYERSTDGSFQDRFREFEDSTLKPNRKKPTENIIIDLDKEDKDLILTITESTILEILPELTSDKNTIIDIDHTKPVYEDILGMQTDIDTEVPSEPHDSNDESNDDSTQVQEIYEAAVNLSLTEETFEGSADVLASYTQATHDESMTYEDRSQLDHMGFHFTTGIPAPSTETELDVLLPTATSLPIPRKSATVIPEIEGIKAEAKALDDMFESSTLSDGQAIADQSEIIPTLGQFERTQEEYEDKKHAGPSFQPEFSSGAEEALVDHTPYLSIATTHLMDQSVTEVPDVMEGSNPPYYTDTTLAVSTFAKLSSQTPSSPLTIYSGSEASGHTEIPQPSALPGIDVGSSVMSPQDSFKEIHVNIEATFKPSSEEYLHITEPPSLSPDTKLEPSEDDGKPELLEEMEASPTELIAVEGTEILQDFQNKTDGQVSGEAIKMFPTIKTPEAGTVITTADEIELEGATQWPHSTSASATYGVEAGVVPWLSPQTSERPTLSSSPEINPETQAALIRGQDSTIAASEQQVAARILDSNDQATVNPVEFNTEVATPPFSLLETSNETDFLIGINEESVEGTAIYLPGPDRCKMNPCLNGGTCYPTETSYVCTCVPGYSGDQCELDFDECHSNPCRNGATCVDGFNTFRCLCLPSYVGALCEQDTETCDYGWHKFQGQCYKYFAHRRTWDAAERECRLQGAHLTSILSHEEQMFVNRVGHDYQWIGLNDKMFEHDFRWTDGSTLQYENWRPNQPDSFFSAGEDCVVIIWHENGQWNDVPCNYHLTYTCKKGTVACGQPPVVENAKTFGKMKPRYEINSLIRYHCKDGFIQRHLPTIRCLGNGRWAIPKITCMNPSAYQRTYSMKYFKNSSSAKDNSINTSKHDHRWSRRWQESRR

SEQ ID NO: 145904 - DNA, 10191 bp, Artificial Sequence
  derived and/or modified sequence
atgttcatcaacatcaagagcatcctgtggatgtgcagcaccctgatcgtgacccacgccctgcacaaggtgaaggtgggcaagagcccccccgtgagaggcagcctgagcggcaaggtgagcctgccctgccacttcagcaccatgcccaccctgccccccagctacaacaccagcgagttcctgagaatcaagtggagcaagatcgaggtggacaagaacggcaaggacctgaaggagaccaccgtgctggtggcccagaacggcaacatcaagatcggccaggactacaagggcagagtgagcgtgcccacccaccccgaggccgtgggcgacgccagcctgaccgtggtgaagctgctggccagcgacgccggcctgtacagatgcgacgtgatgtacggcatcgaggacacccaggacaccgtgagcctgaccgtggacggcgtggtgttccactacagagccgccaccagcagatacaccctgaacttcgaggccgcccagaaggcctgcctggacgtgggcgccgtgatcgccacccccgagcagctgttcgccgcctacgaggacggcttcgagcagtgcgacgccggctggctggccgaccagaccgtgagataccccatcagagcccccagagtgggctgctacggcgacaagatgggcaaggccggcgtgagaacctacggcttcagaagcccccaggagacctacgacgtgtactgctacgtggaccacctggacggcgacgtgttccacctgaccgtgcccagcaagttcaccttcgaggaggccgccaaggagtgcgagaaccaggacgccagactggccaccgtgggcgagctgcaggccgcctggagaaacggcttcgaccagtgcgactacggctggctgagcgacgccagcgtgagacaccccgtgaccgtggccagagcccagtgcggcggcggcctgctgggcgtgagaaccctgtacagattcgagaaccagaccggcttccccccccccgacagcagattcgacgcctactgcttcaagcccaaggaggccaccaccatcgacctgagcatcctggccgagaccgccagccccagcctgagcaaggagccccagatggtgagcgacagaaccacccccatcatccccctggtggacgagctgcccgtgatccccaccgagttcccccccgtgggcaacatcgtgagcttcgagcagaaggccaccgtgcagccccaggccatcaccgacagcctggccaccaagctgcccacccccaccggcagcaccaagaagccctgggacatggacgactacagccccagcgccagcggccccctgggcaagctggacatcagcgagatcaaggaggaggtgctgcagagcaccaccggcgtgagccactacgccaccgacagctgggacggcgtggtggaggacaagcagacccaggagagcgtgacccagatcgagcagatcgaggtgggccccctggtgaccagcatggagatcctgaagcacatccccagcaaggagttccccgtgaccgagacccccctggtgaccgccagaatgatcctggagagcaagaccgagaagaagatggtgagcaccgtgagcgagctggtgaccaccggccactacggcttcaccctgggcgaggaggacgacgaggacagaaccctgaccgtgggcagcgacgagagcaccctgatcttcgaccagatccccgaggtgatcaccgtgagcaagaccagcgaggacaccatccacacccacctggaggacctggagagcgtgagcgccagcaccaccgtgagccccctgatcatgcccgacaacaacggcagcagcatggacgactgggaggagagacagaccagcggcagaatcaccgaggagttcctgggcaagtacctgagcaccacccccttccccagccagcacagaaccgagatcgagctgttcccctacagcggcgacaagatcctggtggagggcatcagcaccgtgatctaccccagcctgcagaccgagatgacccacagaagagagagaaccgagaccctgatccccgagatgagaaccgacacctacaccgacgagatccaggaggagatcaccaagagccccttcatgggcaagaccgaggaggaggtgttcagcggcatgaagctgagcaccagcctgagcgagcccatccacgtgaccgagagcagcgtggagatgaccaagagcttcgacttccccaccctgatcaccaagctgagcgccgagcccaccgaggtgagagacatggaggaggacttcaccgccacccccggcaccaccaagtacgacgagaacatcaccaccgtgctgctggcccacggcaccctgagcgtggaggccgccaccgtgagcaagtggagctgggacgaggacaacaccaccagcaagcccctggagagcaccgagcccagcgccagcagcaagctgccccccgccctgctgaccaccgtgggcatgaacggcaaggacaaggacatccccagcttcaccgaggacggcgccgacgagttcaccctgatccccgacagcacccagaagcagctggaggaggtgaccgacgaggacatcgccgcccacggcaagttcaccatcagattccagcccaccaccagcaccggcatcgccgagaagagcaccctgagagacagcaccaccgaggagaaggtgccccccatcaccagcaccgagggccaggtgtacgccaccatggagggcagcgccctgggcgaggtggaggacgtggacctgagcaagcccgtgagcaccgtgccccagttcgcccacaccagcgaggtggagggcctggccttcgtgagctacagcagcacccaggagcccaccacctacgtggacagcagccacaccatccccctgagcgtgatccccaagaccgactggggcgtgctggtgcccagcgtgcccagcgaggacgaggtgctgggcgagcccagccaggacatcctggtgatcgaccagaccagactggaggccaccatcagccccgagaccatgagaaccaccaagatcaccgagggcaccacccaggaggagttcccctggaaggagcagaccgccgagaagcccgtgcccgccctgagcagcaccgcctggacccccaaggaggccgtgacccccctggacgagcaggagggcgacggcagcgcctacaccgtgagcgaggacgagctgctgaccggcagcgagagagtgcccgtgctggagaccacccccgtgggcaagatcgaccacagcgtgagctacccccccggcgccgtgaccgagcacaaggtgaagaccgacgaggtggtgaccctgacccccagaatcggccccaaggtgagcctgagccccggccccgagcagaagtacgagaccgagggcagcagcaccaccggcttcaccagcagcctgagccccttcagcacccacatcacccagctgatggaggagaccaccaccgagaagaccagcctggaggacatcgacctgggcagcggcctgttcgagaagcccaaggccaccgagctgatcgagttcagcaccatcaaggtgaccgtgcccagcgacatcaccaccgccttcagcagcgtggacagactgcacaccaccagcgccttcaagcccagcagcgccatcaccaagaagccccccctgatcgacagagagcccggcgaggagaccaccagcgacatggtgatcatcggcgagagcaccagccacgtgccccccaccaccctggaggacatcgtggccaaggagaccgagaccgacatcgacagagagtacttcaccaccagcagcccccccgccacccagcccaccagaccccccaccgtggaggacaaggaggccttcggcccccaggccctgagcaccccccagccccccgccagcaccaagttccaccccgacatcaacgtgtacatcatcgaggtgagagagaacaagaccggcagaatgagcgacctgagcgtgatcggccaccccatcgacagcgagagcaaggaggacgagccctgcagcgaggagaccgaccccgtgcacgacctgatggccgagatcctgcccgagttccccgacatcatcgagatcgacctgtaccacagcgaggagaacgaggaggaggaggaggagtgcgccaacgccaccgacgtgaccaccacccccagcgtgcagtacatcaacggcaagcacctggtgaccaccgtgcccaaggaccccgaggccgccgaggccagaagaggccagttcgagagcgtggcccccagccagaacttcagcgacagcagcgagagcgacacccaccccttcgtgatcgccaagaccgagctgagcaccgccgtgcagcccaacgagagcaccgagaccaccgagagcctggaggtgacctggaagcccgagacctaccccgagaccagcgagcacttcagcggcggcgagcccgacgtgttccccaccgtgcccttccacgaggagttcgagagcggcaccgccaagaagggcgccgagagcgtgaccgagagagacaccgaggtgggccaccaggcccacgagcacaccgagcccgtgagcctgttccccgaggagagcagcggcgagatcgccatcgaccaggagagccagaagatcgccttcgccagagccaccgaggtgaccttcggcgaggaggtggagaagagcaccagcgtgacctacacccccaccatcgtgcccagcagcgccagcgcctacgtgagcgaggaggaggccgtgaccctgatcggcaacccctggcccgacgacctgctgagcaccaaggagagctgggtggaggccacccccagacaggtggtggagctgagcggcagcagcagcatccccatcaccgagggcagcggcgaggccgaggaggacgaggacaccatgttcaccatggtgaccgacctgagccagagaaacaccaccgacaccctgatcaccctggacaccagcagaatcatcaccgagagcttcttcgaggtgcccgccaccaccatctaccccgtgagcgagcagcccagcgccaaggtggtgcccaccaagttcgtgagcgagaccgacaccagcgagtggatcagcagcaccaccgtggaggagaagaagagaaaggaggaggagggcaccaccggcaccgccagcaccttcgaggtgtacagcagcacccagagaagcgaccagctgatcctgcccttcgagctggagagccccaacgtggccaccagcagcgacagcggcaccagaaagagcttcatgagcctgaccacccccacccagagcgagagagagatgaccgacagcacccccgtgttcaccgagaccaacaccctggagaacctgggcgcccagaccaccgagcacagcagcatccaccagcccggcgtgcaggagggcctgaccaccctgcccagaagccccgccagcgtgttcatggagcagggcagcggcgaggccgccgccgaccccgagaccaccaccgtgagcagcttcagcctgaacgtggagtacgccatccaggccgagaaggaggtggccggcaccctgagcccccacgtggagaccaccttcagcaccgagcccaccggcctggtgctgagcaccgtgatggacagagtggtggccgagaacatcacccagaccagcagagagatcgtgatcagcgagagactgggcgagcccaactacggcgccgagatcagaggcttcagcaccggcttccccctggaggaggacttcagcggcgacttcagagagtacagcaccgtgagccaccccatcgccaaggaggagaccgtgatgatggagggcagcggcgacgccgccttcagagacacccagaccagccccagcaccgtgcccaccagcgtgcacatcagccacatcagcgacagcgagggccccagcagcaccatggtgagcaccagcgccttcccctgggaggagttcaccagcagcgccgagggcagcggcgagcagctggtgaccgtgagcagcagcgtggtgcccgtgctgcccagcgccgtgcagaagttcagcggcaccgccagcagcatcatcgacgagggcctgggcgaggtgggcaccgtgaacgagatcgacagaagaagcaccatcctgcccaccgccgaggtggagggcaccaaggcccccgtggagaaggaggaggtgaaggtgagcggcaccgtgagcaccaacttcccccagaccatcgagcccgccaagctgtggagcagacaggaggtgaaccccgtgagacaggagatcgagagcgagaccaccagcgaggagcagatccaggaggagaagagcttcgagagcccccagaacagccccgccaccgagcagaccatcttcgacagccagaccttcaccgagaccgagctgaagaccaccgactacagcgtgctgaccaccaagaagacctacagcgacgacaaggagatgaaggaggaggacaccagcctggtgaacatgagcacccccgaccccgacgccaacggcctggagagctacaccaccctgcccgaggccaccgagaagagccacttcttcctggccaccgccctggtgaccgagagcatccccgccgagcacgtggtgaccgacagccccatcaagaaggaggagagcaccaagcacttccccaagggcatgagacccaccatccaggagagcgacaccgagctgctgttcagcggcctgggcagcggcgaggaggtgctgcccaccctgcccaccgagagcgtgaacttcaccgaggtggagcagatcaacaacaccctgtacccccacaccagccaggtggagagcaccagcagcgacaagatcgaggacttcaacagaatggagaacgtggccaaggaggtgggccccctggtgagccagaccgacatcttcgagggcagcggcagcgtgaccagcaccaccctgatcgagatcctgagcgacaccggcgccgagggccccaccgtggcccccctgcccttcagcaccgacatcggccacccccagaaccagaccgtgagatgggccgaggagatccagaccagcagaccccagaccatcaccgagcaggacagcaacaagaacagcagcaccgccgagatcaacgagaccaccaccagcagcaccgacttcctggccagagcctacggcttcgagatggccaaggagttcgtgaccagcgcccccaagcccagcgacctgtactacgagcccagcggcgagggcagcggcgaggtggacatcgtggacagcttccacaccagcgccaccacccaggccaccagacaggagagcagcaccaccttcgtgagcgacggcagcctggagaagcaccccgaggtgcccagcgccaaggccgtgaccgccgacggcttccccaccgtgagcgtgatgctgcccctgcacagcgagcagaacaagagcagccccgaccccaccagcaccctgagcaacaccgtgagctacgagagaagcaccgacggcagcttccaggacagattcagagagttcgaggacagcaccctgaagcccaacagaaagaagcccaccgagaacatcatcatcgacctggacaaggaggacaaggacctgatcctgaccatcaccgagagcaccatcctggagatcctgcccgagctgaccagcgacaagaacaccatcatcgacatcgaccacaccaagcccgtgtacgaggacatcctgggcatgcagaccgacatcgacaccgaggtgcccagcgagccccacgacagcaacgacgagagcaacgacgacagcacccaggtgcaggagatctacgaggccgccgtgaacctgagcctgaccgaggagaccttcgagggcagcgccgacgtgctggccagctacacccaggccacccacgacgagagcatgacctacgaggacagaagccagctggaccacatgggcttccacttcaccaccggcatccccgcccccagcaccgagaccgagctggacgtgctgctgcccaccgccaccagcctgcccatccccagaaagagcgccaccgtgatccccgagatcgagggcatcaaggccgaggccaaggccctggacgacatgttcgagagcagcaccctgagcgacggccaggccatcgccgaccagagcgagatcatccccaccctgggccagttcgagagaacccaggaggagtacgaggacaagaagcacgccggccccagcttccagcccgagttcagcagcggcgccgaggaggccctggtggaccacaccccctacctgagcatcgccaccacccacctgatggaccagagcgtgaccgaggtgcccgacgtgatggagggcagcaaccccccctactacaccgacaccaccctggccgtgagcaccttcgccaagctgagcagccagacccccagcagccccctgaccatctacagcggcagcgaggccagcggccacaccgagatcccccagcccagcgccctgcccggcatcgacgtgggcagcagcgtgatgagcccccaggacagcttcaaggagatccacgtgaacatcgaggccaccttcaagcccagcagcgaggagtacctgcacatcaccgagccccccagcctgagccccgacaccaagctggagcccagcgaggacgacggcaagcccgagctgctggaggagatggaggccagccccaccgagctgatcgccgtggagggcaccgagatcctgcaggacttccagaacaagaccgacggccaggtgagcggcgaggccatcaagatgttccccaccatcaagacccccgaggccggcaccgtgatcaccaccgccgacgagatcgagctggagggcgccacccagtggccccacagcaccagcgccagcgccacctacggcgtggaggccggcgtggtgccctggctgagcccccagaccagcgagagacccaccctgagcagcagccccgagatcaaccccgagacccaggccgccctgatcagaggccaggacagcaccatcgccgccagcgagcagcaggtggccgccagaatcctggacagcaacgaccaggccaccgtgaaccccgtggagttcaacaccgaggtggccaccccccccttcagcctgctggagaccagcaacgagaccgacttcctgatcggcatcaacgaggagagcgtggagggcaccgccatctacctgcccggccccgacagatgcaagatgaacccctgcctgaacggcggcacctgctaccccaccgagaccagctacgtgtgcacctgcgtgcccggctacagcggcgaccagtgcgagctggacttcgacgagtgccacagcaacccctgcagaaacggcgccacctgcgtggacggcttcaacaccttcagatgcctgtgcctgcccagctacgtgggcgccctgtgcgagcaggacaccgagacctgcgactacggctggcacaagttccagggccagtgctacaagtacttcgcccacagaagaacctgggacgccgccgagagagagtgcagactgcagggcgcccacctgaccagcatcctgagccacgaggagcagatgttcgtgaacagagtgggccacgactaccagtggatcggcctgaacgacaagatgttcgagcacgacttcagatggaccgacggcagcaccctgcagtacgagaactggagacccaaccagcccgacagcttcttcagcgccggcgaggactgcgtggtgatcatctggcacgagaacggccagtggaacgacgtgccctgcaactaccacctgacctacacctgcaagaagggcaccgtggcctgcggccagccccccgtggtggagaacgccaagaccttcggcaagatgaagcccagatacgagatcaacagcctgatcagataccactgcaaggacggcttcatccagagacacctgcccaccatcagatgcctgggcaacggcagatgggccatccccaagatcacctgcatgaaccccagcgcctaccagagaacctacagcatgaagtacttcaagaacagcagcagcgccaaggacaacagcatcaacaccagcaagcacgaccacagatggagcagaagatggcaggagagcagaagatag

SEQ ID NO: 145905 - DNA, 10191 bp, Artificial Sequence
  derived and/or modified sequence
atgtttatcaacattaaaagcatcctgtggatgtgctcaacacttatcgtaacccacgcattacacaaagtcaaagtcggcaaaagcccccccgtgagaggaagcctgtctggtaaggtatcgctgccctgccacttcagcacaatgcccacattgccacccagttacaacacttcagaatttctccgaatcaagtggtccaaaatcgaagtggacaaaaatgggaaagatcttaaggagaccacggtcctcgtggctcagaatggtaatattaagattggccaagactacaaaggcagagtgagtgttcctacccacccagaggcagtcggcgacgcctctctgacggtcgtgaaactgctggcctctgacgcgggcctgtataggtgcgacgtcatgtatgggatcgaagatacacaggacaccgtcagcctaactgtcgatggagtcgtgtttcattatagggccgctacatcaagatacaccctgaacttcgaggccgctcaaaaagcttgcctggacgtgggggccgtcatagccactcccgagcagttattcgccgcctacgaagacgggttcgagcagtgtgatgctggttggctggccgatcagacagtgaggtacccaatccgagcccctcgcgtcggatgctacggagacaaaatgggtaaagccggagtgcgcacttatggcttcaggagtccccaggagacctacgacgtttactgctatgtcgatcatcttgacggtgacgtcttccacctgaccgttccctctaaatttaccttcgaggaggccgcaaaagagtgcgagaaccaggacgccagactcgccacggttggggagttgcaggccgcctggagaaatggatttgatcagtgcgattatggatggctctctgatgctagcgtgagacaccctgtcacagtagcaagagcccagtgcggcggcgggttgcttggagtgagaacactgtacaggtttgagaatcaaacagggtttccaccacctgattccagattcgatgcttattgttttaagccgaaggaagccactacaatcgatctatccatcctagccgagacagcgtccccgtcactgtctaaggaacctcagatggtatcagacaggactacacctatcattccactagtggatgagctgccggtcattcctacagaatttccaccagtggggaacattgtttcctttgagcagaaagccacagtgcagcctcaggcaattacagatagtctcgctactaagctgcccactcctaccggatcaactaagaaaccgtgggacatggacgattatagtccaagcgccagtggacctctggggaagttagatatctccgagatcaaagaggaggtgctgcagtcgaccaccggcgtaagccattacgctactgactcatgggacggagtggtggaagacaaacagactcaggagtccgtgacacaaatcgagcagatcgaggtgggaccactcgtcacttccatggagattctgaaacatatcccgtcaaaagagttccctgtgacagaaacgcccctggtgactgctcgcatgatcctggaatctaaaacggagaaaaagatggtctcgaccgtctcagaactggtgactacaggccattatggattcacgctgggagaagaggacgacgaggataggacgctgacggtggggtctgacgagtctacactgatatttgatcagatcccagaagtcatcaccgttagcaagacgtcagaagacacgatccacacccacctcgaggatctggaaagcgtgtcagcctctactaccgtgtcacccctcattatgcctgacaataacgggtcctctatggatgattgggaagagcgccagacctcggggcgcatcacagaggagtttctggggaagtacttgagcaccactcccttcccttcacagcaccgcacggaaatcgagttattcccttactcaggagacaagatcctggtcgaggggataagcactgtgatatatccttccctccagaccgaaatgacacaccggcgggagaggacagaaacacttatccccgagatgagaacagacacgtatactgacgagatccaggaagagatcaccaaatcgccatttatgggtaagacagaagaggaagtgttcagtggcatgaaactttccacgagcctgtccgagcccatccacgtgactgagtccagcgtggaaatgacaaagagttttgatttcccaacactgatcacaaaactttctgcagagcccacagaggtgcgggatatggaggaagactttaccgcgacaccaggaaccactaagtacgacgagaacattacaactgtgctgcttgcccatgggactctgagtgtggaagcagccaccgttagcaagtggtcttgggatgaagataatacaacttctaaacccctggagtccaccgagccctctgcaagcagcaagctaccccccgccttgcttaccaccgttggaatgaacggaaaggacaaggatattccctcctttaccgaggacggtgccgatgagtttacgctcattcccgactcaacacagaaacaactggaggaagttacagacgaagacatcgcggcgcatggaaaatttactatcagatttcagcccactaccagcaccggaatagcggaaaagtccaccctccgagacagcacaactgaagagaaagttcctcccatcaccagtacggagggtcaggtttacgctacaatggagggctctgctctaggcgaggtagaagacgtggatctgagcaagccagtgagtacagtgccacagttcgctcatacctcagaggtggaaggactggcctttgtgtcatattcttcaacacaggagcccacaacgtacgtggactcaagtcacactattccgctctcagttatccccaaaactgactggggagtccttgtgccaagtgtcccaagcgaggatgaagttttaggagaaccctctcaggacatcttggtgatcgatcagacacgccttgaggcaaccattagccctgaaaccatgcgaactactaaaattaccgagggcacgacccaagaggagttcccttggaaggaacagaccgcagaaaagcccgtgccggcactgagttccactgcctggacgcccaaagaggctgtgaccccgctcgatgagcaggagggcgatggctcagcctatacggtcagcgaggacgagctcttgaccggtagcgaaagggttcccgtgttagagaccacaccagtcggcaaaatcgatcattctgttagttacccaccgggagcagtaacagaacacaaggtcaagaccgatgaggtggtgacgctcacacctaggatcggcccaaaggtttccctctcacctgggcccgagcagaaatacgagacggaggggtcctctaccacaggattcaccagttcattgagcccgtttagcacccacattacccagctcatggaggaaacaacaacggagaagacttccctagaggacatagatctggggagcggcctttttgaaaagcctaaggccactgaactgatcgaattttcaaccattaaagtcaccgtaccaagtgacatcacaacagctttctcttctgttgatcggctgcacactactagcgcatttaagcctagctcggctattacaaagaaaccccctctcatcgacagagaacccggtgaagaaaccacttctgacatggtgattattggagagtccacatcccatgtgccaccaaccactttggaggacattgtggccaaggaaaccgagactgacatagacagggagtactttacaacatcatcccctcctgcaacacaacccactcggccgcccacagtggaagataaggaagcctttggtccccaagccctaagtaccccacagcctcctgcctctacaaagttccaccccgacattaatgtttacattatcgaggtgcgcgaaaacaagactggaaggatgtccgatttgtccgtgatcggacatcccattgacagcgagagcaaggaagatgagccgtgtagcgaggagaccgaccctgtccatgatctcatggccgagattctcccggaattccccgacattattgagattgatctgtaccactctgaagaaaacgaggaggaggaggaggaatgcgcaaacgcaaccgacgtgacaacaaccccatctgtgcagtacattaatggtaaacacctggttaccactgtgcctaaggatcctgaggccgcggaggcgcgacggggccaatttgaatctgtagcaccttctcagaatttttctgactcatccgagagcgacacccacccatttgtcattgccaaaactgaactttcaactgccgtgcaacccaatgaatcgactgagaccaccgagagcctggaagttacatggaagccagaaacctaccctgagactagtgagcattttagtggtggggagcccgacgtcttccccacagtgcccttccatgaggagtttgaatccggcaccgcaaagaaaggtgcggagagtgtgacggaaagggacaccgaagttggacaccaggcccatgagcacactgagcctgtgtccctgttccccgaagaatcatccggggaaatagcaatcgatcaggagagccagaaaatagctttcgctcgtgccaccgaagtcacatttggcgaagaagttgagaagagcacttccgtcacctatacgcctacgatcgtgccctccagtgcctcagcgtacgtgtcagaggaggaggctgtgacactgatagggaatccatggcccgatgaccttctttccaccaaagagtcatgggtggaggctaccccacgccaagtggtagaattaagcggcagctccagtatacccatcaccgagggaagcggagaagcggaggaggacgaagatacgatgttcacgatggttactgacctaagccagcggaacacaaccgatacactcattacactcgacacatctcgaattataaccgaaagctttttcgaggtgcccgccacaacgatctacccagtatctgaacagccgtccgcgaaggtcgtgcctacaaagttcgtctcagagactgacacttcggagtggatatcttccaccactgtagaagagaagaaacgaaaggaggaagaaggaacaactgggacagcgtcgacatttgaggtgtacagtagcacgcagcgttctgatcagctgattctgcctttcgaattagagtcaccaaacgtcgccaccagttccgatagcggtacccggaagtcgttcatgagtcttacaacccccacccagtctgaacgtgaaatgaccgactctacacccgtgttcactgaaactaataccttagaaaatctgggcgcccaaacaaccgaacatagttcaatccatcagccgggcgtgcaggaagggctgactactcttccgaggtccccggcctccgtgttcatggagcagggcagtggcgaagcagctgcagaccctgaaaccactactgtctctagttttagcctgaatgtggagtacgccatccaggctgaaaaagaagtcgccggaacactgtccccccacgtagagaccactttttccaccgaacctacggggttggtgctgtctactgtgatggaccgagtcgttgccgaaaacatcacccagacatctcgggaaattgtgatcagtgagaggttgggagagccaaattatggcgccgagatacgcggattctcaacagggttccctttggaagaggatttttcgggggacttccgtgagtactcaacagtgagccaccccatagccaaggaagagaccgttatgatggaagggagcggagacgcagcctttagagatacacaaacctccccgtccacggttccgacctcagtgcacatttcacatattagtgactccgagggcccaagctctaccatggtgtccacaagtgctttcccttgggaagagtttacctcatcggcggagggatctggggagcaactggtcacggtaagtagctcagtcgtcccggtactgcccagcgcagtccagaaattcagcgggactgctagttccataattgatgaagggctgggagaagtgggcacagttaatgaaattgataggcggtcaacaatcctacctacagcggaggtagaggggaccaaagcccccgtggagaaagaggaggtgaaggtgtcagggaccgtctcaaccaactttccgcagactattgagccagccaaactgtggtctaggcaggaggtgaaccccgtgcgacaggaaatcgagtcagaaacaacgtcagaggagcagatccaggaggaaaaatcgtttgagtcccctcaaaattcccctgccaccgaacaaaccatatttgattctcagacctttacggagaccgagctgaaaaccactgactatagtgtgctcacaactaaaaagacttacagcgatgataaagagatgaaagaagaggatacatcactcgtgaacatgtccacgccagaccctgacgcgaacggattggagtcttatactaccctgccagaggccactgagaaaagccattttttcctggctacagcacttgtaacggagtcaatacccgccgagcatgttgtgacagattccccgatcaagaaggaagagtcaaccaagcacttcccaaaaggcatgagacctaccatacaggagagtgacactgaacttttatttagcgggttgggatcaggagaggaggttttacctactctgccgactgaatcggttaacttcaccgaggttgagcagataaacaatactctctaccctcacaccagccaggtcgaaagcacatccagtgacaaaattgaggacttcaaccggatggaaaacgtggccaaggaagtcggacccttggtgagccagacagatattttcgaaggcagcggctcagtgacctccaccactctgattgaaatcttgagcgacactggggcagaagggccaaccgtcgcacccctgcccttcagcactgatattggacatccgcagaatcagactgtgcgctgggcagaagagatccaaacatcccgccctcaaaccatcacggagcaggattccaataaaaattctagcacagcagagatcaatgagacaacaacgtccagtacagattttctcgcgagggcatatggtttcgagatggcaaaagaattcgtaacttctgcccccaaaccttctgacctgtactatgagccatctggggagggcagtggtgaagtggacatagtggactctttccatacttctgccactacccaggccacccgacaagagagcagtaccacattcgtaagcgacggatcactcgaaaaacatcccgaggtgccatctgccaaagccgtgaccgccgacggcttccctactgtcagcgtgatgcttcccctgcactcagagcagaataaaagttcacccgaccccacctccacgttatcgaatacagtgagttacgagaggagcacagacggctcctttcaggaccgctttagagagttcgaagactccaccctgaaaccaaaccggaagaagcctaccgaaaatataatcatcgacctcgacaaggaggacaaagacttgattctgactataacagaatcaacaatccttgaaatattgccagagctcacatccgacaagaacaccatcatcgatatcgatcacaccaagcccgtatacgaagacatcctggggatgcaaactgatatcgacactgaggtgccgagcgaaccacatgacagtaatgacgaaagcaacgatgacagtacacaagttcaggaaatctacgaagcggctgtcaacctatctctcactgaggagaccttcgaggggtctgctgatgtgcttgccagctatacccaggcaacacatgatgagtccatgacgtacgaagacagaagtcagttagaccatatgggatttcactttacaactgggatccccgccccctctactgaaaccgaactggatgtgcttctacctacagcgacctcgctccccatacctcgcaaatcggccaccgtaattcctgagatagagggcatcaaggccgaggccaaggccttggacgacatgtttgagtcctcgactctgtctgatggtcaggcaatcgccgatcaatcggagattattccgaccctgggtcagttcgagcgcacacaggaggaatatgaagacaagaagcatgctgggccatcttttcagcccgaatttagctccggcgcagaggaagcacttgtggaccacacaccgtacctctcaatcgctaccacccatctgatggatcaaagcgtgaccgaggtccctgacgttatggaagggagcaacccgccgtactacactgacacaaccttggcggtgagcaccttcgcaaagctgtcatcacagacaccaagttcaccgctgactatctactctggctccgaggcctccggacataccgaaatacctcaacctagcgctctccccggtattgacgtcggctccagtgtgatgtccccacaggactctttcaaagagatccacgttaacattgaggccacctttaagccctctagcgaagagtatttgcacatcactgagccaccttctctgagtccagacacgaagctggaaccaagtgaagatgatggaaagcccgaattactggaagagatggaagctagccccactgaactgatcgccgtggagggcaccgagattctccaggatttccaaaataagaccgacggtcaggtgtccggcgaggctataaagatgttcccaaccatcaagaccccggaggcaggaaccgtgattaccacggcggacgaaatcgagttggaaggtgcaacccaatggccacactctactagtgcttccgccacatatggcgtcgaagccggggtcgtgccgtggctttctcctcaaacctctgaaagaccaaccctgagctctagtcctgagatcaaccccgagacccaggcagctctgataaggggccaggacagcacaatcgccgcgagcgaacagcaagttgccgcacgaattctcgactccaatgaccaggcaaccgtgaacccagttgagttcaacactgaggtggccacacccccgttcagccttctggagactagcaatgagactgactttctcatagggataaacgaagagagtgtcgagggtacggccatctacctgccgggacccgacagatgtaagatgaacccgtgtttgaatgggggcacctgctaccccaccgagacatcatatgtatgcacctgtgtgcctggctactctggcgatcagtgcgagctcgattttgatgagtgccactccaatccttgtcgaaacggagccacatgtgtcgacgggttcaacaccttccgctgtctttgtctccctagttatgtgggcgcactgtgtgaacaagacactgagacatgcgattacggctggcacaagtttcagggccagtgttacaagtacttcgctcacagacgtacttgggacgcagccgaaagagaatgccggctacagggagcacatcttacctccattctttcccacgaagagcagatgttcgtcaacagggtggggcatgattaccaatggatcggactgaacgataaaatgttcgaacatgatttcagatggacagacggctccaccctccagtacgaaaactggcggcccaatcagccagatagtttttttagcgccggagaggactgcgtggtcataatttggcacgaaaacgggcagtggaacgatgtgccctgtaattaccacttaacatacacttgtaagaaaggaaccgtcgcctgcggccaaccacccgtcgtggagaatgctaagaccttcggaaagatgaaaccccgctacgagatcaactccctcattcgatatcattgcaaagatggcttcatccaaagacatctgcccacaataagatgcttgggaaacggtagatgggccattcccaaaataacttgcatgaatccatccgcctatcaacgcacatattctatgaaatatttcaagaacagtagcagtgccaaggacaacagcattaatacctcgaaacacgatcaccgatggtctcggagatggcaggagagtagacgctag

SEQ ID NO: 145906 - DNA, 10191 bp, Artificial Sequence
  derived and/or modified sequence
atgttcatcaacatcaagagcatcctgtggatgtgcagcaccctcatcgtgacccacgccctgcacaaggtgaaggtgggcaagagcccccctgtgcggggcagcctgagcggcaaggtgtccctgccctgccacttcagcaccatgcccaccctgcccccatcctacaacaccagcgagttcctgcgcatcaagtggagcaagattgaggtggacaagaatggcaaggacctgaaggagaccaccgtgctggtggcccagaatggaaacatcaagattggccaggactacaagggccgggtgtctgtgcccacccaccctgaggccgtgggagatgccagcctgactgtggtgaagctgctggccagtgatgctggcctgtaccgctgtgatgtgatgtatggaattgaggacacccaggacacagtgtccctgactgtggatggagtggtgttccactaccgggccgccaccagccgctacaccctgaactttgaagctgcccagaaggcctgcctggatgtgggcgctgtgattgccaccccagagcagctgtttgctgcctatgaagatggctttgagcagtgtgatgctggctggctggccgaccagacagtgcgctaccccatccgggccccccgggtgggctgctacggggacaagatgggcaaggccggcgtgaggacctacggcttccgcagcccccaggagacctatgatgtgtactgctacgtggaccacctggatggagatgtgttccacctgactgtgcccagcaagttcacctttgaggaggccgccaaggaatgtgagaaccaggatgcccggctggccaccgtgggggagctgcaggccgcctggagaaatggatttgaccagtgtgactatggctggctgagtgatgcctctgtgcgccaccctgtgacagtggcccgggcccagtgtggcggcggcctgctgggcgtgaggaccctgtacagatttgagaaccagacaggcttccccccaccagacagcagatttgatgcctactgcttcaagcccaaggaggccaccaccatcgacctgagcatcctggccgagacagccagccccagcctgagcaaggagccccagatggtgtctgacaggaccacccccatcatccccctggtggatgagctgcctgtgatccccacagagttcccccctgtgggcaacatcgtgtcctttgagcagaaggccaccgtgcagccccaggccatcacagacagcctggccaccaagctgcccacccccaccggcagcaccaagaagccctgggacatggatgactacagccccagcgccagcggccccctgggcaagctggacatcagcgagatcaaggaggaggtgctgcagagcaccaccggggtgagccactacgccacagacagctgggatggagtggtggaggacaagcagacccaggagagcgtgacccagatcgagcagatcgaggtgggccccctggtgacctccatggagatcctgaagcacatccccagcaaggagttccctgtgacagagacccccctggtgacagccaggatgatcctggagagcaagacagagaagaagatggtgtccacagtgtctgagctggtgaccaccggccactacggcttcaccctgggggaggaggatgatgaggacaggaccctgactgtgggcagtgatgagagcaccctcatctttgaccagatccctgaggtgatcaccgtgtccaagaccagcgaggacaccatccacacccacctggaggacctggagagcgtgtctgccagcaccaccgtgagccccctcatcatgccagacaacaacggcagctccatggatgactgggaggagcggcagaccagcggccgcatcacagaggagttcctgggcaagtacctgagcaccacccccttccccagccagcacaggacagaaattgagctgttcccctacagcggggacaagatcctggtggagggcatcagcaccgtcatctaccccagcctgcagacagagatgacccacagaagagagaggacagagaccctcatccctgagatgaggacagacacctacacagatgagatccaggaggagatcaccaagagccccttcatgggcaagacagaggaggaggtgttcagcggcatgaagctgagcaccagcctgtctgagcccatccacgtgacagagagctctgtggagatgaccaagagctttgacttccccaccctcatcaccaagctgtctgctgagcccacagaggtgcgggacatggaggaggacttcaccgccaccccaggcaccaccaagtatgatgagaacatcaccaccgtgctgctggcccacggcaccctgtctgtggaggccgccaccgtgtccaagtggagctgggatgaggacaacaccaccagcaagcccctggagagcacagagcccagcgccagcagcaagctgcccccagccctgctgaccaccgtgggcatgaatggcaaggacaaggacatccccagcttcacagaagatggagcagatgagttcaccctcatcccagacagcacccagaagcagctggaggaggtgacagatgaagatattgctgcccacggcaagttcaccatccgcttccagcccaccaccagcactggaattgctgagaagagcaccctgcgggacagcaccacagaggagaaggtgccccccatcaccagcacagagggccaggtgtatgccaccatggagggcagcgccctgggggaggtggaggatgtggacctgagcaagcctgtgtccacagtgccccagtttgcccacaccagcgaggtggagggcctggcctttgtgtcctacagcagcacccaggagcccaccacctacgtggacagcagccacaccatccccctgagcgtcatccccaagacagactggggcgtgctggtgcccagcgtgcccagtgaagatgaggtgctgggggagcccagccaggacatcctggtgattgaccagacccggctggaggccaccatcagccctgagaccatgaggaccaccaagatcacagagggcaccacccaggaggagttcccctggaaggagcagacagctgagaagcctgtgcctgccctgagcagcacagcctggacccccaaggaggccgtgacccccctggatgagcaggagggagatggcagcgcctacacagtgtctgaagatgagctgctgaccggcagcgagcgggtgcctgtgctggagaccacccctgtgggcaagattgaccacagcgtgtcctacccacctggagctgtgacagagcacaaggtgaagacagatgaggtggtgaccctgaccccccgcatcggccccaaggtgtccctgagccctggccctgagcagaagtatgaaacagagggcagcagcaccaccggcttcaccagcagcctgagccccttcagcacccacatcacccagctgatggaggagaccaccacagagaagaccagcctggaggacatcgacctgggcagcggcctgtttgagaagcccaaggccacagagctgattgagttcagcaccatcaaggtgacagtgcccagcgacatcaccacagccttcagctctgtggaccggctgcacaccaccagcgccttcaagcccagcagcgccatcaccaagaagccacccctgattgaccgggagcccggggaggagaccaccagtgacatggtgatcattggagagagcaccagccacgtgccccccaccaccctggaggacatcgtggccaaggagacagaaacagacatcgaccgggagtacttcaccaccagcagccccccagccacccagcccacccggcccccaacagtggaggacaaggaggccttcggcccccaggccctgagcaccccccagcccccagccagcaccaagttccacccagacatcaacgtgtacatcatcgaggtgcgggagaacaagacaggccgcatgtctgacctgtctgtgattggccaccccattgattctgagagcaaagaagatgagccctgcagcgaggagacagatcctgtgcatgacctgatggccgagatcctgcctgagttcccagacatcattgaaattgacctgtaccacagcgaggagaatgaggaggaggaggaggagtgtgccaatgccacagatgtgaccaccaccccatctgtgcagtacatcaacgggaagcacctggtgaccaccgtgcccaaggaccctgaggccgctgaggcccggcggggccagtttgagagcgtggcccccagccagaacttcagtgacagcagcgagagtgacacccaccccttcgtcatcgccaagacagagctgagcacagctgtgcagcccaatgaaagcacagagaccacagagagcctggaggtgacctggaagccagagacctacccagagaccagcgagcacttcagcggcggggagccagatgtgttccccaccgtgcccttccacgaggagtttgagagcggcacagccaagaagggagctgagagcgtgacagagcgggacacagaggtgggccaccaggcccacgagcacacagagcctgtgtccctcttccctgaggagagcagcggggagatcgccatcgaccaggagagccagaagatcgcctttgcccgggccacagaggtgaccttcggggaggaggtggagaagagcacctctgtgacctacacccccaccatcgtgcccagcagcgccagcgcctacgtgtctgaggaggaggccgtgaccctcatcggcaacccctggccagatgacctgctgagcaccaaggagagctgggtggaggccaccccccggcaggtggtggagctgagcggcagcagcagcatccccatcacagagggcagcggggaggccgaggaggatgaggacaccatgttcaccatggtgacagacctgagccagaggaacaccacagacaccctcatcaccctggacaccagccgcatcatcacagagagcttctttgaggtgcctgccaccaccatctaccctgtgtctgagcagcccagcgccaaggtggtgcccaccaagtttgtgtctgaaacagacaccagcgagtggatcagcagcaccaccgtggaggagaagaagaggaaggaggaggagggcaccaccggcacagccagcacctttgaggtgtacagcagcacccagaggagtgaccagctgatcctgccctttgagctggagagccccaacgtggccaccagcagtgacagcggcaccaggaagagcttcatgagcctgaccacccccacccagagcgagcgggagatgacagacagcacccctgtgttcacagagaccaacaccctggagaacctgggcgcccagaccacagagcacagcagcatccaccagcccggggtgcaggagggcctgaccaccctgcccaggagccctgccagcgtcttcatggagcagggcagcggggaggccgctgctgaccctgagaccaccaccgtgtcctccttcagcctgaatgtggagtatgccatccaggccgagaaggaggtggccggcaccctgagcccccacgtggagaccaccttcagcacagagcccaccggcctggtgctgagcacagtgatggacagagtggtggccgagaacatcacccagaccagccgggagatcgtcatcagcgagcggctgggggagcccaactatggagctgagatccggggcttcagcacaggcttccccctggaggaggacttcagcggggacttccgggagtacagcacagtgagccaccccatcgccaaggaggagaccgtgatgatggagggcagcggagatgctgccttccgggacacccagaccagccccagcacagtgcccacctctgtgcacatcagccacatcagtgacagcgagggccccagcagcaccatggtgtccaccagcgccttcccctgggaggagttcaccagcagcgctgagggcagcggggagcagctggtgacagtgagcagctctgtggtgcctgtgctgcccagcgctgtgcagaagttcagcggcacagccagcagcatcattgatgagggcctgggggaggtgggcaccgtgaatgaaattgaccggcgcagcaccatcctgcccacagctgaggtggagggcaccaaggcccctgtggagaaggaggaggtgaaggtgtctggaacagtgtccaccaacttcccccagaccatcgagcccgccaagctgtggagccggcaggaggtgaaccctgtgcggcaggagattgagagcgagaccaccagcgaggagcagatccaggaggagaagagctttgagagcccccagaacagccctgccacagagcagaccatctttgacagccagaccttcacagaaacagagctgaagaccacagactacagcgtgctgaccaccaagaagacctacagtgatgacaaggagatgaaggaggaggacaccagcctggtgaacatgagcaccccagaccctgatgccaacggcctggagagctacaccaccctgcctgaggccacagagaagagccacttcttcctggccacagccctggtgacagagagcatcccagctgagcacgtggtgacagacagccccatcaagaaggaggagagcaccaagcacttccccaagggcatgaggcccaccatccaggagagtgacacagagctgctcttcagcggcctgggcagcggggaggaggtgctgcccaccctgcccacagagagcgtgaacttcacagaggtggagcagatcaacaacaccctgtacccccacaccagccaggtggagagcaccagcagtgacaagattgaggacttcaacaggatggagaatgtggccaaggaggtgggccccctggtgtcccagacagacatctttgagggcagcggctctgtgaccagcaccaccctgattgagatcctgagtgacacaggagctgagggccccaccgtggcccccctgcccttcagcacagacatcggccacccccagaaccagacagtgcgctgggccgaggagatccagaccagccggccccagaccatcacagagcaggacagcaacaagaacagcagcacagctgagatcaatgagaccaccaccagcagcacagacttcctggcccgggcctacggctttgagatggccaaggagtttgtgaccagcgcccccaagcccagcgacctgtactatgagcccagcggggagggcagcggggaggtggacatcgtggacagcttccacaccagcgccaccacccaggccacccggcaggagagcagcaccacctttgtgtctgatggcagcctggagaagcaccctgaggtgcccagcgccaaggctgtgacagcagatggcttccccaccgtgtctgtgatgctgcccctgcacagcgagcagaacaagagcagcccagaccccaccagcaccctgagcaacacagtgtcctatgaaagaagcacagatggcagcttccaggaccgcttccgggagtttgaggacagcaccctgaagcccaacaggaagaagcccacagagaacatcatcatcgacctggacaaggaggacaaggacctgatcctgaccatcacagagagcaccatcctggagatcctgcctgagctgaccagtgacaagaacaccatcatcgacatcgaccacaccaagcctgtgtatgaggacatcctgggcatgcagacagacatcgacacagaggtgcccagcgagccccatgacagcaatgatgagagcaatgatgacagcacccaggtgcaggagatctatgaagctgctgtgaacctgagcctgacagaggagacctttgagggcagcgcagatgtgctggccagctacacccaggccacccatgatgagagcatgacctatgaggacaggagccagctggaccacatgggcttccacttcaccaccggcatcccagcccccagcacagaaacagagctggatgtgctgctgcccacagccaccagcctgcccatccccaggaagagcgccaccgtcatccctgagattgagggcatcaaggccgaggccaaggccctggatgacatgtttgagagcagcaccctgagtgatggccaggccatcgctgaccagagcgagatcatccccaccctgggccagtttgagaggacccaggaggagtatgaggacaagaagcatgctggccccagcttccagcctgagttcagcagtggagctgaggaggccctggtggaccacaccccctacctgagcatcgccaccacccacctgatggaccagagcgtgacagaggtgcctgatgtgatggagggcagcaaccccccctactacacagacaccaccctggccgtgtccacctttgccaagctgagcagccagacccccagcagccccctgaccatctacagcggcagcgaggccagcggccacacagagatcccccagcccagcgccctgcccggcattgatgtgggcagctctgtgatgagcccccaggacagcttcaaggagatccacgtgaacatcgaggccaccttcaagcccagcagcgaggagtacctgcacatcacagagccccccagcctgagcccagacaccaagctggagcccagtgaagatgatggcaagccagagctgctggaggagatggaggccagccccacagagctgattgctgtggagggcacagagatcctgcaggacttccagaacaagacagatggccaggtgtctggagaggccatcaagatgttccccaccatcaagaccccagaggccggcaccgtcatcaccacagcagatgaaattgagctggagggcgccacccagtggccccacagcaccagcgccagcgccacctacggcgtggaggccggcgtggtgccctggctgagcccccagaccagcgagcggcccaccctgagcagcagccctgagatcaaccctgagacccaggccgccctgatccggggccaggacagcaccatcgccgccagcgagcagcaggtggccgcccgcatcctggacagcaatgaccaggccaccgtgaaccctgtggagttcaacacagaggtggccaccccacccttcagcctgctggagaccagcaatgaaacagacttcctgattggcatcaatgaggagagcgtggagggcacagccatctacctgcccggccctgaccgctgcaagatgaacccctgcctgaatggaggcacctgctaccccacagagaccagctatgtgtgcacctgtgtgcccggctacagcggggaccagtgtgagctggactttgatgagtgccacagcaacccctgcagaaatggagccacctgtgtggatggcttcaacaccttccgctgcctgtgcctgcccagctatgtgggcgccctgtgtgagcaggacacagagacctgtgactatggctggcacaagttccagggccagtgctacaagtactttgcccacaggaggacctgggatgctgctgagcgggagtgccgcctgcagggcgcccacctgaccagcatcctgagccatgaggagcagatgtttgtgaacagagtgggccatgactaccagtggattggcctgaatgacaagatgtttgaacatgacttccgctggacagatggcagcaccctgcagtatgagaactggaggcccaaccagcctgacagcttcttctctgctggggaggactgtgtggtgatcatctggcatgaaaatggccagtggaatgatgtgccctgcaactaccacctgacctacacctgcaagaagggcaccgtggcctgtggccagccccctgtggtggagaatgccaagaccttcggcaagatgaagcccaggtatgagatcaacagcctcatccgctaccactgcaaggatggcttcatccagaggcacctgcccaccatccgctgcctgggcaatggccgctgggccatccccaagatcacctgcatgaaccccagcgcctaccagaggacctacagcatgaagtacttcaagaacagcagcagcgccaaggacaacagcatcaacaccagcaagcatgaccaccgctggagccgccgctggcaggagagcagaagatag

SEQ ID NO: 145907 - DNA, 10191 bp, Artificial Sequence
  derived and/or modified sequence
atgttcatcaacatcaagagcatcctgtggatgtgcagcaccctgatcgtaacccatgccctgcataaggtcaaggttggaaaaagccctcccgtccgaggttccctgagcggcaaggtgagtctgccctgtcatttttctacaatgccaaccctgccaccatcctataatacctctgaattcctcaggatcaagtggtccaaaattgaagtggataagaatggtaaggatctgaaagaaacaaccgtgctcgttgcacagaatggaaatatcaaaatcggtcaggactacaaaggaagggtaagtgttcccacacatccggaagccgtaggcgatgctagccttactgtggtcaagctgctggcctccgatgcaggtctgtatcggtgcgatgtaatgtacggcattgaggacactcaggataccgtttcccttactgtggatggcgtggtgttccattaccgggctgccacttcaagatatacactaaattttgaggccgctcagaaggcctgcttggatgtgggcgcagtcattgcaactcccgagcagttgttcgccgcctacgaggacggttttgagcagtgtgatgcaggctggcttgcggatcaaactgtgcgttatccaatccgagcccctcgggtgggatgttacggggataaaatgggcaaagccggcgtacggacatatggttttcggtcaccacaggaaacctatgatgtctattgttatgtcgatcatctcgacggagacgtctttcatctgacagtgcctagcaagttcacattcgaggaagctgctaaggagtgtgaaaatcaggacgcccgattagctacagtcggcgagctccaggcggcatggaggaacggctttgatcagtgcgattatgggtggctgtcggatgcctcagtgcgacatccggtgaccgtggcccgagcccaatgcggggggggtctgctgggagtgcggactttgtacagatttgagaatcagacaggcttccctccccctgacagccgctttgatgcctattgcttcaagccaaaagaggcaactaccatcgatttgtcaattctagctgagacagcatccccctcgttgagcaaagagccacagatggtttccgaccgtactaccccgattattcccttagtagatgagctgcctgttattccaacggaattcccgccagtcggcaacatagtgagtttcgaacagaaagcaaccgtgcagccacaggctatcacagactctctcgctacaaaactccctacgccaaccggatctaccaaaaagccttgggacatggatgactactctcctagcgcttccggtcctttaggtaaattggacattagcgaaattaaggaggaagtgcttcaatccaccactggcgtgtcacattacgcaacggactcttgggatggggtcgtggaagacaagcaaactcaggagtcggtcacccagattgaacagattgaggtaggccccctcgtcaccagcatggagattctgaagcacattccaagcaaggagttccccgttaccgagacccctctagtaacggcgcgtatgattcttgagtcaaagaccgagaagaaaatggtctctactgtgagtgaattagtgaccaccggccactacggatttacccttggagaagaggacgacgaagacagaaccttaaccgtggggagcgacgagtccaccctgatattcgatcaaatcccagaggtaattaccgttagtaagacttcagaggatacaattcacacgcatctggaagaccttgaatctgtgtccgcgagcactacggtgagccccctcattatgccggataacaatggctcctcaatggacgactgggaagagcgccaaactagtgggcgaatcaccgaagaattcctcgggaagtacctgtctacaacaccatttccctctcagcaccggaccgaaattgagctgtttccttacagcggagataagatcctcgtggaaggcatcagcacggtcatttatccaagcttgcaaaccgaaatgacccacagacgagagaggaccgaaactctgattcccgagatgcgaacggacacctatacggacgaaattcaggaagagatcaccaagagccccttcatgggaaaaactgaggaagaagtctttagcggaatgaaactgtcaacctccctgagtgagccgattcacgtgacggagtcctctgttgagatgactaaaagcttcgatttccctacactcattactaaactcagtgccgaacccaccgaagtgagggacatggaggaagacttcaccgcgacgcctggaaccacaaagtatgatgagaacatcaccaccgtgctcctagcccacggtactctgtctgtagaggcagccactgtgagtaaatggagctgggacgaggataacacgacaagcaagccgctggaatccactgaaccgagcgcgagttctaagctaccaccagccctcctcactaccgtggggatgaacggtaaggacaaggacatcccctcgttcaccgaggatggggctgacgagttcacccttattcccgactctacacaaaagcagctcgaagaggtgaccgatgaggacattgccgcacacggaaagtttactataagatttcagcctactaccagcacagggatcgcagagaagtcaacacttcgagactccactaccgaagaaaaggtgcccccgatcacaagcaccgagggtcaggtttacgcgaccatggaggggtcggccctgggggaagtggaggacgtggatttaagcaagcctgtgagcactgtcccacagtttgcacacacttccgaggtcgaaggactggcattcgtgagttacagttccacccaggaacctaccacgtatgttgactcttcccatacaatcccattgagcgtcataccaaagacggactggggtgttctggtgccctctgtcccatccgaggatgaggttttgggagaaccctcacaagacatcctggttattgaccagacccgattggaagcaacaatctctccagagacaatgcgcacaacgaagatcaccgagggtaccacccaggaggaattcccttggaaggaacagacagctgaaaaacccgtgccagctctcagcagcacagcttggacgccgaaagaagcggttactcccctcgacgaacaggagggcgatggcagcgcttacaccgtgtccgaagatgaactattgacggggtccgagagggtgcctgtgttggagactacaccagtggggaagattgatcatagcgttagctacccgcccggagctgtgacggaacacaaagttaaaactgatgaagtcgtgacactgacaccgcgtatcgggccaaaagtgagcttaagcccggggcctgaacagaagtacgagacagagggaagtagcaccacaggcttcacaagcagtctgtctcccttctctactcatattactcagctcatggaggaaacgacaaccgagaagacttctctggaggacattgatctggggagcggcctgttcgagaaaccaaaggccaccgaattgattgaattttccaccataaaggtcaccgtgcccagcgatataacaactgctttctccagcgttgacagactacataccacttctgcctttaagccaagttctgccataactaaaaagcctccactcattgatagggagccaggcgaagagaccacaagtgacatggtgatcattggggagagtaccagccatgtcccgcccactactctcgaggatattgtggctaaggagacagagacggacattgaccgggagtatttcactacctcctccccacccgcaacacaaccaactcgtccaccgacggtggaagacaaagaggctttcgggcctcaggccttatctacaccccagccacctgcatccactaagtttcaccctgatatcaacgtttatatcatagaggtgagagagaacaaaacgggtcggatgtctgacttgagtgtcatcggccaccctattgactctgaatcgaaggaagatgagccctgctccgaggagacagatcccgttcatgacctgatggcggaaatactgcctgagtttccagacataatcgaaatcgacctctaccactccgaggagaatgaggaagaggaggaggaatgcgccaacgctacagacgtgactacaactccttcagtgcagtacataaatggaaaacatctggtaactacagttcccaaagatcccgaggccgccgaggcgaggcggggccagtttgagagcgtggccccaagccagaacttctctgactcttccgaatccgacactcacccattcgttattgctaagacagagttatccacagccgtacagcctaacgagagtacagaaacaacagaaagtttagaggttacttggaaacccgagacctatccggaaacttctgagcatttttcaggtggtgagcctgatgttttccctacagttcccttccatgaagagtttgaaagtggcacagccaagaaaggagccgagtccgtgaccgagagggacactgaggtggggcatcaagcccacgaacataccgaacctgtgtcactgttccccgaggaaagctccggcgaaattgcaatcgaccaggagtcccagaaaatcgcatttgcccgagctaccgaagtgactttcggcgaggaggtagagaaaagtacatccgtaacatatacgcctacaattgtcccttcttctgcttcagcatatgtgagcgaggaggaggccgtgacactgatcgggaacccttggcctgacgatctcctctccacgaaggagagctgggtagaggccaccccaagacaggttgtggagctctccgggtccagctccatcccgattacagagggaagcggcgaggcagaggaagacgaagacacgatgttcactatggtgaccgacttgtcacagagaaacacaacagacaccctgattaccctggacacgtcccggataatcacggagagcttcttcgaggttcccgcgaccacaatttaccccgtgtctgaacagccttctgcgaaggtcgtccctacaaagttcgtctcagaaacggacacatccgagtggatctcgagcactactgtagaggaaaaaaagcgcaaagaagaagaaggcacgacagggactgcaagcacttttgaagtttacagctcgacacagcggagcgatcagctaatcctcccattcgagttggaatctccgaatgtcgccacaagctcagatagcggtacacgaaaaagcttcatgtccctgaccacccctacccaatctgagcgggaaatgaccgatagcactcctgtgttcacagagacgaatacactcgaaaacctgggggctcagacaacggagcacagttccatccaccagcccggagttcaggaaggtctgactacacttccacggtcccctgcatcagtgttcatggagcagggaagcggcgaggctgccgcagatcccgagacaactactgtgtcttctttcagcctgaacgttgaatatgctatacaagcagaaaaggaggtagcaggcaccctaagcccccacgttgaaactaccttctctacagagcccacagggttggtactgtctactgtgatggatcgcgtagttgcagagaatatcactcagacttccagagagattgttatatccgagcgtttgggcgagcctaattatggagcagagattcggggtttcagcacaggcttcccgctcgaagaggatttttcaggcgatttccgggagtatagcaccgtctctcacccaatcgccaaggaagagacagtcatgatggaaggtagtggagacgctgcttttagagacacacaaacctctccgtctacagtgcctacttcagtgcacatctcgcatatcagcgacagcgaaggaccttccagcaccatggtgagcactagcgcttttccttgggaggagttcacaagttctgccgaaggcagcggcgagcagctggtgaccgtgagttcctctgtggttcccgttctccccagtgccgtccagaaatttagtggaacagccagcagcattatcgatgaaggtctgggtgaggtgggaactgtcaacgagatcgatcgcaggtccaccatccttccaacagccgaggttgagggcaccaaagcaccggtagaaaaagaggaagttaaggtgtctggaactgtaagcactaatttcccacagactatcgagccagccaagctatggtctcggcaagaagtgaaccctgtgcgccaggagattgagagcgagactacctctgaggagcaaatccaagaagagaaatcctttgaatctccacaaaactccccagccaccgagcaaacgattttcgattcccagacttttacggagaccgaactcaagaccactgattactccgtcttgactactaagaagacatatagcgatgacaaggagatgaaagaagaggataccagtcttgtcaacatgtccactcctgatccagatgccaacggactggaatcttataccactctccccgaggccactgaaaagagtcattttttcctcgcaactgcgctggttacggaatctattcccgcagaacacgtggtgacagatagtcctatcaaaaaagaagagagcacaaagcattttcccaaagggatgcggcctacaatccaggagtccgatacggaactgcttttttcaggcctcggcagtggcgaagaagttctacctactctgcctaccgagtctgtcaatttcacagaggtcgagcagatcaataacactctttatccacatacttcacaggtggaaagtacctcctcagacaaaattgaagacttcaaccggatggagaatgtagctaaagaagtcggccctctggtttctcagactgatatcttcgaaggttcaggcagcgtgacttcaacaaccctgatagagatattatcagataccggcgctgaggggccgacggtagccccactgccttttagcaccgacattggacatccccagaatcagaccgtgaggtgggccgaagagatccagacatccaggcctcagaccattactgagcaggacagcaataagaacagttccaccgcggagattaatgagactactactagttctaccgattttctggcgagagcttacggattcgagatggccaaggagtttgtcacttcagcacccaaaccaagtgatctttactatgaaccttcaggagagggaagcggggaggtcgatattgtggacagcttccacacatcagccactacccaggctacaagacaggagtcgtccacaaccttcgtgtccgatggatccctagaaaagcaccctgaagtcccaagcgccaaggccgttactgccgatggatttcccacagttagtgtgatgttgcccttgcattcagagcagaataaaagctccccagatcccacatccacgcttagcaatacggtctcctacgagcggagcactgacggctcctttcaggatagattccgcgaatttgaagactccacactcaagccgaaccgcaagaagcccactgagaacatcattatcgacctggacaaggaggataaggacctcatcctgacaattacggaaagtaccattctggaaatactgcctgagctaacctcggataagaacaccatcattgacattgatcacactaagccagtgtatgaagatatcctaggcatgcaaaccgacatagacaccgaagtgccatctgagccccacgactcaaatgacgagagcaatgatgacagcacacaggttcaggagatctacgaagctgccgtcaacctgtcactgactgaggagaccttcgagggatccgctgatgtacttgcctcatatacacaggcaactcatgatgagtcaatgacctatgaagaccggtcacagctagaccatatgggattccattttacgactggcatccccgcccctagtacagagactgaattagacgtgttgcttcccactgccacctctttgcctatacctagaaagtccgctacagtcattccagagatcgagggcataaaggctgaggcgaaagccctggacgacatgttcgaaagtagcactctgtccgatggacaagcaatcgccgaccagagtgagatcatcccgacactgggtcaatttgaaagaacccaggaggaatacgaggataagaaacacgctgggcccagtttccaaccagaattctcaagcggagccgaggaggctttagttgaccacaccccctatctgagcattgcaactacccacctcatggatcagagcgtgaccgaggtgccagacgtgatggaggggagcaaccccccatactataccgacaccacacttgccgtgtcaacctttgccaaactttcctcccagacaccatcatcccctctaaccatctacagcgggtcggaggcaagcggtcacacagagattccacaaccatccgctctccccggaatcgatgtgggttcatctgttatgtccccacaggacagcttcaaggagattcacgttaatatcgaggctactttcaagccatcaagtgaagaatatttgcatattacagaacccccgagtttgagcccagacacaaagctcgagccttctgaagacgatggtaagcctgaacttttggaggagatggaggcttctcccactgagctaattgcagtcgagggtaccgagatcctccaggattttcaaaataagacggacgggcaagtgtccggagaggcaatcaagatgttcccgacaatcaaaacccctgaggctggcaccgtgattactacagccgacgaaatcgaactggaaggcgctacccagtggcctcacagcacatcagcaagcgctacctacggagtcgaagccggggtagtcccctggctatctccgcaaactagcgagcgtcctacattgagttcgtctcctgagataaaccccgaaactcaggcagctctcataagaggacaagactccaccatagccgcatcagagcagcaggtggctgctagaattttggatagcaatgatcaggccacggtcaatcccgtcgagttcaatacagaggtagccacacccccattcagtctgctggaaacgtccaacgaaacggacttcctgatcgggattaatgaggaaagtgtcgagggcaccgcgatttatcttcccgggcctgaccgatgcaagatgaacccctgtctgaacggtggtacctgttaccccacagaaacctcctacgtctgcacatgcgtcccgggctattcgggtgaccagtgtgagctggacttcgatgaatgtcatagcaatccttgccgtaacggagccacctgcgtggatggcttcaatacttttaggtgcctctgccttccttcttacgttggagctctctgtgagcaagacacagagacatgcgactacggttggcacaaattccagggtcaatgctacaagtacttcgcacataggaggacctgggacgcggcggagagagagtgtcgactccagggggcccacctgactagtatcctctctcacgaagagcaaatgttcgtcaatcgggtaggccatgattatcagtggattgggctgaacgataagatgttcgaacatgacttcaggtggaccgatggttccaccctccagtatgagaattggagacccaaccagcctgacagcttcttcagtgctggtgaagactgcgtggttatcatttggcacgagaacggacagtggaacgacgtcccctgtaactaccatcttacgtacacttgcaagaaagggaccgtggcttgtggccagccgccagtcgtcgaaaatgctaaaacattcgggaaaatgaagcctcgatacgaaattaatagcctgatccggtatcactgcaaggacggtttcatccaaagacatctcccaactatccggtgcctgggcaatggacggtgggccattccaaagataacctgcatgaacccgagcgcttaccagaggacttactctatgaaatatttcaagaacagctcctccgctaaggacaattcaatcaacacctcaaaacacgatcatcgctggagtagacgatggcaggagtcaaggcgctag

SEQ ID NO: 145908 - DNA, 10191 bp, Artificial Sequence
  derived and/or modified sequence
atgttcattaatatcaagagcatcttgtggatgtgctccacactgatagtgacccatgcactgcataaagtgaaggtcggaaagtccccaccggtgagaggctcgttgtccggtaaagtgtcattgccctgccatttctcaacaatgccaaccctgccaccatcatacaatacctccgagttcctccgcattaagtggagtaaaatcgaggtggataagaacggcaaagatttgaaggagacaaccgtcctcgtggcgcagaacggtaatattaaaattggtcaggattacaagggtcgtgtcagcgtgcccactcaccctgaagcggtgggagacgcgtcactaaccgtggtgaaactgctggctagcgacgcaggtctttatagatgcgatgtgatgtacggtatagaggatacccaggacacggttagcttgactgtggatggagtcgtctttcactacagagcagcgacaagcaggtacacgctcaactttgaggcagcacagaaggcctgcctagacgtcggtgctgtcatcgcaaccccggagcagctctttgcggcatacgaggacggattcgaacagtgcgatgccggttggctcgccgatcagactgtgcgatatcccattagagcccctcgcgtcggctgttatggggataagatgggtaaagcaggcgtgcgcacatacggctttcggagcccccaggagacttacgatgtgtactgttacgtcgatcacctggatggcgatgtgttccatctgaccgtaccctccaagtttacttttgaagaggccgcaaaggagtgtgaaaatcaggatgctcgcctggccactgtgggggaactgcaggctgcctggagaaatgggttcgaccaatgcgactatgggtggctcagcgacgcctcagttaggcacccagtgactgtagccagggctcagtgcggcggaggcttactgggcgtgcgaaccctctatagattcgaaaaccagaccggctttccacccccagattcccggtttgacgcctactgtttcaaacccaaggaagcgacaactattgatctgagtatattggccgagactgctagcccgagcctaagcaaagaaccccaaatggtgagcgatcgaacaacacccatcattccacttgtcgatgagttgccagtcatccccacagaatttccaccagtgggaaacatcgtttcttttgagcaaaaagccactgtacagccacaggcaatcactgattccctggcaacgaaactgccaacacccaccggcagcactaaaaagccgtgggacatggatgactactcccccagtgcatctggcccactgggcaaactggacatcagcgaaattaaggaggaggtcctgcagtccacgacaggcgtttctcactacgccaccgactcatgggacggggtagtggaagataagcaaacccaggagagcgttacccaaattgagcagatagaggtgggcccactagtgacctccatggaaattcttaagcatattccatctaaggagttccctgtgacagagacccctctggttactgctcggatgatacttgagtctaagacagagaagaaaatggtgagcaccgtatctgaactggtgacaactggacactacggatttacactcggcgaggaagacgacgaggaccggaccctaaccgtcggctctgacgagagcacactgatcttcgatcagataccggaggtgatcacagtgagcaaaaccagcgaggacaccatccacacccaccttgaggatctcgagtctgtgagcgcatctactacagtctcaccactgatcatgcccgacaacaatggctctagcatggacgactgggaagaaaggcaaacatccggacggattactgaagaatttctgggtaagtacctttctaccaccccgtttccaagccagcatcggaccgagattgaattgttcccatacagtggagacaagattctcgtcgagggtatcagcacggtgatctacccctcgcttcagacggaaatgacacatcgtagagaacgcaccgagaccctcattcccgagatgcgaaccgatacctacaccgacgaaatacaggaagagattaccaagagccccttcatggggaagacggaagaagaggtattctccgggatgaagctttccacctctctgtctgagcctatccacgtcacggaatcatcagtcgagatgaccaaaagttttgattttccgacactcataacaaaattgagcgctgaaccaactgaagtcagggatatggaagaagatttcacggcgacaccaggaaccacgaaatatgacgagaacataacaaccgtgctgttagcgcacggaacccttagcgtggaggccgcaactgtgtccaaatggtcttgggacgaggacaatactactagcaaacctcttgagagcaccgagccctcggcctcgtccaagctgccgcctgctttgctgacaacagtgggaatgaacggtaaagataaggacatcccttcatttaccgaggacggggcagatgaatttactctgataccggatagtacacagaaacagctggaggaggtcactgatgaggacatagcagcccacgggaagtttaccatcagattccagcctaccacaagtacaggcattgcggaaaagtcaactttgcgagattctactaccgaggagaaggtgccccctattacaagcacagaggggcaggtgtacgccacaatggagggcagcgccctgggtgaagttgaagatgtggacctgagcaagcccgtaagtactgtcccccagtttgcacatacatcagaagtggaggggctggctttcgtgtcatactcgtctacccaagagcccaccacctatgtcgattcctctcatacgatcccactcagcgtgattcccaagaccgattggggggtgctagtgccctcagtgcccagcgaagacgaagtgcttggcgaacccagccaggacatactggttatcgatcagacaagactggaggccaccatcagccctgagaccatgaggacaaccaaaataaccgaaggtactacccaggaagagtttccgtggaaggagcaaacagccgagaagcctgtgccagccctgtcttctacagcttggacgccaaaggaagcggtcacacctcttgacgagcaggaaggggatggatctgcatacaccgtgagcgaggatgagttactgacaggttctgagagggtccctgtactcgagaccacccctgtgggcaagatagatcacagcgtaagttaccctccaggcgctgtaacagagcacaaagtaaagactgacgaagttgtcacattaacaccgcgaatcggccctaaggtgtctctgtcccccggaccagagcagaaatacgaaacggagggatcctcaaccaccgggtttacctccagcctgtccccttttagcacccacataactcagctgatggaggaaacaaccactgaaaagacgtctctggaggacattgacttgggctctgggctgtttgaaaagcccaaggccaccgaactgatagagttttccaccattaaagtgactgtgccatctgacatcactaccgcattctcttcagtggataggctgcatactacttccgcatttaagcccagttccgcaatcacaaaaaaaccgccactaatcgacagagagcctggcgaggagactacttccgacatggtgattattggtgagagcactagtcacgttcccccaactactttggaggatatagtggcaaaggagactgagacagacattgatcgggaatatttcacaacatcttccccccctgctacccagcccactcggccaccaactgtcgaagataaggaggctttcggccctcaggccctctcaacgcctcagccaccagcctccactaagtttcatccagatatcaacgtgtacattattgaagtcagagagaacaaaaccggtaggatgtctgatctgtctgttattggacacccaatcgattctgagtccaaagaggatgaaccttgcagcgaagaaactgaccccgtccatgatctgatggcagaaatcctgcccgaatttcccgacataatagagatagacctctaccactctgaggagaatgaggaggaagaagaggagtgcgcaaacgccacagacgtgaccaccacaccctccgttcagtacattaatggaaaacacttggtcacaacagtcccgaaagatcctgaagcagccgaggcaagacgcggtcaattcgaaagcgtggctccttctcagaacttcagtgactcatctgaaagcgacactcacccatttgtcatagcaaagaccgagctgtccaccgccgtacagccgaacgaatctaccgagaccaccgagtccctggaggtgacctggaagcccgagacctaccctgaaacctccgaacacttttcagggggtgaacccgatgtcttcccgacagtgcccttccacgaggagtttgagtcggggacagctaagaagggggctgagtcagtaaccgaacgtgacactgaggtgggacatcaggctcacgagcacaccgagcccgtaagcctttttcccgaggagagtagtggagaaatcgcaatagaccaggaatcccagaagattgcattcgctagagccactgaggtgacattcggtgaggaggtggaaaaatctactagtgtcacctatacacctacaatcgtgccctccagcgcgagcgcatacgtgagtgaggaagaagccgtaacactgatcggaaacccctggcccgacgacctgctctccactaaggagagttgggtggaggctacacccaggcaagtagtcgagctgagcggaagcagttccattcccatcaccgaggggtctggagaagctgaggaggacgaggataccatgtttacgatggtgaccgatctgtctcagaggaataccactgacaccctcatcacacttgacacctcaaggattatcacagagtcattcttcgaagtcccagccacgacaatctacccagtatccgagcagccatcagccaaagtggtcccaactaagtttgtgtccgagactgataccagcgagtggatctcatcaaccaccgtggaggaaaaaaaacgtaaggaggaagaaggaactactggtaccgcatccacttttgaggtctattccagtacacaaagatcggaccaattgatcttgccatttgagctggagagccccaatgtggcgacgtcatcagactccggcacccgcaagagtttcatgagcctgactactcctacgcagagcgagagggagatgactgattccacgcctgtgtttaccgagactaacacgctggagaatctgggagctcaaacgactgaacatagctccatacaccagcccggagttcaagaggggctcacgacattgcctcgctctccagcctctgtgtttatggaacaggggtctggtgaggctgctgctgatcctgaaaccactacagtctcatctttctccctcaacgttgagtacgccattcaagccgagaaagaggtggctggaactctgtcacctcatgtggagactacttttagtacagagcccactggcctggtcctcagcactgtcatggacagggtggtcgctgaaaatatcacacagacatcacgcgagatcgttattagtgaaaggctcggagagcccaattacggtgctgagatcagaggcttttccacggggtttccactagaagaagatttctccggtgatttcagagaatattccaccgtgtctcaccccattgccaaagaggaaaccgtcatgatggagggaagtggggacgcagcctttagggacacgcaaacatcaccatctaccgtccctacctccgtgcacatatctcacattagtgacagcgaaggaccaagcagcacaatggtctctacaagtgccttcccctgggaggaatttacgagttccgcagaggggtcaggcgagcagctcgtgacagtctcttcaagcgtagtgcccgtgttgcctagcgctgttcagaagttctctggtacagcatcaagcattatcgacgagggcctgggtgaggtgggaactgtaaatgagatcgatcgacgttctacaattctcccgacagcagaagtggagggtacaaaagcccctgtagaaaaagaggaggtcaaagtgagtggaacagtgagcaccaactttcctcagaccattgagccagctaaattgtggtctaggcaggaggtaaaccctgtgcggcaggagatcgagagtgagaccaccagcgaagaacaaatccaggaagaaaaatctttcgaaagcccacaaaacagcccagcgaccgagcagaccatcttcgatagccagacctttacagagaccgagttaaaaacaactgactattccgttctgacgacaaaaaaaacatatagtgacgacaaggaaatgaaagaggaggatacaagtctcgtgaatatgtctactcccgatcccgacgccaacgggttggagagttacactactctgcccgaggctacagaaaaatcccatttcttcttagccaccgcactcgtcacagaaagtattcctgctgagcacgtggtgaccgacagccccattaagaaagaggaatctactaaacacttccccaaggggatgcgccctaccatccaggagtcagataccgagctcctgtttagcggtctgggcagcggtgaggaagtgctgcccaccctacctactgaatctgtcaatttcacagaggtggaacagataaacaataccctgtaccctcatacctcccaggtcgaatcgacctcctcagataaaatcgaagactttaatcgtatggaaaatgtcgcaaaagaggttgggcctctcgttagccagaccgacatattcgagggctcaggctcagttacttcaacaactttgattgagatactttcggacaccggcgcagaaggccctaccgttgccccactgccattctcaaccgatattgggcatcctcagaaccaaaccgtacgctgggcagaagaaatccagacgtcgcgccctcagactataacagagcaagacagcaacaagaatagctcaacggcagagatcaacgagactaccaccagtagtacagattttctcgcaagggcctacggttttgagatggccaaagaatttgttactagtgcacccaaacctagcgacctctattacgaaccctctggcgaagggtccggtgaggtggacatcgtggacagcttccacacttccgctaccacccaggccacgcgccaagaatctagcactacattcgtgtctgacgggtcactggaaaagcacccagaggtaccatcagcaaaggccgtgaccgcagacggattccctacagtatccgttatgctcccacttcactccgaacagaacaagtcctcacccgaccctaccagcaccttgtccaatacagtgtcctacgagcgcagcactgatggatcctttcaagataggttccgggagtttgaggattctaccctgaagcctaatcgaaaaaaacccaccgagaacataattatagacctggacaaggaagacaaagatctgattctgacaattacggagtccactatcctggagattctccccgaactgaccagtgataaaaatactatcatcgatatagaccataccaagcctgtttacgaggacattctcggaatgcagacagacatcgacaccgaggtccccagtgaaccacacgattctaatgatgagtccaatgacgatagcacccaagtccaggaaatctatgaggcagctgtcaacctcagcctcacagaagagacctttgagggctctgctgatgtactggcaagttacacccaggccacacacgacgagtcaatgacctatgaggatagaagccaactggaccacatgggcttccacttcaccacagggattcctgccccatctacagaaaccgagttggacgttctgctgccaaccgcgactagcttgcctattcctagaaagtccgccaccgtcatccctgaaatcgaaggaattaaagccgaggccaaggcactcgatgatatgtttgaaagctcgactctctctgacgggcaggctatagccgaccaatctgagatcatccctaccttgggccagttcgagcggactcaggaggagtacgaggacaagaagcacgccggaccgtcttttcagcccgaatttagctccggcgctgaggaagctctggtcgatcacaccccttatctcagtatcgccactactcacctgatggatcagagcgtcaccgaggtgcccgacgtgatggaaggctctaaccccccttactacaccgacaccaccctagctgtctctacttttgccaagctttcgagccaaacgccttcctctcctctgactatctattcggggtctgaagcatctggtcacacagagattcctcagccttccgcactgcccggaatcgacgtgggatcgagtgttatgtcacctcaggacagtttcaaagagatccatgttaatatcgaagctacttttaagccatcctccgaggagtatctgcatattacagagcccccatcacttagccctgacacaaagctcgaaccaagcgaggatgacggaaagcctgagctgctcgaggaaatggaggccagtcccaccgaactcatcgccgtggaaggcacagaaatactgcaggatttccagaataaaacagacggccaggtttccggtgaggctataaagatgttccccacaatcaaaacgcccgaagcaggcacggtcattacgacagccgacgaaatcgaactagagggagcaacgcagtggccccactctacatcagcctccgccacctatggagtagaggccggagtggtgccatggctgagccctcagacctctgaacgccctactttatcttcatctcctgagattaatcctgagactcaggccgctctgattcgcggtcaggatagcacgattgctgccagcgagcaacaggtggccgcaaggattctggatagcaatgaccaggccacagtgaatccggtcgagttcaacacagaagtggctacacctccattctcacttctggaaacatctaatgaaacagactttctgatcggaattaacgaggaaagtgtggaagggactgctatttacctccctggccctgatagatgtaagatgaatccctgtctcaacgggggaacatgctatcccacagaaacctcctacgtgtgtacctgcgtgccgggatattcgggtgaccagtgtgagttggacttcgatgaatgtcactcgaacccctgtaggaatggtgccacatgtgtggatggctttaacaccttcaggtgcctttgcctgccttcctacgtaggggcactttgcgaacaggacaccgaaacgtgcgactacggatggcataagttccaaggccagtgctacaagtacttcgcgcaccgacgcacctgggacgcggcagaaagggaatgtcgactacagggggcacacttgacaagcatattgtcccatgaagagcaaatgttcgttaaccgtgtaggacacgactaccagtggatcggacttaacgacaaaatgttcgaacatgatttccgttggactgacggcagcactctccagtacgagaattggcgacctaaccagccggattccttcttctccgctggtgaggactgtgtcgtcataatttggcacgaaaacggtcaatggaacgatgtgccttgcaattaccacttgacctacacatgcaagaaagggacagttgcgtgcgggcagccccctgtggtggagaacgctaaaacctttggcaagatgaaacctagatacgaaataaacagcctcattcgctaccactgcaaggacggttttatccaacggcacttgccaaccattaggtgcctagggaacgggagatgggccatacccaaaattacatgcatgaatccttcagcctatcagcgaacctattctatgaagtatttcaagaattccagctcggccaaggataatagcattaacacatctaaacatgaccacaggtggtcccgccgatggcaagagtccaggcgctaa

SEQ ID NO: 145909 - DNA, 12625 bp, Artificial Sequence
  derived and/or modified sequence
gctgtccccaagccgattggtacttcttgtcaggaagaaacgccaagaggtgggagtgcctggggagggaggcaggcggtccctaccgcaggcgcggggagctgcctttccgcccctccgcctgctttccaagcctggactcttaggagtggctgaagctgcggagcgcttttggagcctgtgaatgaaccctcctcctctccctcctccttcttctcgctgagtctcctcctcggctctgacggtacagtgatataatgatgatgggtgtcacaacccgcatttgaacttgcaggcgagctgccccgagcctttctggggaagaactccaggcgtgcggacgcaacagccgagaacattaggtgttgtggacaggagctgggaccaagatcttcggccagccccgcatcctcccgcatcttccagcaccgtcccgcaccctccgcatccttccccgggccaccacgcttcctatgtgacccgcctgggcaacgccgaacccagtcgcgcagcgctgcagtgaattttccccccaaactgcaataagccgccttccaaggccaagatgttcataaatataaagagcatcttatggatgtgttcaaccttaatagtaacccatgcgctacataaagtcaaagtgggaaaaagcccaccggtgaggggctccctctctggaaaagtcagcctaccttgtcatttttcaacgatgcctactttgccacccagttacaacaccagtgaatttctccgcatcaaatggtctaagattgaagtggacaaaaatggaaaagatttgaaagagactactgtccttgtggcccaaaatggaaatatcaagattggtcaggactacaaagggagagtgtctgtgcccacacatcccgaggctgtgggcgatgcctccctcactgtggtcaagctgctggcaagtgatgcgggtctttaccgctgtgacgtcatgtacgggattgaagacacacaagacacggtgtcactgactgtggatggggttgtgtttcactacagggcggcaaccagcaggtacacactgaattttgaggctgctcagaaggcttgtttggacgttggggcagtcatagcaactccagagcagctctttgctgcctatgaagatggatttgagcagtgtgacgcaggctggctggctgatcagactgtcagatatcccatccgggctcccagagtaggctgttatggagataagatgggaaaggcaggagtcaggacttatggattccgttctccccaggaaacttacgatgtgtattgttatgtggatcatctggatggtgatgtgttccacctcactgtccccagtaaattcaccttcgaggaggctgcaaaagagtgtgaaaaccaggatgccaggctggcaacagtgggggaactccaggcggcatggaggaacggctttgaccagtgcgattacgggtggctgtcggatgccagcgtgcgccaccctgtgactgtggccagggcccagtgtggaggtggtctacttggggtgagaaccctgtatcgttttgagaaccagacaggcttccctccccctgatagcagatttgatgcctactgctttaaacctaaagaggctacaaccatcgatttgagtatcctcgcagaaactgcatcacccagtttatccaaagaaccacaaatggtttctgatagaactacaccaatcatccctttagttgatgaattacctgtcattccaacagagttccctcccgtgggaaatattgtcagttttgaacagaaagccacagtccaacctcaggctatcacagatagtttagccaccaaattacccacacctactggcagtaccaagaagccctgggatatggatgactactcaccttctgcttcaggacctcttggaaagctagacatatcagaaattaaggaagaagtgctccagagtacaactggcgtctctcattatgctacggattcatgggatggtgtcgtggaagataaacaaacacaagaatcggttacacagattgaacaaatagaagtgggtcctttggtaacatctatggaaatcttaaagcacattccttccaaggaattccctgtaactgaaacaccattggtaactgcaagaatgatcctggaatccaaaactgaaaagaaaatggtaagcactgtttctgaattggtaaccacaggtcactatggattcaccttgggagaagaggatgatgaagacagaacacttacagttggatctgatgagagcaccttgatctttgaccaaattcctgaagtcattacggtgtcaaagacttcagaagacaccatccacactcatttagaagacttggagtcagtctcagcatccacaactgtttcccctttaattatgcctgataataatggatcatccatggatgactgggaagagagacaaactagtggtaggataacggaagagtttcttggcaaatatctgtctactacaccttttccatcacagcatcgtacagaaatagaattgtttccttattctggtgataaaatattagtagagggaatttccacagttatttatccttctctacaaacagaaatgacacatagaagagaaagaacagaaacactaataccagagatgagaacagatacttatacagatgaaatacaagaagagatcactaaaagtccatttatgggaaaaacagaagaagaagtcttctctgggatgaaactctctacatctctctcagagccaattcatgttacagagtcttctgtggaaatgaccaagtcttttgatttcccaacattgataacaaagttaagtgcagagccaacagaagtaagagatatggaggaagactttacagcaactccaggtactacaaaatatgatgaaaatattacaacagtgcttttggcccatggtactttaagtgttgaagcagccactgtatcaaaatggtcatgggatgaagataatacaacatccaagcctttagagtctacagaaccttcagcctcttcaaaattgccccctgccttactcacaactgtggggatgaatggaaaggataaagacatcccaagtttcactgaagatggagcagatgaatttactcttattccagatagtactcaaaagcagttagaggaggttactgatgaagacatagcagcccatggaaaattcacaattagatttcagccaactacatcaactggtattgcagaaaagtcaactttgagagattctacaactgaagaaaaagttccacctatcacaagcactgaaggccaagtttatgcaaccatggaaggaagtgctttgggtgaagtagaagatgtggacctctctaagccagtatctactgttccccaatttgcacacacttcagaggtggaaggattagcatttgttagttatagtagcacccaagagcctactacttatgtagactcttcccataccattcctctttctgtaattcccaagacagactggggagtgttagtaccttctgttccatcagaagatgaagttctaggtgaaccctctcaagacatacttgtcattgatcagactcgccttgaagcgactatttctccagaaactatgagaacaacaaaaatcacagagggaacaactcaggaagaattcccttggaaagaacagactgcagagaaaccagttcctgctctcagttctacagcttggactcccaaggaggcagtaacaccactggatgaacaagagggcgatggatcagcatatacagtctctgaagatgaattgttgacaggttctgagagggtcccagttttagaaacaactccagttggaaaaattgatcacagtgtgtcttatccaccaggtgctgtaactgagcacaaagtgaaaacagatgaagtggtaacactaacaccacgcattgggccaaaagtatctttaagtccagggcctgaacaaaaatatgaaacagaaggtagtagtacaacaggatttacatcatctttgagtccttttagtacccacattacccagcttatggaagaaaccactactgagaaaacatccctagaggatattgatttaggctcaggattatttgaaaagcccaaagccacagaactcatagaattttcaacaatcaaagtcacagttccaagtgatattaccactgccttcagttcagtagacagacttcacacaacttcagcattcaagccatcttccgcgatcactaagaaaccacctctcatcgacagggaacctggtgaagaaacaaccagtgacatggtaatcattggagaatcaacatctcatgttcctcccactacccttgaagatattgtagccaaggaaacagaaaccgatattgatagagagtatttcacgacttcaagtcctcctgctacacagccaacaagaccacccactgtggaagacaaagaggcctttggacctcaggcgctttctacgccacagcccccagcaagcacaaaatttcaccctgacattaatgtttatattattgaggtcagagaaaataagacaggtcgaatgagtgatttgagtgtaattggtcatccaatagattcagaatctaaagaagatgaaccttgtagtgaagaaacagatccagtgcatgatctaatggctgaaattttacctgaattccctgacataattgaaatagacctataccacagtgaagaaaatgaagaagaagaagaagagtgtgcaaatgctactgatgtgacaaccaccccatctgtgcagtacataaatgggaagcatctcgttaccactgtgcccaaggacccagaagctgcagaagctaggcgtggccagtttgaaagtgttgcaccttctcagaatttctcggacagctctgaaagtgatactcatccatttgtaatagccaaaacggaattgtctactgctgtgcaacctaatgaatctacagaaacaactgagtctcttgaagttacatggaagcctgagacttaccctgaaacatcagaacatttttcaggtggtgagcctgatgttttccccacagtcccattccatgaggaatttgaaagtggaacagccaaaaaaggggcagaatcagtcacagagagagatactgaagttggtcatcaggcacatgaacatactgaacctgtatctctgtttcctgaagagtcttcaggagagattgccattgaccaagaatctcagaaaatagcctttgcaagggctacagaagtaacatttggtgaagaggtagaaaaaagtacttctgtcacatacactcccactatagttccaagttctgcatcagcatatgtttcagaggaagaagcagttaccctaataggaaatccttggccagatgacctgttgtctaccaaagaaagctgggtagaagcaactcctagacaagttgtagagctctcagggagttcttcgattccaattacagaaggctctggagaagcagaagaagatgaagatacaatgttcaccatggtaactgatttatcacagagaaatactactgatacactcattactttagacactagcaggataatcacagaaagcttttttgaggttcctgcaaccaccatttatccagtttctgaacaaccttctgcaaaagtggtgcctaccaagtttgtaagtgaaacagacacttctgagtggatttccagtaccactgttgaggaaaagaaaaggaaggaggaggagggaactacaggtacggcttctacatttgaggtatattcatctacacagagatcggatcaattaattttaccctttgaattagaaagtccaaatgtagctacatctagtgattcaggtaccaggaaaagttttatgtccttgacaacaccaacacagtctgaaagggaaatgacagattctactcctgtctttacagaaacaaatacattagaaaatttgggggcacagaccactgagcacagcagtatccatcaacctggggttcaggaagggctgaccactctcccacgtagtcctgcctctgtctttatggagcagggctctggagaagctgctgccgacccagaaaccaccactgtttcttcattttcattaaacgtagagtatgcaattcaagccgaaaaggaagtagctggcactttgtctccgcatgtggaaactacattctccactgagccaacaggactggttttgagtacagtaatggacagagtagttgctgaaaatataacccaaacatccagggaaatagtgatttcagagcgattaggagaaccaaattatggggcagaaataaggggcttttccacaggttttcctttggaggaagatttcagtggtgactttagagaatactcaacagtgtctcatcccatagcaaaagaagaaacggtaatgatggaaggctctggagatgcagcatttagggacacccagacttcaccatctacagtacctacttcagttcacatcagtcacatatctgactcagaaggacccagtagcaccatggtcagcacttcagccttcccctgggaagagtttacatcctcagctgagggctcaggtgagcaactggtcacagtcagcagctctgttgttccagtgcttcccagtgctgtgcaaaagttttctggtacagcttcctccattatcgacgaaggattgggagaagtgggtactgtcaatgaaattgatagaagatccaccattttaccaacagcagaagtggaaggtacgaaagctccagtagagaaggaggaagtaaaggtcagtggcacagtttcaacaaactttccccaaactatagagccagccaaattatggtctaggcaagaagtcaaccctgtaagacaagaaattgaaagtgaaacaacatcagaggaacaaattcaagaagaaaagtcatttgaatcccctcaaaactctcctgcaacagaacaaacaatctttgattcacagacatttactgaaactgaactcaaaaccacagattattctgtactaacaacaaagaaaacttacagtgatgataaagaaatgaaggaggaagacacttctttagttaacatgtctactccagatccagatgcaaatggcttggaatcttacacaactctccctgaagctactgaaaagtcacattttttcttagctactgcattagtaactgaatctataccagctgaacatgtagtcacagattcaccaatcaaaaaggaagaaagtacaaaacattttccgaaaggcatgagaccaacaattcaagagtcagatactgagctcttattctctggactgggatcaggagaagaagttttacctactctaccaacagagtcagtgaattttactgaagtggaacaaatcaataacacattatatccccacacttctcaagtggaaagtacctcaagtgacaaaattgaagactttaacagaatggaaaatgtggcaaaagaagttggaccactcgtatctcaaacagacatctttgaaggtagtgggtcagtaaccagcacaacattaatagaaattttaagtgacactggagcagaaggacccacggtggcacctctccctttctccacggacatcggacatcctcaaaatcagactgtcaggtgggcagaagaaatccagactagtagaccacaaaccataactgaacaagactctaacaagaattcttcaacagcagaaattaacgaaacaacaacctcatctactgattttctggctagagcttatggttttgaaatggccaaagaatttgttacatcagcaccaaaaccatctgacttgtattatgaaccttctggagaaggatctggagaagtggatattgttgattcatttcacacttctgcaactactcaggcaaccagacaagaaagcagcaccacatttgtttctgatgggtccctggaaaaacatcctgaggtgccaagcgctaaagctgttactgctgatggattcccaacagtttcagtgatgctgcctcttcattcagagcagaacaaaagctcccctgatccaactagcacactgtcaaatacagtgtcatatgagaggtccacagacggtagtttccaagaccgtttcagggaattcgaggattccaccttaaaacctaacagaaaaaaacccactgaaaatattatcatagacctggacaaagaggacaaggatttaatattgacaattacagagagtaccatccttgaaattctacctgagctgacatcggataaaaatactatcatagatattgatcatactaaacctgtgtatgaagacattcttggaatgcaaacagatatagatacagaggtaccatcagaaccacatgacagtaatgatgaaagtaatgatgacagcactcaagttcaagagatctatgaggcagctgtcaacctttctttaactgaggaaacatttgagggctctgctgatgttctggctagctacactcaggcaacacatgatgaatcaatgacttatgaagatagaagccaactagatcacatgggctttcacttcacaactgggatccctgctcctagcacagaaacagaattagacgttttacttcccacggcaacatccctgccaattcctcgtaagtctgccacagttattccagagattgaaggaataaaagctgaagcaaaagccctggatgacatgtttgaatcaagcactttgtctgatggtcaagctattgcagaccaaagtgaaataataccaacattgggccaatttgaaaggactcaggaggagtatgaagacaaaaaacatgctggtccttcttttcagccagaattctcttcaggagctgaggaggcattagtagaccatactccctatctaagtattgctactacccaccttatggatcagagtgtaacagaggtgcctgatgtgatggaaggatccaatcccccatattacactgatacaacattagcagtttcaacatttgcgaagttgtcttctcagacaccatcatctcccctcactatctactcaggcagtgaagcctctggacacacagagatcccccagcccagtgctctgccaggaatagacgtcggctcatctgtaatgtccccacaggattcttttaaggaaattcatgtaaatattgaagcgactttcaaaccatcaagtgaggaataccttcacataactgagcctccctctttatctcctgacacaaaattagaaccttcagaagatgatggtaaacctgagttattagaagaaatggaagcttctcccacagaacttattgctgtggaaggaactgagattctccaagatttccaaaacaaaaccgatggtcaagtttctggagaagcaatcaagatgtttcccaccattaaaacacctgaggctggaactgttattacaactgccgatgaaattgaattagaaggtgctacacagtggccacactctacttctgcttctgccacctatggggtcgaggcaggtgtggtgccttggctaagtccacagacttctgagaggcccacgctttcttcttctccagaaataaaccctgaaactcaagcagctttaatcagagggcaggattccacgatagcagcatcagaacagcaagtggcagcgagaattcttgattccaatgatcaggcaacagtaaaccctgtggaatttaatactgaggttgcaacaccaccattttcccttctggagacttctaatgaaacagatttcctgattggcattaatgaagagtcagtggaaggcacggcaatctatttaccaggacctgatcgctgcaaaatgaacccgtgccttaacggaggcacctgttatcctactgaaacttcctacgtatgcacctgtgtgccaggatacagcggagaccagtgtgaacttgattttgatgaatgtcactctaatccctgtcgtaatggagccacttgtgttgatggttttaacacattcaggtgcctctgccttccaagttatgttggtgcactttgtgagcaagataccgagacatgtgactatggctggcacaaattccaagggcagtgctacaaatactttgcccatcgacgcacatgggatgcagctgaacgggaatgccgtctgcagggtgcccatctcacaagcatcctgtctcacgaagaacaaatgtttgttaatcgtgtgggccatgattatcagtggataggcctcaatgacaagatgtttgagcatgacttccgttggactgatggcagcacactgcaatacgagaattggagacccaaccagccagacagcttcttttctgctggagaagactgtgttgtaatcatttggcatgagaatggccagtggaatgatgttccctgcaattaccatctcacctatacgtgcaagaaaggaacagtcgcttgcggccagccccctgttgtagaaaatgccaagacctttggaaagatgaaacctcgttatgaaatcaactccctgattagataccactgcaaagatggtttcattcaacgtcaccttccaactatccggtgcttaggaaatggaagatgggctatacctaaaattacctgcatgaacccatctgcataccaaaggacttattctatgaaatactttaaaaattcctcatcagcaaaggacaattcaataaatacatccaaacatgatcatcgttggagccggaggtggcaggagtcgaggcgctgatccctaaaatggcgaacatgtgttttcatcatttcagccaaagtcctaacttcctgtgcctttcctatcacctcgagaagtaattatcagttggtttggatttttggaccaccgttcagtcattttgggttgccgtgctcccaaaacattttaaatgaaagtattggcattcaaaaagacagcagacaaaatgaaagaaaatgagagcagaaagtaagcatttccagcctatctaatttctttagttttctatttgcctccagtgcagtccatttcctaatgtataccagcctactgtactatttaaaatgctcaatttcagcaccgatggccatgtaaataagatgatttaatgttgattttaatcctgtatataaaataaaaagtcacaatgagtttgggcatatttaatgatgattatggagccttagaggtctttaatcattggttcggctgcttttatgtagtttaggctggaaatggtttcacttgctctttgactgtcagcaagactgaagatggcttttcctggacagctagaaaacacaaaatcttgtaggtcattgcacctatctcagccataggtgcagtttgcttctacatgatgctaaaggctgcgaatgggatcctgatggaactaaggactccaatgtcgaactcttctttgctgcattcctttttcttcacttacaagaaaggcctgaatggaggacttttctgtaaccaggaacattttttaggggtcaaagtgctaataattaactcaaccaggtctactttttaatggctttcataacactaactcataaggttaccgatcaatgcatttcatacggatatagacctagggctctggagggtgggggattgttaaaacacatgcaaaaaaaaaaaaaaaaaaaaaaaaagaaattttgtatatataaccattttaatcttttataaagttttgaatgttcatgtatgaatgctgcagctgtgaagcatacataaataaatgaagtaagccatactgatttaatttattggatgttattttccctaagacctgaaaatgaacatagtatgctagttatttttcagtgttagccttttactttcctcacacaatttggaatcatataatataggtactttgtccctgattaaataatgtgacggatagaatgcatcaagtgtttattatgaaaagagtggaaaagtatatagcttttagcaaaaggtgtttgcccattctaagaaatgagcgaatatatagaaatagtgtgggcatttcttcctgttaggtggagtgtatgtgttgacatttctccccatctcttcccactctgttttctccccattatttgaataaagtgactgctgaagatgactttgaatccttatccacttaatttaatgtttaaagaaaaacctgtaatggaaagtaagactccttccctaatttcagtttagagcaacttgaagaagagtagacaaaaaataaaatgcacatagaaaaagagaaaaagggcacaaagggattggcccaatattgattctttttttataaaacctcctttggcttagaaggaatgactctagctacaataatacacagtatgtttaagcaggttcccttggttgttgcattaaatgtaatccacctttaggtattttagagcacagaacaacactgtgttgatctagtaggtttctatttttcctttctctttacaatgcacataatactttcctgtatttatatcataacgtgtatagtgtaaaatgtgaatgactttttttgtgaatgaaaatctaaaatctttgtaactttttatatctgcttttgtttcaccaaagaaacctaaaatccttcttttactacac

SEQ ID NO: 145910 - protein, 1321 aa, Artificial Sequence
  derived and/or modified sequence
MGAPFVWALGLLMLQMLLFVAGEQGTQDITDASERGLHMQKLGSGSVQAALAELVALPCLFTLQPRPSAARDAPRIKWTKVRTASGQRQDLPILVAKDNVVRVAKSWQGRVSLPSYPRRRANATLLLGPLRASDSGLYRCQVVRGIEDEQDLVPLEVTGVVFHYRSARDRYALTFAEAQEACRLSSAIIAAPRHLQAAFEDGFDNCDAGWLSDRTVRYPITQSRPGCYGDRSSLPGVRSYGRRNPQELYDVYCFARELGGEVFYVGPARRLTLAGARAQCRRQGAALASVGQLHLAWHEGLDQCDPGWLADGSVRYPIQTPRRRCGGPAPGVRTVYRFANRTGFPSPAERFDAYCFRAHHPTSQHGDLETPSSGDEGEILSAEGPPVRELEPTLEEEEVVTPDFQEPLVSSGEEETLILEEKQESQQTLSPTPGDPMLASWPTGEVWLSTVAPSPSDMGAGTAASSHTEVAPTDPMPRRRGRFKGLNGRYFQQQEPEPGLQGGMEASAQPPTSEAAVNQMEPPLAMAVTEMLGSGQSRSPWADLTNEVDMPGAGSAGGKSSPEPWLWPPTMVPPSISGHSRAPVLELEKAEGPSARPATPDLFWSPLEATVSAPSPAPWEAFPVATSPDLPMMAMLRGPKEWMLPHPTPISTEANRVEAHGEATATAPPSPAAETKVYSLPLSLTPTGQGGEAMPTTPESPRADFRETGETSPAQVNKAEHSSSSPWPSVNRNVAVGFVPTETATEPTGLRGIPGSESGVFDTAESPTSGLQATVDEVQDPWPSVYSKGLDASSPSAPLGSPGVFLVPKVTPNLEPWVATDEGPTVNPMDSTVTPAPSDASGIWEPGSQVFEEAESTTLSPQVALDTSIVTPLTTLEQGDKVGVPAMSTLGSSSSQPHPEPEDQVETQGTSGASVPPHQSSPLGKPAVPPGTPTAASVGESASVSSGEPTVPWDPSSTLLPVTLGIEDFELEVLAGSPGVESFWEEVASGEEPALPGTPMNAGAEEVHSDPCENNPCLHGGTCNANGTMYGCSCDQGFAGENCEIDIDDCLCSPCENGGTCIDEVNGFVCLCLPSYGGSFCEKDTEGCDRGWHKFQGHCYRYFAHRRAWEDAEKDCRRRSGHLTSVHSPEEHSFINSFGHENTWIGLNDRIVERDFQWTDNTGLQFENWRENQPDNFFAGGEDCVVMVAHESGRWNDVPCNYNLPYVCKKGTVLCGPPPAVENASLIGARKAKYNVHATVRYQCNEGFAQHHVATIRCRSNGKWDRPQIVCTKPRRSHRMRRHHHHHQHHHQHHHHKSRKERRKHKKHPTEDWEKDEGNFC

SEQ ID NO: 145911 - protein, 772 aa, Artificial Sequence
  derived and/or modified sequence
MPGAGSAGGKSSPEPWLWPPTMVPPSISGHSRAPVLELEKAEGPSARPATPDLFWSPLEATVSAPSPAPWEAFPVATSPDLPMMAMLRGPKEWMLPHPTPISTEANRVEAHGEATATAPPSPAAETKVYSLPLSLTPTGQGGEAMPTTPESPRADFRETGETSPAQVNKAEHSSSSPWPSVNRNVAVGFVPTETATEPTGLRGIPGSESGVFDTAESPTSGLQATVDEVQDPWPSVYSKGLDASSPSAPLGSPGVFLVPKVTPNLEPWVATDEGPTVNPMDSTVTPAPSDASGIWEPGSQVFEEAESTTLSPQVALDTSIVTPLTTLEQGDKVGVPAMSTLGSSSSQPHPEPEDQVETQGTSGASVPPHQSSPLGKPAVPPGTPTAASVGESASVSSGEPTVPWDPSSTLLPVTLGIEDFELEVLAGSPGVESFWEEVASGEEPALPGTPMNAGAEEVHSDPCENNPCLHGGTCNANGTMYGCSCDQGFAGENCEIDIDDCLCSPCENGGTCIDEVNGFVCLCLPSYGGSFCEKDTEGCDRGWHKFQGHCYRYFAHRRAWEDAEKDCRRRSGHLTSVHSPEEHSFINSFGHENTWIGLNDRIVERDFQWTDNTGLQFENWRENQPDNFFAGGEDCVVMVAHESGRWNDVPCNYNLPYVCKKGTVLCGPPPAVENASLIGARKAKYNVHATVRYQCNEGFAQHHVATIRCRSNGKWDRPQIVCTKPRRSHRMRRHHHHHQHHHQHHHHKSRKERRKHKKHPTEDWEKDEGNFC

SEQ ID NO: 145912 - protein, 1335 aa, Artificial Sequence
  derived and/or modified sequence
RPPRDASELGARSRMGAPFVWALGLLMLQMLLFVAGEQGTQDITDASERGLHMQKLGSGSVQAALAELVALPCLFTLQPRPSAARDAPRIKWTKVRTASGQRQDLPILVAKDNVVRVAKSWQGRVSLPSYPRRRANATLLLGPLRASDSGLYRCQVVRGIEDEQDLVPLEVTGVVFHYRSARDRYALTFAEAQEACRLSSAIIAAPRHLQAAFEDGFDNCDAGWLSDRTVRYPITQSRPGCYGDRSSLPGVRSYGRRNPQELYDVYCFARELGGEVFYVGPARRLTLAGARAQCRRQGAALASVGQLHLAWHEGLDQCDPGWLADGSVRYPIQTPRRRCGGPAPGVRTVYRFANRTGFPSPAERFDAYCFRAHHPTSQHGDLETPSSGDEGEILSAEGPPVRELEPTLEEEEVVTPDFQEPLVSSGEEETLILEEKQESQQTLSPTPGDPMLASWPTGEVWLSTVAPSPSDMGAGTAASSHTEVAPTDPMPRRRGRFKGLNGRYFQQQEPEPGLQGGMEASAQPPTSEAAVNQMEPPLAMAVTEMLGSGQSRSPWADLTNEVDMPGAGSAGGKSSPEPWLWPPTMVPPSISGHSRAPVLELEKAEGPSARPATPDLFWSPLEATVSAPSPAPWEAFPVATSPDLPMMAMLRGPKEWMLPHPTPISTEANRVEAHGEATATAPPSPAAETKVYSLPLSLTPTGQGGEAMPTTPESPRADFRETGETSPAQVNKAEHSSSSPWPSVNRNVAVGFVPTETATEPTGLRGIPGSESGVFDTAESPTSGLQATVDEVQDPWPSVYSKGLDASSPSAPLGSPGVFLVPKVTPNLEPWVATDEGPTVNPMDSTVTPAPSDASGIWEPGSQVFEEAESTTLSPQVALDTSIVTPLTTLEQGDKVGVPAMSTLGSSSSQPHPEPEDQVETQGTSGASVPPHQSSPLGKPAVPPGTPTAASVGESASVSSGEPTVPWDPSSTLLPVTLGIEDFELEVLAGSPGVESFWEEVASGEEPALPGTPMNAGAEEVHSDPCENNPCLHGGTCNANGTMYGCSCDQGFAGENCEIDIDDCLCSPCENGGTCIDEVNGFVCLCLPSYGGSFCEKDTEGCDRGWHKFQGHCYRYFAHRRAWEDAEKDCRRRSGHLTSVHSPEEHSFINSFGHENTWIGLNDRIVERDFQWTDNTGLQFENWRENQPDNFFAGGEDCVVMVAHESGRWNDVPCNYNLPYVCKKGTVLCGPPPAVENASLIGARKAKYNVHATVRYQCNEGFAQHHVATIRCRSNGKWDRPQIVCTKPRRSHRMRRHHHHHQHHHQHHHHKSRKERRKHKKHPTEDWEKDEGNFC

SEQ ID NO: 145913 - DNA, 3966 bp, Artificial Sequence
  derived and/or modified sequence
atgggcgccccattcgtgtgggcactgggcctgctgatgctgcagatgctactgtttgtagctggtgaacagggaactcaagatattaccgatgcgtctgagcgcgggctgcatatgcagaagttgggctcaggttccgtccaggccgccctggcagagctcgtggccctgccatgtcttttcaccctacagccccggccttcagccgctcgggacgcgcccagaatcaagtggaccaaggtgcgaactgcaagtgggcagcggcaggacctgcctattctggttgcaaaggacaatgttgttagggtggctaagtcgtggcaggggcgcgtttcacttccaagttacccccgccggagggctaacgcgactctgctgctggggccactgagagcatctgattcgggcctgtatcggtgccaggtggtcagggggattgaagatgagcaggatctggttcctctggaggttaccggtgttgtattccattaccggagtgcaagagaccggtacgccttgacttttgcagaggctcaagaagcttgccgactgtccagtgccatcatcgctgccccacgacatctgcaggccgcctttgaagatgggtttgacaattgtgatgccggctggctgtctgaccggaccgtacgctaccccattacgcagagccgtcccggatgctacggcgatagaagcagccttcctggtgtgcggtcatacggccgccgcaatccgcaggaactgtatgacgtctattgctttgctcgggagctgggtggggaggtattctatgtgggcccagcaaggagattgaccctggccggggctagggctcagtgccggcgccagggggcagctctcgcttccgttgggcagctgcatttggcctggcacgagggcctagatcagtgcgaccccggctggctcgccgacgggtccgtcaggtacccaattcagacaccgaggagacggtgtggtggtcccgcccccggcgtgcgcacagtgtataggttcgccaaccgcacaggtttccctagcccagccgagaggttcgatgcatactgcttccgggcccaccatcccacaagtcagcatggagacctggagacccctagctcaggagatgagggggagattctgagcgctgagggaccacccgttagggagttagaaccaaccttagaggaggaggaggttgtgactcctgatttccaggagcctctcgtgagctccggcgaagaggagacccttatcctcgaagaaaaacaggagagccaacagaccttgtcccccaccccgggggaccctatgctcgcttcttggcccactggcgaggtgtggttgagcacagtcgccccctccccttctgacatgggcgccggcactgctgccagctcacatacagaagtggccccaacagaccccatgccaagacgtcgcggcagatttaaaggtttgaacgggagatatttccagcagcaagaacccgagcctgggttgcaaggcggcatggaggcgagtgcacaacctcccacaagcgaagcagctgtcaaccagatggagccccctcttgctatggccgtgactgaaatgttggggtctgggcagtctaggagcccttgggccgacttgacaaatgaggtggatatgccgggtgccggcagcgccggaggaaaatcctcacccgagccttggctttggccacccacaatggttccaccctccataagtggacactcacgcgcaccggtgctagaattggagaaagccgagggcccgagcgctcgtcccgcaacccccgacctcttctggagtcctttagaggccacagtgtctgctccgtcacccgcaccctgggaagccttccccgttgcaacttctccagatctgccaatgatggccatgctgagggggccaaaagagtggatgctgccacatcccaccccaatcagcactgaggccaatcgagtggaggctcatggtgaggcaactgccaccgcaccaccgtcccctgctgcggaaactaaagtttacagcttgccccttagccttacccccactggtcagggaggggaggcaatgcccactactcccgagtcaccccgcgctgactttagagagacaggggagacatcccctgctcaggtgaacaaggctgagcattcatcatcatccccctggccctcggtgaaccgtaacgttgccgtggggttcgttcctacggagaccgccaccgagcctaccggattgagaggcatcccagggtctgagtccggagtcttcgacaccgccgagtcgcctacgtctggtctccaggccacagtggatgaagtgcaagacccctggccctccgtttactccaagggtctggatgcttcaagtcctagtgcgcccctcgggtcgcctggcgtattcttggtacccaaagttacacctaatctggagccttgggttgcaaccgacgagggtcctacagtgaacccgatggattcaaccgtgactccagcaccatctgacgcaagtgggatttgggagcctggatctcaggtgtttgaggaggctgagtccacaaccctctcacctcaagtggcactcgacacttccatagtgactcccctaactactctggaacagggtgataaggtcggcgttccagccatgagcaccctgggctccagcagctcccagcctcatcccgagcctgaagatcaggtagagacccaggggacctcaggagccagcgttcctccccatcagagtagtcctctgggtaagcccgcggtaccgccgggcacaccaactgctgcctctgtgggcgagagtgcttctgtgtcctccggagagcccaccgtcccgtgggatccatcatcgactctacttccagtcacactggggattgaagattttgagcttgaagtgctagccggcagccccggagtggagtccttttgggaagaggtggcatcaggcgaggagcctgcactgcccggaacgccaatgaatgctggcgccgaagaggtgcactccgatccgtgcgagaataatccttgtctgcatggtggaacctgtaacgccaatggtacaatgtatggatgctcatgcgaccagggatttgccggtgagaactgcgaaatagacatagatgattgcctgtgttcaccttgtgaaaacggtggaacctgcattgatgaggttaacggattcgtctgcctgtgtctaccgagctatggaggcagcttctgcgaaaaagacactgaagggtgcgatagagggtggcacaagttccagggtcattgttataggtatttcgcccataggagggcgtgggaagatgcagaaaaggattgtcggcggagaagcgggcatctaaccagcgttcactcaccagaggagcactcattcattaattctttcgggcatgagaatacgtggattggcttgaacgataggatcgtcgagcgcgatttccaatggacagataatacaggacttcaatttgagaactggagggagaatcagcccgacaactttttcgcgggtggcgaagattgtgtggtgatggtggcccacgaatctggccgctggaatgatgtcccctgcaactacaacctcccctacgtctgcaaaaaaggaacggttctgtgcggtccaccacccgccgtcgagaatgcttcccttatcggcgcacggaaagccaaatataatgttcatgctacagtgcggtatcaatgtaatgaaggtttcgctcagcaccatgtagccactatccgttgccggtctaatggaaaatgggaccgccctcagatcgtgtgtaccaaaccccgccggtctcaccggatgagaagacaccatcaccaccatcaacatcaccatcagcaccaccatcataaaagtcggaaggaaagacgcaagcataagaaacaccccacagaagactgggagaaagacgaaggtaacttttgctag

SEQ ID NO: 145914 - DNA, 2319 bp, Artificial Sequence
  derived and/or modified sequence
atgccaggtgctggatccgcaggcggcaagtcgagccctgagccatggctatggcctcctacaatggtcccaccctctataagtggccattcgagggcacccgtgcttgaactggagaaggccgaaggaccctccgcgagacctgccacgcccgacctgttctggagcccacttgaggccacagtgagcgcaccatccccagcaccttgggaggcctttcccgtcgccactagccctgatcttcccatgatggccatgctgaggggccctaaagaatggatgttgcctcacccaactccgatctccacagaggccaatagggtagaagcccatggcgaagcgacagcgactgcccccccaagccccgctgcagagactaaagtctactccctgccgctgtccttaactcctactggacagggaggagaggcaatgccaactactcccgaatctccgcgagcagacttcagggagacaggggaaacctcccccgcacaggtaaacaaggcggaacattcatctagcagcccctggccctccgtcaacaggaatgtggccgtggggtttgtgccaaccgagactgctacagaacctacagggctgagaggcatccctggatctgaaagcggggttttcgacactgctgagagccctacctcaggcctgcaggcaaccgtggacgaagttcaagatccttggccatcagtctattcgaaagggctcgatgcctcatcccccagtgctccactgggctcccccggggtgttcttagtgccaaaggtgactcctaatttggaaccttgggtcgccactgacgaaggccccaccgtcaacccaatggacagtactgttactccagcgcccagcgacgcaagcggtatttgggaacctggatctcaggtgttcgaggaagcggagtctacaacgttgtcccctcaagtggccctcgatactagcattgtgaccccgctcacaaccctggaacaaggagataaggtcggagtacctgctatgagcactctggggagtagctcctctcagccccatcccgagccagaagaccaggtggagacccagggcacgtccggcgctagcgtgccaccccatcagtcctcacccctgggaaagcctgccgtaccacccggaactcccacagcagcatccgtgggggagagcgcatccgtgtctagcggagagcccacagtcccctgggatcctagttccactctcctgcctgtgacgcttggaatagaggatttcgaacttgaggtgctggctgggtcaccaggagtggagtcgttttgggaggaggtcgccagcggagaggaacctgccctacccggtacaccaatgaacgccggcgccgaggaggtgcacagcgatccctgcgaaaacaatccgtgtctgcacgggggcacttgcaatgcgaatgggactatgtacggttgctcctgcgaccaaggctttgctggggagaattgcgagatcgatatcgatgattgcctgtgtagtccgtgcgaaaacggagggacgtgcatagacgaagtaaacggcttcgtctgtctgtgcctcccctcctacggcgggtctttttgcgagaaggataccgaaggctgtgaccggggctggcataagtttcagggtcactgctatcgttactttgcccatcgcagagcatgggaggacgccgagaaagattgcaggcggaggtcaggtcacctgaccagcgtgcattcccctgaagaacattcctttatcaattccttcggtcatgagaacacatggatcggactgaatgaccggatcgtcgaaagggatttccaatggaccgataacacagggctgcagtttgagaactggagagaaaaccagcctgataatttctttgctggtggcgaagactgcgtggtcatggtggcccacgagtctggccggtggaatgatgttccttgtaattataaccttccctatgtttgcaagaagggcacagtcctgtgtggacccccccccgcagtcgaaaacgcaagtctgattggtgcacggaaggccaagtacaacgtacatgccaccgtccgctaccagtgtaatgaaggtttcgcacagcatcatgtcgcgaccattcggtgtcgttccaacggaaagtgggatcggcctcagattgtttgcactaagccaaggaggtcccatcgtatgaggcggcatcatcatcatcaccagcaccaccaccagcaccaccatcataagagtcgtaaggaacggcgcaagcacaagaagcatccgacagaagattgggagaaagatgagggcaacttctgctag

SEQ ID NO: 145915 - DNA, 4008 bp, Artificial Sequence
  derived and/or modified sequence
cgtccaccaagagacgcttccgagctgggtgctaggtccaggatgggggccccttttgtttgggcactgggcctgctgatgcttcagatgctcctgtttgtggctggggaacagggcacccaggatatcacagacgcctctgaacgggggctccatatgcagaaacttggctcggggagtgtgcaggctgccctcgcggaattggttgcccttccctgcctgttcactctgcaaccgcggccctcggcggcacgcgacgcccctcgtataaaatggacaaaggtgcgaaccgcgagtggacaaaggcaggatttacccatccttgtcgccaaagataatgtggtcagggttgctaaatcatggcagggcagggtgtccctgccatcctatcctagacgtcgggctaatgcaaccctgttacttggcccattgagagccagcgatagcgggctctataggtgtcaggtggttaggggaattgaggacgagcaggatctggtccctctggaggtaacaggtgttgtctttcactacaggtctgcacgtgatcgttacgccctgacctttgcggaagctcaggaggcctgcaggcttagcagcgctatcatcgctgctcctagacaccttcaggccgcgttcgaggatgggttcgacaactgtgacgctgggtggctctctgatcggacagttagataccctattacccagagccgcccaggatgttacggagacaggagttcgctgcccggcgtgaggtcatacggcagaaggaatccacaagaactgtacgacgtctactgtttcgccagggagctgggtggcgaagtcttctatgtgggcccagccagaaggttgaccctcgcgggggctcgcgctcagtgtaggaggcaaggcgcagccctggcatctgtaggccaactgcacctggcttggcatgagggactcgaccagtgcgatcctggttggctggccgacggatcagtaagataccccatccagacaccccgtagacggtgcggaggccctgcaccgggcgtgagaaccgtctataggttcgcaaacaggacagggtttccctctcctgcagaacggtttgatgcctattgcttcagggcccaccaccccacctcacagcatggggacctggagactccaagctccggagatgagggggagattctgtccgcagagggcccgcctgtgcgtgaactggagcccaccctggaagaagaggaggtggtgactcctgactttcaggagccgctagtcagctctggcgaggaggaaacactgatcttggaggagaaacaggaaagccagcaaactcttagcccgacgccaggagatcccatgcttgcttcctggccgaccggagaggtgtggctgtcaaccgtggcccccagtccctcggatatgggggccggaaccgctgccagctcacacaccgaggtcgcccctaccgatcctatgccaaggcggaggggccgcttcaagggtctgaacggtaggtactttcagcagcaagaaccagagccggggctgcaaggcggtatggaggctagtgcgcaacctccaacttcagaggcagctgtgaaccagatggaaccccctttggccatggccgtaaccgaaatgctcggttcagggcagagccgcagtccgtgggctgacctgaccaatgaagtggacatgccaggtgcaggaagcgccggagggaagtcaagtccggagccctggctgtggccccctactatggtcccgccatctatctctggccattctcgggctccagtgctagaattagaaaaggccgaaggcccttccgcccgaccagccacgccagacttgttttggagccccttggaagctaccgtgtccgcaccctctcctgcaccatgggaggcattcccagttgccacttccccagatctgccaatgatggcaatgctgcgagggccaaaggaatggatgctgccacatcccactcccatcagcactgaggccaaccgggtcgaggctcatggcgaagccacagcaaccgcacccccctccccggccgctgaaacaaaggtgtattccctgccactgtccctcaccccgacaggtcaggggggggaagcgatgcccacaactcccgagtcgccaagggcggacttcagggaaacgggagaaacaagccccgcacaggtcaacaaagcagaacacagttcttcctccccatggccatctgtcaatcgcaatgtggccgtggggttcgtccctacagagactgcaactgaaccaacagggctacgcggaatcccaggctccgaatcaggcgtgtttgataccgcggagagcccaaccagcggtctgcaagcgacggtggatgaggtccaggatccatggccttcagtctactcaaaagggctagacgcttcctctccaagcgctccgctcgggtcacctggtgtttttctagttccaaaagtcactccaaacctcgagccatgggtcgccactgacgagggtcccaccgtcaatcctatggattcaacagtgacccccgcaccctctgacgcctccggtatttgggagccaggcagccaagtcttcgaggaggctgagagtaccacgctgtctccccaggttgcccttgacaccagcatcgttacacctctcactacactggagcagggcgataaagtgggtgttccagccatgagcacactagggagctcttcctcacaaccccatccggagcccgaggatcaggtggaaacacaaggtacttcaggcgcatccgtaccccctcaccagtcttcccccttgggtaagcctgcagttccacctggtacccctactgcggccagcgtgggggagagcgcgtcagtgtcctctggggagccgacagtcccctgggacccaagctctaccctgctgccagtgactctggggatcgaggatttcgagcttgaagttctagctggaagccccggagtggagtccttctgggaggaagttgcgtccggtgaggagcctgccctacctgggactcctatgaacgccggtgccgaggaggtgcattcggatccctgtgagaataatccctgcttgcacggaggcacatgtaatgccaatggcaccatgtatggatgctcctgcgaccaaggcttcgctggtgaaaattgtgagattgacatcgacgattgcctgtgttctccttgtgaaaatggcgggacttgtatcgacgaggtgaatggattcgtttgcctgtgtctcccatcgtacggaggtagcttctgtgagaaggatactgaaggttgcgatcggggctggcataagtttcagggccattgctatagatactttgcccaccgcagagcatgggaggacgcagagaaagactgcagacgcaggtcaggccacctaacgtctgtgcactcccctgaggagcacagttttataaattctttcggccacgagaatacctggattgggttgaatgaccgcatcgtggaacgagactttcagtggaccgataacaccggcctacaatttgagaattggcgggagaaccagcccgacaacttctttgccggcggggaagattgtgtagtcatggtagcccatgagtccggcagatggaacgacgtgccatgcaattacaacttgccatatgtttgtaaaaagggcacagtgctatgcggtcctccaccagcagttgagaatgccagcctgatcggcgcacgtaaggctaagtacaatgtgcatgctacagtgcgctaccagtgtaatgaagggtttgcacagcaccacgttgccacgatccgttgtcgatccaacggtaaatgggatagaccacaaatcgtgtgcaccaagcctcgccgatctcatcgcatgcggcggcaccatcaccaccatcagcaccaccaccagcaccatcatcacaagagccggaaagagcgtagaaagcacaagaagcaccccacagaggattgggagaaggatgaagggaatttttgctag

SEQ ID NO: 145916 - DNA, 3966 bp, Artificial Sequence
  derived and/or modified sequence
atgggcgccccctttgtgtgggccctgggcctgctgatgctgcagatgctgctgtttgtggccggggagcagggcacccaggacatcacagatgccagcgagcggggcctgcacatgcagaagctgggcagcggctctgtgcaggccgccctggccgagctggtggccctgccctgcctcttcaccctgcagccccggcccagcgctgccagagatgccccccgcatcaagtggaccaaggtgaggacagccagcggccagaggcaggacctgcccatcctggtggccaaggacaacgtggtgcgggtggccaagtcctggcagggccgggtgtccctgcccagctaccccaggagaagagccaatgccaccctgctgctgggccccctgcgggccagtgacagcggcctgtaccgctgccaggtggtgcggggcattgaagatgagcaggacctggtgcccctggaggtgactggagtggtgttccactaccgcagcgcccgggacagatatgccctgacctttgctgaggcccaggaggcctgccgcctgagcagcgccatcatcgccgcccccaggcacctgcaggccgcctttgaagatggctttgacaactgtgatgctggctggctgagtgacagaacagtgcgctaccccatcacccagagcaggcctggctgctacggggacaggagcagcctgcccggggtgcgctcctatggaagaagaaacccccaggagctgtatgatgtgtactgctttgcccgggagctgggcggggaggtgttctacgtgggccctgcccggcggctgaccctggccggggcccgggcccagtgccggcggcagggcgccgccctggcctctgtgggccagctgcacctggcctggcatgagggcctggaccagtgtgaccccggctggctggctgatggctctgtgcgctaccccatccagacccccaggagaagatgtggcggccctgcccctggggtgaggacagtgtacagatttgccaacagaacaggcttccccagccctgctgagagatttgatgcctactgcttccgggcccaccaccccaccagccagcacggggacctggagacccccagcagtggagatgaaggagagatcctgtctgctgagggcccccctgtgcgggagctggagcccaccctggaggaggaggaggtggtgaccccagacttccaggagcccctggtgtcctctggagaggaggagaccctcatcctggaggagaagcaggagagccagcagaccctgagccccacccctggggaccccatgctggcctcctggcccactggagaggtgtggctgagcacagtggcccccagccccagcgacatgggcgccggcacagctgccagcagccacacagaggtggcccccacagaccccatgcccaggagaagaggccgcttcaagggcctgaatggccgctacttccagcagcaggagcctgagcccggcctgcagggcggcatggaggccagcgcccagccccccaccagcgaggccgctgtgaaccagatggagccccccctggccatggctgtgacagagatgctgggcagcggccagagccgcagcccctgggccgacctgaccaatgaggtggacatgcctggagctggcagcgctgggggcaagagcagccctgagccctggctgtggccacccaccatggtgcccccatccatcagcggccacagccgggcccctgtgctggagctggagaaggccgagggccccagcgcccggcctgccaccccagacctcttctggagccccctggaggccaccgtgtctgcccccagccctgccccctgggaggccttccctgtggccaccagcccagacctgcccatgatggccatgctgcggggccccaaggagtggatgctgccccaccccacccccatcagcacagaggccaacagagtggaggcccacggggaggccacagccacagccccacccagccctgctgctgagaccaaggtgtacagcctgcccctgagcctgacccccaccggccagggcggggaggccatgcccaccaccccagagagccccagggctgacttccgggagaccggggagaccagccctgcccaggtgaacaaggccgagcacagcagcagcagcccctggcccagcgtgaacagaaatgtggccgtgggctttgtgcccacagaaacagccacagagcccaccggcctgcggggcatccctggcagcgagagcggcgtgtttgacacagctgagagccccaccagcggcctgcaggccaccgtggatgaggtgcaggacccctggcccagcgtgtacagcaagggcctggatgccagcagccccagcgcccccctgggcagccctggggtcttcctggtgcccaaggtgacccccaacctggagccctgggtggccacagatgagggccccaccgtgaaccccatggacagcacagtgaccccagcccccagtgatgccagcggcatctgggagcccggcagccaggtgtttgaggaggccgagagcaccaccctgagcccccaggtggccctggacaccagcatcgtgacccccctgaccaccctggagcagggcgacaaggtgggcgtgcctgccatgagcaccctgggcagcagcagcagccagccccaccctgagcctgaggaccaggtggagacccagggcaccagcggggcctctgtgcccccccaccagagcagccccctgggcaagccagctgtgcccccaggcacccccacagctgcctctgtgggggagagcgcctctgtgagcagcggggagcccaccgtgccctgggaccccagcagcaccctgctgcctgtgaccctgggcattgaagattttgagctggaggtgctggccggcagccctggggtggagagcttctgggaggaggtggccagcggggaggagcccgccctgcccggcacccccatgaatgctggagctgaggaggtgcacagcgacccctgtgagaacaacccctgcctgcatggaggcacctgcaatgccaacggcaccatgtatggctgcagctgtgaccagggctttgctggggagaactgtgaaattgatattgatgactgcctgtgcagcccctgtgaaaatggaggcacctgcattgatgaggtgaatggatttgtgtgcctgtgcctgcccagctatggaggcagcttctgtgagaaggacacagagggctgtgaccggggctggcacaagttccagggccactgctaccgctactttgcccaccggcgggcctgggaggatgctgagaaggactgcagaagaagaagtggccacctgacctctgtgcacagccctgaggagcacagcttcatcaacagctttggacatgagaacacctggattggcctgaatgacagaattgtggagcgggacttccagtggacagacaacacaggcctgcagtttgagaactggagggagaaccagcctgacaacttctttgctggaggagaggactgtgtggtgatggtggcccacgagagcggccgctggaatgatgtgccctgcaactacaacctgccctacgtgtgcaagaagggcaccgtgctgtgtggccccccacctgctgtggagaatgccagcctgattggagccaggaaggccaagtacaacgtgcacgccaccgtgcgctaccagtgcaatgaaggatttgcccagcaccacgtggccaccatccgctgccgcagcaatggcaagtgggaccggccccagatcgtgtgcaccaagcccaggaggagccacaggatgagaagacaccaccaccaccaccagcaccaccaccagcaccaccaccacaagagcaggaaggagaggaggaagcacaagaagcaccccacagaggactgggagaaggatgagggcaacttctgctag

SEQ ID NO: 145917 - DNA, 2319 bp, Artificial Sequence
  derived and/or modified sequence
atgcctggggccggcagcgctgggggcaagagcagccctgagccctggctgtggccacccaccatggtgccccccagcatcagcggccacagccgggcccctgtgctggagctggagaaggccgagggccccagcgcccggcctgccaccccagacctcttctggagccccctggaggccaccgtgtctgcccccagccctgccccctgggaggccttccctgtggccaccagcccagacctgcccatgatggccatgctgcggggccccaaggagtggatgctgccccaccccacccccatcagcacagaggccaacagagtggaggcccatggagaggccacagccacagccccacccagccctgctgctgagaccaaggtgtacagcctgcccctgagcctgacccccaccggccagggcggggaggccatgcccaccaccccagagagccccagggctgacttccgggagactggagagaccagccctgcccaggtgaacaaggccgagcacagcagcagcagcccctggcccagcgtgaacagaaatgtggccgtgggctttgtgcccacagaaacagccacagagcccaccggcctgcggggcatccctggcagcgagagcggcgtgtttgacacagctgagagccccaccagcggcctgcaggccaccgtggatgaggtgcaggacccctggcccagcgtgtacagcaagggcctggatgccagcagccccagcgcccccctgggcagccctggggtcttcctggtgcccaaggtgacccccaacctggagccctgggtggccacagatgagggccccaccgtgaaccccatggacagcacagtgaccccagcccccagtgatgccagcggcatctgggagcccggcagccaggtgtttgaggaggccgagagcaccaccctgagcccccaggtggccctggacaccagcatcgtgacccccctgaccaccctggagcagggcgacaaggtgggcgtgcctgccatgagcaccctgggcagcagcagcagccagccccaccctgagcctgaggaccaggtggagacccagggcaccagcggggcctctgtgcccccccaccagagcagccccctgggcaagccagctgtgcccccaggcacccccacagctgcctctgtgggggagagcgcctctgtgtcctctggagagcccaccgtgccctgggaccccagcagcaccctgctgcctgtgaccctgggcatcgaggactttgagctggaggtgctggccggcagccctggggtggagagcttctgggaggaggtggccagcggggaggagcccgccctgcccggcacccccatgaatgctggagctgaggaggtgcacagcgacccctgtgagaacaacccctgcctgcacggcggcacctgcaatgccaacggcaccatgtatggctgcagctgtgaccagggctttgctggggagaactgtgaaattgatattgatgactgcctgtgcagcccctgtgaaaatggaggcacctgcattgatgaggtgaatggatttgtgtgcctgtgcctgcccagctatggaggcagcttctgtgagaaggacacagagggctgtgaccggggctggcacaagttccagggccactgctaccgctactttgcccacagaagagcctgggaggatgctgagaaggactgcagaagaagaagtggccacctgacctctgtgcacagccctgaggagcacagcttcatcaacagctttggacatgagaacacctggattggcctgaatgaccgcatcgtggagcgggacttccagtggacagacaacacaggcctgcagtttgagaactggagggagaaccagcctgacaacttctttgctggaggagaggactgtgtggtgatggtggcccatgaaagtggccgctggaatgatgtgccctgcaactacaacctgccctacgtgtgcaagaagggcaccgtgctgtgtggccccccacctgctgtggagaatgccagcctcatcggggccaggaaggccaagtacaacgtgcacgccaccgtgcgctaccagtgcaatgaaggatttgcccagcaccacgtggccaccatccgctgccgcagcaatggcaagtgggaccggccccagatcgtgtgcaccaagccccggcgcagccacaggatgaggaggcaccaccaccaccaccagcaccaccaccagcaccaccaccacaagagcaggaaggagaggaggaagcacaagaagcaccccacagaggactgggagaaggatgagggcaacttctgctag

SEQ ID NO: 145918 - DNA, 4008 bp, Artificial Sequence
  derived and/or modified sequence
cggcccccaagagatgccagcgagctgggcgcccggagcaggatgggcgccccctttgtgtgggccctgggcctgctgatgctgcagatgctgctgtttgtggccggggagcagggcacccaggacatcacagatgccagcgagcggggcctgcacatgcagaagctgggcagcggctctgtgcaggccgccctggccgagctggtggccctgccctgcctcttcaccctgcagccccggcccagcgctgccagagatgccccccgcatcaagtggaccaaggtgaggacagccagcggccagaggcaggacctgcccatcctggtggccaaggacaacgtggtgcgggtggccaagtcctggcagggccgggtgtccctgcccagctaccccaggagaagagccaatgccaccctgctgctgggccccctgcgggccagtgacagcggcctgtaccgctgccaggtggtgcggggcattgaagatgagcaggacctggtgcccctggaggtgactggagtggtgttccactaccgcagcgcccgggacagatatgccctgacctttgctgaggcccaggaggcctgccgcctgagcagcgccatcatcgccgcccccaggcacctgcaggccgcctttgaagatggctttgacaactgtgatgctggctggctgagtgacagaacagtgcgctaccccatcacccagagcaggcctggctgctacggggacaggagcagcctgcccggggtgcgctcctatggaagaagaaacccccaggagctgtatgatgtgtactgctttgcccgggagctgggcggggaggtgttctacgtgggccctgcccggcggctgaccctggccggggcccgggcccagtgccggcggcagggcgccgccctggcctctgtgggccagctgcacctggcctggcatgagggcctggaccagtgtgaccccggctggctggctgatggctctgtgcgctaccccatccagacccccaggagaagatgtggcggccctgcccctggggtgaggacagtgtacagatttgccaacagaacaggcttccccagccctgctgagagatttgatgcctactgcttccgggcccaccaccccaccagccagcacggggacctggagacccccagcagtggagatgaaggagagatcctgtctgctgagggcccccctgtgcgggagctggagcccaccctggaggaggaggaggtggtgaccccagacttccaggagcccctggtgtcctctggagaggaggagaccctcatcctggaggagaagcaggagagccagcagaccctgagccccacccctggggaccccatgctggcctcctggcccactggagaggtgtggctgagcacagtggcccccagccccagcgacatgggcgccggcacagctgccagcagccacacagaggtggcccccacagaccccatgcccaggagaagaggccgcttcaagggcctgaatggccgctacttccagcagcaggagcctgagcccggcctgcagggcggcatggaggccagcgcccagccccccaccagcgaggccgctgtgaaccagatggagccccccctggccatggctgtgacagagatgctgggcagcggccagagccgcagcccctgggccgacctgaccaatgaggtggacatgcctggagctggcagcgctgggggcaagagcagccctgagccctggctgtggccacccaccatggtgcccccatccatcagcggccacagccgggcccctgtgctggagctggagaaggccgagggccccagcgcccggcctgccaccccagacctcttctggagccccctggaggccaccgtgtctgcccccagccctgccccctgggaggccttccctgtggccaccagcccagacctgcccatgatggccatgctgcggggccccaaggagtggatgctgccccaccccacccccatcagcacagaggccaacagagtggaggcccacggggaggccacagccacagccccacccagccctgctgctgagaccaaggtgtacagcctgcccctgagcctgacccccaccggccagggcggggaggccatgcccaccaccccagagagccccagggctgacttccgggagaccggggagaccagccctgcccaggtgaacaaggccgagcacagcagcagcagcccctggcccagcgtgaacagaaatgtggccgtgggctttgtgcccacagaaacagccacagagcccaccggcctgcggggcatccctggcagcgagagcggcgtgtttgacacagctgagagccccaccagcggcctgcaggccaccgtggatgaggtgcaggacccctggcccagcgtgtacagcaagggcctggatgccagcagccccagcgcccccctgggcagccctggggtcttcctggtgcccaaggtgacccccaacctggagccctgggtggccacagatgagggccccaccgtgaaccccatggacagcacagtgaccccagcccccagtgatgccagcggcatctgggagcccggcagccaggtgtttgaggaggccgagagcaccaccctgagcccccaggtggccctggacaccagcatcgtgacccccctgaccaccctggagcagggcgacaaggtgggcgtgcctgccatgagcaccctgggcagcagcagcagccagccccaccctgagcctgaggaccaggtggagacccagggcaccagcggggcctctgtgcccccccaccagagcagccccctgggcaagccagctgtgcccccaggcacccccacagctgcctctgtgggggagagcgcctctgtgagcagcggggagcccaccgtgccctgggaccccagcagcaccctgctgcctgtgaccctgggcattgaagattttgagctggaggtgctggccggcagccctggggtggagagcttctgggaggaggtggccagcggggaggagcccgccctgcccggcacccccatgaatgctggagctgaggaggtgcacagcgacccctgtgagaacaacccctgcctgcatggaggcacctgcaatgccaacggcaccatgtatggctgcagctgtgaccagggctttgctggggagaactgtgaaattgatattgatgactgcctgtgcagcccctgtgaaaatggaggcacctgcattgatgaggtgaatggatttgtgtgcctgtgcctgcccagctatggaggcagcttctgtgagaaggacacagagggctgtgaccggggctggcacaagttccagggccactgctaccgctactttgcccaccggcgggcctgggaggatgctgagaaggactgcagaagaagaagtggccacctgacctctgtgcacagccctgaggagcacagcttcatcaacagctttggacatgagaacacctggattggcctgaatgacagaattgtggagcgggacttccagtggacagacaacacaggcctgcagtttgagaactggagggagaaccagcctgacaacttctttgctggaggagaggactgtgtggtgatggtggcccacgagagcggccgctggaatgatgtgccctgcaactacaacctgccctacgtgtgcaagaagggcaccgtgctgtgtggccccccacctgctgtggagaatgccagcctgattggagccaggaaggccaagtacaacgtgcacgccaccgtgcgctaccagtgcaatgaaggatttgcccagcaccacgtggccaccatccgctgccgcagcaatggcaagtgggaccggccccagatcgtgtgcaccaagcccaggaggagccacaggatgagaagacaccaccaccaccaccagcaccaccaccagcaccaccaccacaagagcaggaaggagaggaggaagcacaagaagcaccccacagaggactgggagaaggatgagggcaacttctgctag

SEQ ID NO: 145919 - DNA, 3966 bp, Artificial Sequence
  derived and/or modified sequence
atgggcgcccccttcgtgtgggccctgggcctgctgatgctgcagatgctgttgtttgtggctggcgaacaggggacccaggacatcaccgacgcctcggagcgaggcttgcatatgcagaaattaggatcagggtccgtgcaggccgcccttgctgaattggttgccttgccgtgtctgtttacactccagcctcgcccaagtgcagcacgcgacgcacctagaatcaagtggacaaaagttcgtactgcttccggccagaggcaggatctgccaattctggtggcgaaggacaacgtggtgcgcgtggctaaaagctggcaggggagagtttcgctgccgtcctatcccaggcggagggctaacgctacccttctcttgggccccctgagggcctcagactctggcctgtatcgttgccaagttgtacggggaatcgaagatgagcaagatctggtcccactggaggttacaggcgttgtgttccactatcgatccgctcgcgaccgctacgctttgacgtttgccgaagctcaggaggcatgcagactctcctccgctattatagcggcacccagacacttacaggctgcctttgaggatgggtttgataattgcgacgctggctggctgtcagacagaacggtgcggtaccctataactcaatccaggcctggctgctatggcgacagatcgtcactgcccggagtaagatcctacgggagaaggaaccctcaggagctttacgatgtttattgcttcgctagagaactgggtggggaggtgttttatgtaggccctgctcgaaggctcaccttggcgggcgcccgggctcagtgcaggcgccaaggtgctgcccttgcttccgtgggacagctgcatcttgcatggcatgaaggcctggatcagtgcgatcctggctggctggccgacggctcagtgcgctaccctatccagacacctagaagacgttgcggaggccccgcaccaggcgtacgaactgtctataggtttgctaatcgtacaggatttccctccccagctgagcgatttgatgcctactgctttagagctcatcaccctacatcccaacatggcgacctggagaccccaagcagcggcgatgagggcgagattctgtcggctgaaggaccccccgtgcgggaacttgaaccaaccctcgaagaggaagaggtagttaccccagacttccaagagccacttgtatctagcggagaggaagaaactctcatcttggaggagaaacaagagagccagcagacattgtcaccaacacctggagaccccatgctggcttcctggccaactggagaagtgtggctcagcactgtcgcaccttctccatctgacatgggggctggaactgctgcctctagccacacagaagtagctcctacggatcctatgcctcgacgccggggacgcttcaaagggctgaatggtaggtatttccaacagcaggaacccgaaccaggactccaaggaggaatggaggcctccgcacagccccccaccagcgaagccgctgtgaaccagatggagcctcctttagcaatggctgttactgaaatgttagggtcgggacagagccggtcgccttgggccgacctgaccaatgaggtcgatatgcccggagcaggcagtgccggaggcaagtcttcccccgaaccatggctctggcctcccaccatggtgccgccatcaatctctggccattcaagagcgccggttttggaactagagaaagctgagggacctagtgcacgcccggctactcctgatctcttttggtctcccctggaggcaaccgtttctgcccctagtcctgcgccatgggaggccttcccagtggccacttcgccagatctccctatgatggctatgctcaggggacccaaggaatggatgctgcctcatcctacacctatatctaccgaggcaaaccgggttgaggcccacggggaagccactgcaacagctccacccagccctgcggccgaaaccaaggtatacagtctccctctgtcactgaccccgaccggacaagggggagaggcgatgcctacgactcctgagtcacccagggcggatttcagagagactggtgaaacgagccccgctcaagtgaataaggctgaacattcttccagtagtccttggccttccgtgaatcgaaacgtggctgtaggatttgttcccactgagaccgccacagagccaacggggctgcgcggcatacccggctcagaaagtggagttttcgacactgctgaatcccctacctccggtctgcaggcgacagtggacgaggtccaggatccctggccctccgtgtactctaaggggctggatgcaagcagcccatccgctcctctggggtcccctggggttttcctcgtacccaaggtcactccgaacctggaaccatgggttgcaactgacgaaggacccaccgtaaacccgatggactctacggtgacccccgcaccttcagacgcgtcaggcatttgggaaccagggagccaggtttttgaagaggcagaatcaaccactctcagcccacaggtagctcttgatacaagtatcgtgactcccttgacaaccctcgagcaaggagataaggtgggagtacccgccatgagcaccctcgggtcgtccagttcacagccccatccagaacctgaagaccaggtggagacccagggcaccagcggcgcctccgtgcccccccaccagtcaagccctctcggaaaacccgccgttccaccaggtacaccaactgccgcatcagtgggagaaagcgcatcagtgtccagcggcgagcctacagtcccctgggacccaagctccacactgctacccgttaccctcgggatcgaggacttcgagttagaggtgcttgccgggagccctggcgtggagtctttttgggaagaagtggccagcggcgaggaacccgccctgccaggcaccccgatgaatgcgggggcggaggaagtgcattccgacccttgcgagaacaatccatgcctgcacggggggacatgcaacgcaaacgggactatgtacggctgtagctgtgaccagggttttgctggtgagaattgcgagatagacatagatgactgcctctgctccccgtgcgagaacggaggtacctgtattgatgaggtgaacggcttcgtatgtttatgcctgcctagttacggtggaagtttctgcgagaaggatacggaaggttgcgaccgcggatggcacaaattccaaggccattgctaccgctacttcgcgcaccgacgcgcttgggaagatgctgagaaggattgccgccgacgctccgggcacttaacttctgttcattcccccgaggagcacagctttattaatagtttcggccacgagaatacctggattggcctcaatgatagaatcgtcgaacgggattttcagtggaccgacaacactggcctgcaatttgagaactggagagagaaccagcccgacaacttcttcgccgggggcgaagactgcgttgtcatggtggctcacgagagtggcaggtggaacgacgtgccctgcaattataacctaccctatgtgtgtaaaaagggcaccgtcctttgtggacccccacccgctgttgagaatgcgagcctgataggagcaagaaaagctaagtataatgtccacgctacagtccgctaccagtgcaatgaagggtttgcccagcatcacgtcgcgacaatccgatgcagatccaatggcaagtgggatcggccccaaatcgtttgcactaagccacggcggagtcatcgaatgagaagacaccaccaccaccatcagcaccatcatcagcaccaccatcataaaagtcgaaaggaacgcagaaaacacaagaagcaccccactgaagattgggagaaggatgagggcaacttctgctag

SEQ ID NO: 145920 - DNA, 2319 bp, Artificial Sequence
  derived and/or modified sequence
atgcccggcgccggcagcgccggcggcaagagcagccccgagccctggctctggccacccaccatggtccctccatctatctctgggcattcgcgggctcctgtgctcgaattggagaaggctgagggtccttcggctcgtccggccacccctgatttgttctggtcacctttggaggccacagtgtccgccccatcccccgccccctgggaggcattcccggtggcgacttctccggacttgccaatgatggccatgctgcgcggacctaaagaatggatgttgccccacccaacacccatatctactgaggccaatagggttgaggcgcatggcgaggcgactgctactgcccctccgtcccctgctgcggaaacaaaagtctactccttaccactgtcattaacacctactggtcaaggaggagaagctatgcctaccactccagaatccccccgcgccgacttcagggagacgggtgagacctctccagctcaggtgaataaggccgagcacagctccagcagtccttggcccagtgtgaatcggaacgttgccgtgggattcgttccaaccgaaacggcgactgagccaaccggccttcgtggaatccctggttcagagtcaggagtgtttgacaccgctgaatcccctacctctgggttgcaggccaccgtcgatgaagttcaggacccttggcctagcgtgtacagtaagggactggacgcctcaagtcctagcgccccactcggttcacctggcgtgttccttgtgcccaaagtgacgcctaacttggaaccttgggtcgccacggacgaggggccaaccgtcaaccccatggactcaacagtcacacccgcgcctagtgacgcgagcggaatctgggagcctggcagccaggtgtttgaggaggcggaatccacaacgcttagcccccaggtagctcttgatacaagcattgtgacaccccttactactctagagcaaggtgacaaagttggagtcccagcgatgagtacccttggctccagtagctctcagccacaccctgagccggaagaccaggtggagactcaggggaccagtggggcctccgtacccccgcaccagtcatcacctctcggaaaaccagccgtgcctcctggaacccccactgcggccagcgtcggagaatccgccagtgtatcaagcggggagccaacggtgccctgggacccatcttcgacactattgcctgtgactctgggtattgaagacttcgagctggaagtgctggcagggagccctggcgtggaatccttctgggaggaggtggcgtccggagaagagccagccttaccggggactcccatgaatgccggagccgaggaggtccattctgacccatgtgagaataatccttgtctgcatggcgggacatgtaacgccaatgggacgatgtacggctgcagttgcgatcagggctttgccggcgagaactgtgagattgacatagacgattgcctttgcagcccctgcgaaaacggcggcacttgcatagacgaagtcaacggtttcgtatgcttgtgcctgcccagttacggagggtcattttgcgaaaaagacaccgagggctgcgatcgggggtggcacaagttccagggacactgttaccggtattttgcccacagaagagcttgggaggatgcagaaaaggattgcagaagaagaagcggccatcttacatccgtccactcccccgaagaacattccttcattaacagctttggacacgaaaacacatggattggccttaatgacagaattgtagagcgcgactttcagtggaccgacaatacgggcctgcagttcgagaattggagggagaatcagccagacaacttcttcgctggtggcgaggattgcgtggttatggtagcccatgagtcaggtcgctggaacgatgtgccctgtaactataatctaccctacgtctgcaaaaagggcacagtcctctgtgggccgccccccgccgtggagaacgccagcctgattggtgctaggaaggcaaaatataacgtgcacgccactgttcgttatcagtgcaatgaagggttcgcccagcatcatgtggcaaccattcggtgcagatctaacggcaaatgggatcgcccgcagattgtgtgtaccaagcctcggcgctcccatagaatgagaaggcatcaccatcatcaccagcaccaccaccagcaccatcatcacaaatctcgcaaggagagaagaaagcacaaaaagcacccgaccgaagactgggagaaggatgagggcaacttttgttag

SEQ ID NO: 145921 - DNA, 4008 bp, Artificial Sequence
  derived and/or modified sequence
cggcccccccgggacgccagcgagctgggcgcccggagccggatgggtgcccctttcgtgtgggcattgggcctgctcatgctccagatgctattatttgtggccggagaacaggggacccaggatattacagacgcctccgaacggggccttcacatgcagaaactggggagtggctctgttcaggcggccctggctgagctggttgccttgccgtgtctgttcacccttcagcccagaccatctgctgctcgggatgcaccacggattaagtggactaaggtgcggactgcctccggacagaggcaggacctgcctatcctggtggccaaagataatgtcgtacgggtggctaagtcctggcaggggagggtatctctaccttcttacccccgaaggcgagccaacgctactctgctgctggggccactccgcgccagcgacagtggtctttatcgctgccaggttgtacgagggatcgaggacgaacaggaccttgtgcccttagaagtgaccggcgtcgtgttccattaccggtcggcccgcgatcgctacgccttgacttttgctgaggcccaagaggcttgtaggcttagttccgcaatcatcgcagcgcctcggcacctgcaagccgccttcgaggatggattcgataattgcgacgccgggtggctttcagaccgtaccgtgaggtaccctataacacagagtcgccccggctgttatggtgatcgtagctcgttgccgggggttagatcttacgggcgaagaaacccacaggagctttacgacgtgtactgttttgcccgggaactgggcggcgaggttttttacgtcgggccggcaagaaggttaactctagccggtgcaagagcccagtgtcggcggcagggcgccgctctagcttcagtgggtcagctccaccttgcctggcacgagggcttggaccagtgcgaccctggctggctcgctgatggctctgtaaggtacccaattcagaccccgcgccggagatgcgggggccctgcccccggtgtgagaaccgtttatcgatttgcaaacaggacaggatttccgtctcctgccgagagatttgacgcatactgctttcgggcacaccatcctaccagtcagcacggagatctagagacgcctagctcaggggatgagggagagatactgtctgcagaaggacctcctgtgcgcgaactcgaacccaccctggaggaagaagaggtggtcacccccgactttcaggagcctttagtaagctcaggggaggaggaaacattgatcttggaagagaaacaggaaagccagcagacattgtcacccacaccgggagatcccatgctcgctagttggcccacaggcgaggtgtggctgtctaccgtggcaccgagtccgagtgacatgggggctggtaccgcagcaagttctcacactgaggtggcgcccaccgatcctatgccaaggagacggggcaggttcaaaggcctaaacgggcgctattttcagcaacaagagccggaacctggcctccagggaggaatggaagcaagcgcccaaccgcctacgtcagaggccgcagtcaatcagatggagccaccactggccatggccgtgactgagatgctcggcagcggccaatccaggtccccttgggcagacctgacaaatgaagtcgatatgcctggggcaggctccgcaggaggtaaaagtagtcctgaaccttggttgtggccacctaccatggtccctccgagcatttcaggtcattcacgagcacctgttctggagctcgagaaagccgaggggccgagtgcacgtcccgcaactccagatttattctggagccctcttgaggcaaccgtgtccgcgccgagccccgctccctgggaggcattccccgttgctacgtcccccgacctcccaatgatggccatgctgagaggtcctaaggaatggatgctgccccatcctacccccatttcaactgaggcaaatcgagtagaagctcatggagaggccaccgcaacggctcccccatcccccgccgcagagacaaaggtttattccctgcctcttagtctcacccctaccggccagggaggtgaggcgatgccaacgactccagaatctccgcgcgcagattttagagaaactggggagacgtcaccagctcaggtgaataaggccgaacatagcagctcctctccatggccatccgtaaataggaacgtggcagtgggattcgtcccaaccgagacggcaacagaaccgacaggcctcagaggtatccccggaagcgaaagtggggtgttcgataccgcagagtctccaacatccggtctccaggctactgtcgatgaagtccaggacccctggcccagtgtctactcgaaggggctggatgcatctagtcctagcgccccactagggtccccgggcgtcttcctggtcccaaaagttacacctaacctcgaaccttgggttgccacggacgaaggaccaactgtgaaccccatggattctacagtgacccctgccccaagcgatgctagcgggatctgggagcccgggtctcaagtattcgaggaagcagaatctacaacattgtctccccaggtggctctggacacctcgattgtgaccccactgacaaccctagagcagggtgacaaggtgggggttcccgccatgagcacactcgggagctcctccagccagcctcatcctgagcccgaagaccaggtggaaacccaggggactagcggcgccagcgtgcctccgcatcagtcgtctcccctggggaagccagccgtaccccccggaacgccaacagctgcttccgtaggcgagtctgctagtgtcagctctggtgaacctactgtcccatgggacccgtcaagcactctgttgccggtgaccttggggattgaagatttcgagctagaggtgctggcaggatcccccggggtagaaagcttttgggaggaggtggcctccggggaagagcctgcgctgccaggcacacccatgaatgcaggagcagaggaagtgcactctgatccgtgcgagaacaatccctgtcttcatggcggcacttgcaacgcaaatgggacaatgtatgggtgctcttgcgatcaaggctttgcgggggaaaactgcgagattgatatcgacgactgcctctgcagtccttgtgagaacgggggtacttgcatcgacgaggtgaatggtttcgtttgcctttgccttccaagctatggcgggagcttttgtgagaaagataccgagggctgtgacaggggatggcataagtttcagggtcattgttaccgatattttgcccacaggagagcctgggaagacgctgagaaggattgcaggaggcgctcagggcacctcacctccgtacacagcccagaagagcactcattcatcaactcttttggccatgagaacacatggatcgggctgaacgatagaatcgttgagagagattttcaatggacagacaatactggcctccagtttgagaattggcgggaaaaccaacccgataatttcttcgcaggtggagaggactgcgttgtgatggtagcacacgagtccggaaggtggaacgatgtgccatgcaactataacttgccttatgtatgtaagaaaggcaccgtgctgtgcggcccgcctcccgctgtcgagaacgcgagtctcattggggctagaaaagctaaatacaatgtgcatgctacagtgaggtatcaatgcaatgagggatttgctcaacaccacgtcgctacaatacgctgtaggagtaacggcaaatgggacagacctcagatcgtttgcaccaaacctagaagatcgcacaggatgaggcgccatcatcaccatcaccaacatcatcaccaacatcaccatcacaagtctagaaaggaacggcggaagcataagaaacacccaactgaggactgggaaaaagacgaaggcaacttctgctag

SEQ ID NO: 145922 - DNA, 6406 bp, Artificial Sequence
  derived and/or modified sequence
ggggctggacccggcgcggagctggctgagtcggagcgcagcgtcctttgtgcccggcggccgccccgggatgcgtccgagctaggagccagatccaggatgggggccccgtttgtctgggccttgggccttttgatgctgcagatgctgctctttgtggctggggaacagggcacacaggatatcaccgatgccagcgaaagggggctccacatgcagaagctggggtctgggtcagtgcaggctgcgctggcggagctggtggccctgccctgtctctttaccctgcagccacggccaagcgcagcccgagatgcccctcggataaagtggaccaaggtgcggactgcgtcgggccagcgacaggacttgcccatcctggtggccaaggacaatgtcgtgagggtggccaaaagctggcagggacgagtgtcactgccttcctacccccggcgccgagccaacgccacgctacttctggggccactgagggccagtgactctgggctgtaccgctgccaggtggtgaggggcatcgaggatgagcaggacctggtgcccttggaggtgacaggtgttgtgttccactaccgatcagcccgggaccgctatgcactgaccttcgctgaggcccaggaggcctgccgtctcagctcagccatcattgcagcccctcggcatctacaggctgcctttgaggatggctttgacaactgtgatgctggctggctctctgaccgcactgttcggtatcctatcacccagtcccgtcctggttgctatggcgaccgtagcagccttccaggggttcggagctatgggaggcgcaacccacaggaactctacgatgtgtattgctttgcccgggagctggggggcgaggtcttctacgtgggcccggcccgccgcctgacactggccggcgcgcgtgcacagtgccgccgccagggtgccgcgctggcctcggtgggacagctgcacctggcctggcatgagggcctggaccagtgcgacccgggctggctggccgacggcagcgtgcgctacccgatccagacgccgcgccggcgctgcgggggcccagccccgggcgtgcgcaccgtctaccgcttcgctaaccggaccggcttcccctcacccgccgagcgcttcgacgcctactgcttccgagctcatcaccccacgtcacaacatggagacctagagaccccatcctctggggatgagggggagattctgtcagcagaggggcccccagttagagaactggagcccaccctggaggaggaagaggtggtcacccctgacttccaggagcctctggtgtccagtggggaagaagaaaccctgattttggaggagaagcaggagtctcaacagaccctcagccctacccctggggaccccatgctggcctcatggcccactggggaagtgtggctaagcacggtggcccccagccctagcgacatgggggcaggcactgcagcaagttcacacacggaggtggccccaactgaccctatgcctaggagaagggggcgcttcaaagggttgaatgggcgctacttccagcagcaggaaccggagccggggctgcaaggggggatggaggccagcgcccagccccccacctcagaggctgcagtgaaccaaatggagcctccgttggccatggcagtcacagagatgttgggcagtggccagagccggagcccctgggctgatctgaccaatgaggtggatatgcctggagctggttctgctggtggcaagagctccccagagccctggctgtggccccctaccatggtcccacccagcatctcaggccacagcagggcccctgtcctggagctagagaaagccgagggccccagtgccaggccagccaccccagacctgttttggtcccccttggaggccactgtctcagctcccagccctgccccctgggaggcattccctgtggccacctccccagatctccctatgatggccatgctgcgtggtcccaaagagtggatgctaccacaccccacccccatctccaccgaggccaatagagttgaggcacatggtgaggccaccgccacggctccaccctcccctgctgcagagaccaaggtgtattccctgcctctctctttgaccccaacaggacagggtggagaggccatgcccacaacacctgagtcccccagggcagacttcagagaaactggggagaccagccctgctcaggtcaacaaagctgagcactccagctccagcccatggccttctgtaaacaggaatgtggctgtaggttttgtccccactgagactgccactgagccaacgggcctcaggggtatcccggggtctgagtctggggtcttcgacacagcagaaagccccacttctggcttgcaggccactgtagatgaggtgcaggacccctggccctcagtgtacagcaaagggctggatgcaagttccccatctgcccccctggggagccctggagtcttcttggtacccaaagtcaccccaaatttggagccttgggttgctacagatgaaggacccactgtgaatcccatggattccacagtcacgccggcccccagtgatgctagtggaatttgggaacctggatcccaggtgtttgaagaagccgaaagcaccaccttgagccctcaggtggccctggatacaagcattgtgacgcccctcacgaccctggagcagggggacaaggttggagttccagccatgtctacactgggctcctcaagctcccaaccccacccagagccagaggatcaggtggagacccagggaacatcaggagcttcagtgcctccgcatcagagcagtcccctagggaaaccggctgttcctcctgggacaccgactgcagccagtgtgggcgagtctgcctcagtttcctcaggggagcctacggtaccgtgggacccctccagcaccctgctgcctgtcaccctgggcatagaggacttcgaactggaggtcctggcagggagcccgggtgtagagagcttctgggaggaggtggcaagtggagaggagccagccctgccagggacccctatgaatgcaggtgcggaggaggtgcactcagatccctgtgagaacaacccttgtcttcatggagggacatgtaatgccaatggcaccatgtatggctgtagctgtgatcagggcttcgccggggagaactgtgagattgacattgatgactgcctctgcagcccctgtgagaatggaggcacctgtattgatgaggtcaatggctttgtctgcctttgcctccccagctatgggggcagcttttgtgagaaagacaccgagggctgtgaccgcggctggcataagttccagggccactgttaccgctattttgcccaccggagggcatgggaagatgccgagaaggactgccgccgccgctccggccacctgaccagcgtccactcaccggaggaacacagcttcattaatagctttgggcatgaaaacacgtggatcggcctgaacgacaggatcgtggagagagatttccagtggacggacaacaccgggctgcaatttgagaactggcgagagaaccagccggacaatttcttcgcgggtggcgaggactgtgtggtgatggtggcgcatgaaagcgggcgctggaacgatgtcccctgcaactacaacctaccctatgtctgcaagaagggcacagtgctctgtggtccccctccggcagtggagaatgcctcactcatcggtgcccgcaaggccaagtacaatgtccatgccactgtaaggtaccagtgcaatgaaggatttgcccagcaccatgtggccaccattcgatgccggagcaatggcaagtgggacaggccccaaattgtctgcaccaaacccagacgttcacatcggatgcggcgacaccaccaccaccaccaacaccaccaccagcatcaccaccacaaatcccgcaaggagcgcagaaaacacaagaaacacccaacggaggactgggagaaggacgaagggaatttctgctgaagaaccagaaaaaagaaagcacaacacctttcccatgcctcctctggagccttcgcctggggagacagaacccagagagaaacaagagagtccagaagtccctgaaccccaaaccacatcccccacacacataatcctttgtacaaagctcctcttttccctttttttacatacacaagatcctcttggcaggtggagccaggtgtctgaaaagttcattctcgtctggctgaactctgggagtgtgtcccagctgagggaagcacaagtagcaaagctcattggtctggtctcttgtttgccaggctgattgaagcaggccttgatgagggtgcatgagtgtatgtttgcattcacatgaaggaattgcttttcacaccagaaattcagacttagtcaatgttggctgaattcctaaatccaggaagaagcctggacgtagggtcattagctttgggaatagaaggctacacagaagcacactgtttttgaacttgacaacagctctccctttaccctggacttcagcccaagttccgtctttggtcttggtggataaacacacagtgtggagatcccacgtactgcattttagggatgtttttaggacaacctccctccatgccttcagagttaggagtgagaatgatcaaagcaatatgtaggtgatggagggagagtgtattgctaacccttccaggtctagtccagcgctgagatttggtggttctgcatgtgtgatgaatctctttcacacaaatagacgagaggatatttagggctagatgagcccagatttcttccccctccatctctcagggagacaaagaacctccttcctggaccaaggaggtgctgccaagttttctagcccagtgcacatacccagtccttaagcagacattggtagtgcccctgccctgggtcccactcctgccccaccccacccttgtccctggccattgcctggtggtctagaaacacttaaaacttgaagtagtgacacctacctgcggtcatattgtagagagatgctcagtgttaaaactgaaacacacaaacacacacacacacacatttttctcttgtagattttaattttttaagtgggaaagaactcaccttgccttcctcccccaaatgtgcaacctgtaaaaggtctctccacaccaggggccaggatccagttccctcatctctggcaggaaagatccacagcttttcctccatgtctgttactcactttcagcagtccgggtaaaatctgtggatcagggttaaaaaagcaccgtggagaatggccctcttcaggaaagaaaaataagcaaatgaatggtccacctaggggttcagtaaagaaagaaatgtgttaactgagcctgaatcccttctgggaagtaataatgaccattgacaactaagaagtagacaccatgctaaagacttacatacaatctccttgaatcttctcaatagcccattgacttagaaactgttactttcccattttacacacagtgaaactgaggctcagatataaaggaaaggtactggcttgaagtcacaaccacgacaggagtaaggatttggaataaggatttggtcctgttttctggaccaaatccttactctggctctgcttacactttctctccatcaccaaatccttactccaaatccagaagtcagagccaactcccatcttggttctgacccaaatcctgctctggactctggagaggagattgaaatataattgcaccctcatacacatttaggaaatggttaagaagtgtaaactgaacccttatccttgtcttcaatcttcctccctgtagacatctatcttattatggttattattcagaaaacccagggatacaggtttgtcttcttactttgataactcttcttagtttaaaataataataataacacatctttggtcatctatgtcacacaaaaattttcctttgtttgcggggggctggggatgcagtgttttttggggggtcttggtttatgctccctgcccttgagcccctcagccgtttgccctgcccccacctcggctccatggtgggagggggctctggtcttttctaaagtgggcggtttgtcttttgatctttcccttttggatgtgcgtgtgtgtctgcgtgtgccatgtgcgtggcacgcatatgagtgtgtgtgcgtgtgaacggctttgggtcctgctggttttgctgtgagctgcagtgttctgtgggtctgtggtatctgacactgtggacattaatgtacttcttggacattttaataaattttttaacagttcaacctgcccgtcaccacctga

SEQ ID NO: 145923 - DNA, 2580 bp, Artificial Sequence
  derived and/or modified sequence
gggcagtggccagagccggagcccctgggctgatctgaccaatgaggtggatatgcctggagctggttctgctggtggcaagagctccccagagccctggctgtggccccctaccatggtcccacccagcatctcaggccacagcagggcccctgtcctggagctagagaaagccgagggccccagtgccaggccagccaccccagacctgttttggtcccccttggaggccactgtctcagctcccagccctgccccctgggaggcattccctgtggccacctccccagatctccctatgatggccatgctgcgtggtcccaaagagtggatgctaccacaccccacccccatctccaccgaggccaatagagttgaggcacatggtgaggccaccgccacggctccaccctcccctgctgcagagaccaaggtgtattccctgcctctctctttgaccccaacaggacagggtggagaggccatgcccacaacacctgagtcccccagggcagacttcagagaaactggggagaccagccctgctcaggtcaacaaagctgagcactccagctccagcccatggccttctgtaaacaggaatgtggctgtaggttttgtccccactgagactgccactgagccaacgggcctcaggggtatcccggggtctgagtctggggtcttcgacacagcagaaagccccacttctggcttgcaggccactgtagatgaggtgcaggacccctggccctcagtgtacagcaaagggctggatgcaagttccccatctgcccccctggggagccctggagtcttcttggtacccaaagtcaccccaaatttggagccttgggttgctacagatgaaggacccactgtgaatcccatggattccacagtcacgccggcccccagtgatgctagtggaatttgggaacctggatcccaggtgtttgaagaagccgaaagcaccaccttgagccctcaggtggccctggatacaagcattgtgacgcccctcacgaccctggagcagggggacaaggttggagttccagccatgtctacactgggctcctcaagctcccaaccccacccagagccagaggatcaggtggagacccagggaacatcaggagcttcagtgcctccgcatcagagcagtcccctagggaaaccggctgttcctcctgggacaccgactgcagccagtgtgggcgagtctgcctcagtttcctcaggggagcctacggtaccgtgggacccctccagcaccctgctgcctgtcaccctgggcatagaggacttcgaactggaggtcctggcagggagcccgggtgtagagagcttctgggaggaggtggcaagtggagaggagccagccctgccagggacccctatgaatgcaggtgcggaggaggtgcactcagatccctgtgagaacaacccttgtcttcatggagggacatgtaatgccaatggcaccatgtatggctgtagctgtgatcagggcttcgccggggagaactgtgagattgacattgatgactgcctctgcagcccctgtgagaatggaggcacctgtattgatgaggtcaatggctttgtctgcctttgcctccccagctatgggggcagcttttgtgagaaagacaccgagggctgtgaccgcggctggcataagttccagggccactgttaccgctattttgcccaccggagggcatgggaagatgccgagaaggactgccgccgccgctccggccacctgaccagcgtccactcaccggaggaacacagcttcattaatagctttgggcatgaaaacacgtggatcggcctgaacgacaggatcgtggagagagatttccagtggacggacaacaccgggctgcaatttgagaactggcgagagaaccagccggacaatttcttcgcgggtggcgaggactgtgtggtgatggtggcgcatgaaagcgggcgctggaacgatgtcccctgcaactacaacctaccctatgtctgcaagaagggcacagtgctctgtggtccccctccggcagtggagaatgcctcactcatcggtgcccgcaaggccaagtacaatgtccatgccactgtaaggtaccagtgcaatgaaggatttgcccagcaccatgtggccaccattcgatgccggagcaatggcaagtgggacaggccccaaattgtctgcaccaaacccagacgttcacatcggatgcggcgacaccaccaccaccaccaacaccaccaccagcatcaccaccacaaatcccgcaaggagcgcagaaaacacaagaaacacccaacggaggactgggagaaggacgaagggaatttctgctgaagaaccagaaaaaagaaagcacaacacctttcccatgcctcctctggagccttcgcctggggagacagaacccagagagaaacaagagagtccagaagtccctgaaccccaaaccacatcccccacacacaaaaattttcctttgtttgcggggggctggggatgcagtgttttttggggggtcttggtttatgctccctgcccttgag

SEQ ID NO: 145924 - DNA, 3966 bp, Artificial Sequence
  derived and/or modified sequence
atgggtgcccctttcgtgtgggccctgggtctactgatgctgcagatgttactgtttgtagccggtgagcaaggcacacaggatatcaccgacgcttccgaacggggactccacatgcagaagttgggttccggttcggtgcaggcagctttggccgaactagtagctctcccttgtctgttcacactgcagccaagacccagtgccgcacgggatgcccctcgcatcaaatggaccaaggttcgcacggcgtcaggtcagcggcaagatttaccaatcttggttgccaaagacaatgtggtgagggtggccaagagctggcaagggcgagtgtctctgccttcctatccacgtcgtagagccaatgcaaccctgttgttggggcctctgcgggctagtgattctggcctatatagatgccaagtagtccggggtattgaagatgagcaagatctggtgccactggaggtgaccggggtcgtctttcattacaggtccgcacgagaccggtatgcacttacctttgccgaagcgcaggaagcctgccgcctaagtagcgcgattattgccgcacccagacatcttcaagccgcattcgaggatgggtttgacaactgcgacgctggatggctcagcgatcggactgttaggtaccccattacccagtccagacctgggtgctacggcgaccgatcctcactccctggagtccgatcatacggtcgccgaaatccccaggagctgtatgatgtctactgcttcgccagagagctcggtggagaggttttttatgtggggccagccaggagattgacactggccggtgcccgagcccagtgtaggaggcagggcgctgcactggcctctgtgggccaactgcacctggcctggcatgaaggtctcgaccagtgtgatccaggatggctggcagacgggagcgtgcggtatccaattcagaccccccgtcgacgctgtggaggccctgctcccggtgtgcgcacagtgtataggttcgcgaataggacgggattcccttcccctgctgagaggttcgacgcctactgctttagagctcaccacccaacatcccagcacggtgacctcgaaactccgagctctggagacgaaggcgaaatactgagcgccgaggggccacctgtgcgggagcttgagcctaccttagaggaggaggaagtggttactcctgactttcaggagcctctcgtaagctctggggaagaagagaccctgatcctggaggagaagcaagaatcgcagcagactctgtctcctactcctggagatcccatgctggctagttggcctaccggagaggtgtggctgagcactgtggccccatcccctagcgacatgggcgctggcaccgcggctagcagtcacacagaagttgcacccaccgatccaatgccaaggcgaagaggcagatttaagggtctcaacggacgatacttccagcagcaagaacccgaaccaggtctacagggaggaatggaagccagtgctcagccccctacatcagaggccgctgtgaatcaaatggagcctcccttggcaatggcagtgacagagatgctggggagcgggcagtcccgatcaccgtgggccgaccttactaacgaggtggacatgcctggggctggatctgctgggggtaagtcctctccggaaccgtggttgtggccccctactatggtgccaccctccatcagtggccattcacgggctccggttcttgagctggaaaaggccgaaggcccaagcgcccgtcctgcaaccccggatctcttctggagccctctggaagccaccgtgagcgctccctctcctgctccctgggaggcatttcctgtggctacctctccagacctccccatgatggctatgctgcgtggcccaaaggagtggatgcttccccacccaactcccatttccactgaggctaaccgcgtggaggcccacggggaggcaacggctacagctcccccatccccagccgcagaaacaaaggtgtactctctgccgctgagtttgactccgactggccagggcggagaagctatgcctactactcctgagtcaccgcgtgccgacttccgcgaaactggcgaaaccagccctgctcaggttaataaggcggagcacagttcaagtagtccctggccttccgtgaacagaaacgttgcagtgggattcgtgcctactgaaaccgccacagaacctacgggtctgaggggtataccgggttcagaatcgggagtgttcgacacagctgaatctcccacaagcggattacaagctaccgtggatgaggtgcaagacccatggccatccgtatattctaaagggttggacgcctccagtccttctgctcccctgggctccccgggagtctttttggtgcctaaagtgacgcctaacttggaaccatgggtggcaacagacgagggccctactgttaaccccatggactcaacagtcacgcccgcaccatccgatgcctctgggatatgggagcccggatctcaagtgttcgaggaagccgagagcacgacattgtctccacaggtcgcacttgatacgtctatcgttaccccactcactaccttggaacagggggataaagttggcgtgcccgcaatgtcaaccctcggtagcagcagctcccagcctcatcctgaacccgaagaccaggtagagacacaggggacttcaggcgctagtgtgcccccacaccaatccagtcccctaggcaaacccgctgttcctccaggtactcccacagctgccagcgtcggggagtcagccagtgtgagttccggcgaacccacagtgccctgggatccctcctcaacactactgcctgtgacgctggggatcgaggatttcgagctcgaggtgctggctggctctcctggggtcgagtcattctgggaggaggttgccagtggcgaggagcccgcactgccaggcactcctatgaatgccggagcagaggaggtacactccgatccttgtgagaataacccttgcctacacggtgggacatgcaatgccaatggcactatgtacgggtgcagctgcgaccaggggttcgccggtgagaactgtgagattgatatcgacgactgtctgtgttcaccctgcgaaaacgggggtacctgcatcgatgaggtcaacggattcgtgtgcctgtgtctcccatcatacgggggatctttttgcgagaaggatactgagggctgtgatagaggatggcataagtttcaggggcattgttaccggtatttcgcccatcggagggcatgggaagatgctgagaaggactgcagacgacggagcggccatctgacatccgtgcacagtccagaagagcattcatttattaacagcttcggccatgaaaacacatggattggccttaatgacagaatcgtggagcgggattttcagtggactgacaatacaggcttgcagtttgaaaattggcgtgaaaaccaaccagataatttcttcgccggaggcgaggactgcgtcgtgatggtcgcccacgagtccggtaggtggaacgatgttccttgcaattacaaccttccttacgtttgtaagaaaggcactgtgctctgcggccctccccctgccgttgagaacgccagcctcataggtgccaggaaggctaagtacaatgtgcacgcgaccgtgcgctaccagtgtaacgaagggttcgcacaacaccatgtcgctacaattcggtgtagatctaacggcaaatgggatagaccgcaaatcgtgtgcacaaaacccagacgatcacaccgaatgaggaggcatcaccatcaccatcagcatcaccatcaacatcaccatcataaatcgcgcaaggagagacgcaagcacaaaaaacacccgacggaggactgggaaaaggatgagggcaacttctgttag

SEQ ID NO: 145925 - DNA, 2319 bp, Artificial Sequence
  derived and/or modified sequence
atgcctggcgcagggtcagccggaggaaaatcttctcccgaaccatggctgtggcctcccactatggtgcctccatctatcagtggtcactcacgagccccagtattggagctagagaaagcagaagggcctagcgcccgtcccgctacccctgacctgttctggtcccccctggaggctacggtttcagccccttctcccgctccttgggaggctttcccagtcgccacctcaccagaccttccgatgatggccatgttgcgtggtcccaaagagtggatgttacctcaccctaccccgattagcaccgaggctaatcgcgttgaagcgcatggagaagcaacagctacagcccctccatctcccgcagcggagacaaaggtgtacagtttgccactttcccttacacctacaggacagggaggagaagccatgccgacgaccccagagagtcctcgggctgacttccgagaaacaggcgagacatcccctgcccaggtcaacaaagccgaacactcctccagtagcccttggccttctgtgaaccggaatgttgccgttggatttgtgcctactgagacggctacagaacccaccgggctgcgcggaataccgggttccgagagcggagtgtttgacacagccgagtcacccactagtggcctgcaagcgaccgtagacgaggtgcaggacccatggccgtctgtttactctaaggggctcgacgccagctcaccctcagccccactgggatcgccaggcgttttccttgtaccgaaagtcacacctaacctggaaccctgggtcgctaccgacgagggccctacagtcaatcctatggattctaccgttactcccgcaccatcagacgcatcaggcatatgggagccaggaagccaggtgttcgaggaagccgaatctaccactttgagcccacaggttgcactggataccagcatcgtgactccactcactaccttggagcagggtgataaggtgggagtgccggctatgtccactctcggaagcagcagcagccagccacaccccgagcccgaagatcaagtcgagacacagggcacctccggcgcttcagtgcctccccaccagtccagccctctcgggaaacctgcagtccccccaggaacacccacggccgctagtgtaggggagtccgccagcgtgtcctctggggagcctacagtgccctgggatcccagtagtactcttctacctgtgacgctgggaattgaagactttgagctcgaggtacttgctgggagtcccggtgtggaatcattctgggaagaggtggcctctggggaagaacctgcactgccgggtacacctatgaacgctggggctgaggaggttcactcagatccatgtgagaacaacccttgcctgcacgggggaacctgcaatgcaaacggaaccatgtacggctgctcctgcgaccagggctttgctggtgagaattgcgagatagatatcgacgattgtctgtgtagtccctgcgaaaacgggggaacctgtattgacgaagtgaacggattcgtctgtctgtgcctgccttcctatggcggatccttttgtgaaaaagataccgagggctgcgatcggggttggcataagttccagggccattgctatcggtacttcgctcacagaagggcatgggaggacgcggagaaggattgtcggcgacgaagcggccacttgactagcgtgcatagcccagaggagcactcctttatcaatagctttggccatgagaacacgtggatcggtctcaacgatcgcatcgtcgagagagatttccaatggaccgataacacgggcctccagttcgaaaattggcgggagaatcagccggacaatttcttcgcgggaggagaggactgtgtcgtaatggtggcacatgaatcagggaggtggaatgatgttccctgcaattacaacctcccctatgtgtgcaagaagggaactgtgctatgcggccctcctcctgctgttgaaaatgcttctctgattggagcacgcaaagcgaagtataatgttcatgctactgttcggtatcagtgcaacgaaggcttcgcccagcatcatgttgctacaattagatgccgctccaatggaaaatgggatcgccctcaaattgtatgcactaaacctcgacgaagtcataggatgcgacgccatcaccaccatcatcagcaccaccaccagcaccaccaccataaatcccgcaaggagcgtcgcaagcacaagaagcacccgacagaagactgggagaaagacgagggcaatttctgctag

SEQ ID NO: 145926 - DNA, 4008 bp, Artificial Sequence
  derived and/or modified sequence
aggcctccgagggacgcttcagaactgggagctagaagccggatgggcgctcctttcgtatgggcattgggcctattgatgttgcagatgctcttgttcgtggcaggagagcaggggacacaggatattactgatgcctcagagcgaggcttacatatgcagaaacttggcagcggatcagtacaagcggcactggcggaactggtggcgcttccctgccttttcactttgcagccacgacccagtgctgccagagacgcacccaggataaagtggaccaaggtgcggactgccagcggtcagaggcaggatctgcccatccttgtagcaaaggataacgtcgtcagagttgcaaagtcatggcagggaagggtcagtttaccctcctatccgaggcgcagagcaaatgccacacttctgctagggccactcagagcatccgactctggactatacaggtgccaggttgtgagggggatcgaagatgaacaagacctcgtccccctcgaagtcaccggggtggtgttccactatcggtctgcacgagatagatatgccctgacgttcgctgaagcacaggaggcctgccgcctgtcgagtgccatcatcgctgccccaaggcaccttcaggcggcatttgaggatggattcgataactgtgacgcagggtggctctcagacaggacggtcagatatcctatcacccagtccagaccgggatgttacggtgacaggagtagccttcctggggtaaggagctacggaaggagaaacccgcaagaactgtatgacgtgtactgcttcgctagggagctggggggagaagtcttctatgtaggcccagccaggcgcctgacactggctggtgcacgcgctcagtgcaggcgccagggagccgctctcgcttcagtgggacagctgcatctggcttggcacgagggcttggatcagtgcgacccgggatggttagcagacgggtcagtgcggtatcctatccagactccccgtagacgctgcggcggacctgcgccaggcgtacggacggtctatcgatttgccaacaggactggattcccaagcccggcagagcgttttgatgcttattgctttagagcccatcatcctaccagccagcacggggatcttgagacaccaagcagtggagacgaaggagagattttgtctgccgaaggaccacccgtacgcgagctggagcctaccctggaggaggaggaagtagtgacccccgatttccaagaacccctcgtaagcagcggggaggaggagaccctgatactggaggaaaaacaggaatctcaacagactctatctcccactcccggagaccccatgctggctagctggccaacaggggaggtctggctgtccacggtcgctccctcaccttctgacatgggagcgggaaccgcggctagcagtcataccgaggtggctcccacggacccaatgcctcgtaggcggggaagatttaagggattgaatgggagatacttccaacagcaggagcccgaaccgggattgcaggggggaatggaagcctccgcacagccacccacaagcgaggccgctgtgaatcagatggagcctccactggccatggctgtgactgagatgctcggttccggccaatccaggagcccttgggccgacctcactaatgaagtggacatgccaggagccggttccgccggagggaagtcttcacccgagccgtggctctggccccctaccatggttcccccttccatctctgggcactcccgagccccagtgctcgagcttgaaaaagcagaggggccttctgccagacccgcaactcccgacctgttttggtcacctcttgaagccactgtttctgccccaagtcctgccccttgggaagcgttcccagtggctacaagccccgatcttccaatgatggcaatgttgcgtgggcctaaggagtggatgttaccgcatcctacccccatttctactgaagcaaaccgtgtagaagctcacggggaggctactgcaacagctccaccctccccagccgctgagacaaaggtgtacagtcttcctctgtctctaacacccaccgggcaaggcggagaggcaatgcctactacaccggaatcaccccgtgccgatttccgtgagaccggagaaacttcccctgctcaggtgaacaaggccgaacacagtagctcttccccctggccatctgtcaacaggaacgttgcagtcggtttcgttcctactgaaacagctacagagccaaccgggctgcggggaattccaggatctgagagcggggtgttcgacactgccgagagccctacctcgggtctgcaggcgacagttgacgaggtgcaggatccctggccttctgtgtacagcaagggtctcgacgcctcaagtccttctgcgcctttgggtagtccaggcgtgtttttagtcccaaaagtcacccccaatctcgaaccgtgggtggctaccgacgagggacctactgtgaatccaatggactccacagtgacaccagcgccttctgatgcctcgggaatttgggaaccaggaagtcaggtgttcgaggaggccgagtcgacaacccttagtcctcaggtggcactggacacatcgatcgtcacccccctgactacactggagcagggggataaggtgggggtgccagcaatgagcacacttggatcgtccagctctcagccccaccccgagccagaggatcaggtggagacgcagggaacaagtggtgcatccgtgccccctcatcagagctcccccttaggtaagcctgccgtgcctccaggaacccctacggcagcaagtgtaggcgagtctgctagtgtgtccagcggggagccgacagtgccctgggatccttcctctacacttttgccagtcacccttggcattgaggactttgagttagaggtgcttgccggaagtccaggtgtcgaatctttttgggaagaggtcgcttctggcgaagaacccgcactgccagggacccctatgaacgccggagcagaggaggtccatagcgatccatgtgagaataatccgtgtctccacggtggaacttgtaacgccaacggaaccatgtatgggtgctcatgcgaccaaggttttgctggagaaaactgcgagatcgatattgacgactgcctgtgctccccctgcgagaacggcggaacatgtatcgacgaggtgaacggtttcgtatgcctctgcttgcccagctacggcggttccttttgtgaaaaagacactgaagggtgtgaccgcggatggcataagtttcaaggccactgttatcggtatttcgctcaccgtcgcgcatgggaggacgctgagaaagattgccgcaggagatctggccaccttacgtccgtccatagcccggaggaacacagctttattaactcgttcgggcacgagaatacatggataggactgaatgaccgcatcgtagagcgtgacttccagtggacagacaatacaggcctgcagtttgagaattggcgggaaaaccagccagataacttcttcgccggaggcgaggattgtgtggtgatggtggcacacgaatctggccgatggaatgacgtcccatgtaattacaacctgccatatgtgtgcaaaaaaggaaccgtgctgtgtggaccaccccctgcagtggagaatgcgtcactgatcggagccagaaaagccaagtacaatgttcatgccacagtgcgctaccagtgtaacgaggggttcgctcagcaccacgttgccacgatacgctgtcgcagcaatggtaaatgggaccgacctcaaatcgtgtgtaccaagccacggaggagccaccggatgcgcaggcaccaccaccaccaccaacaccaccaccagcatcaccatcataagtctcgaaaggaacgtcgaaaacataaaaagcaccccaccgaggactgggagaaggatgagggaaatttctgttag

SEQ ID NO: 145927 - DNA, 3966 bp, Artificial Sequence
  derived and/or modified sequence
atgggcgcccccttcgtgtgggccctgggcctgctgatgctgcagatgctgctgttcgtggccggcgagcagggcacccaggacatcaccgacgccagcgagagaggcctgcacatgcagaagctgggcagcggcagcgtgcaggccgccctggccgagctggtggccctgccctgcctgttcaccctgcagcccagacccagcgccgccagagacgcccccagaatcaagtggaccaaggtgagaaccgccagcggccagagacaggacctgcccatcctggtggccaaggacaacgtggtgagagtggccaagagctggcagggcagagtgagcctgcccagctaccccagaagaagagccaacgccaccctgctgctgggccccctgagagccagcgacagcggcctgtacagatgccaggtggtgagaggcatcgaggacgagcaggacctggtgcccctggaggtgaccggcgtggtgttccactacagaagcgccagagacagatacgccctgaccttcgccgaggcccaggaggcctgcagactgagcagcgccatcatcgccgcccccagacacctgcaggccgccttcgaggacggcttcgacaactgcgacgccggctggctgagcgacagaaccgtgagataccccatcacccagagcagacccggctgctacggcgacagaagcagcctgcccggcgtgagaagctacggcagaagaaacccccaggagctgtacgacgtgtactgcttcgccagagagctgggcggcgaggtgttctacgtgggccccgccagaagactgaccctggccggcgccagagcccagtgcagaagacagggcgccgccctggccagcgtgggccagctgcacctggcctggcacgagggcctggaccagtgcgaccccggctggctggccgacggcagcgtgagataccccatccagacccccagaagaagatgcggcggccccgcccccggcgtgagaaccgtgtacagattcgccaacagaaccggcttccccagccccgccgagagattcgacgcctactgcttcagagcccaccaccccaccagccagcacggcgacctggagacccccagcagcggcgacgagggcgagatcctgagcgccgagggcccccccgtgagagagctggagcccaccctggaggaggaggaggtggtgacccccgacttccaggagcccctggtgagcagcggcgaggaggagaccctgatcctggaggagaagcaggagagccagcagaccctgagccccacccccggcgaccccatgctggccagctggcccaccggcgaggtgtggctgagcaccgtggcccccagccccagcgacatgggcgccggcaccgccgccagcagccacaccgaggtggcccccaccgaccccatgcccagaagaagaggcagattcaagggcctgaacggcagatacttccagcagcaggagcccgagcccggcctgcagggcggcatggaggccagcgcccagccccccaccagcgaggccgccgtgaaccagatggagccccccctggccatggccgtgaccgagatgctgggcagcggccagagcagaagcccctgggccgacctgaccaacgaggtggacatgcccggcgccggcagcgccggcggcaagagcagccccgagccctggctgtggccccccaccatggtgccccccagcatcagcggccacagcagagcccccgtgctggagctggagaaggccgagggccccagcgccagacccgccacccccgacctgttctggagccccctggaggccaccgtgagcgcccccagccccgccccctgggaggccttccccgtggccaccagccccgacctgcccatgatggccatgctgagaggccccaaggagtggatgctgccccaccccacccccatcagcaccgaggccaacagagtggaggcccacggcgaggccaccgccaccgccccccccagccccgccgccgagaccaaggtgtacagcctgcccctgagcctgacccccaccggccagggcggcgaggccatgcccaccacccccgagagccccagagccgacttcagagagaccggcgagaccagccccgcccaggtgaacaaggccgagcacagcagcagcagcccctggcccagcgtgaacagaaacgtggccgtgggcttcgtgcccaccgagaccgccaccgagcccaccggcctgagaggcatccccggcagcgagagcggcgtgttcgacaccgccgagagccccaccagcggcctgcaggccaccgtggacgaggtgcaggacccctggcccagcgtgtacagcaagggcctggacgccagcagccccagcgcccccctgggcagccccggcgtgttcctggtgcccaaggtgacccccaacctggagccctgggtggccaccgacgagggccccaccgtgaaccccatggacagcaccgtgacccccgcccccagcgacgccagcggcatctgggagcccggcagccaggtgttcgaggaggccgagagcaccaccctgagcccccaggtggccctggacaccagcatcgtgacccccctgaccaccctggagcagggcgacaaggtgggcgtgcccgccatgagcaccctgggcagcagcagcagccagccccaccccgagcccgaggaccaggtggagacccagggcaccagcggcgccagcgtgcccccccaccagagcagccccctgggcaagcccgccgtgccccccggcacccccaccgccgccagcgtgggcgagagcgccagcgtgagcagcggcgagcccaccgtgccctgggaccccagcagcaccctgctgcccgtgaccctgggcatcgaggacttcgagctggaggtgctggccggcagccccggcgtggagagcttctgggaggaggtggccagcggcgaggagcccgccctgcccggcacccccatgaacgccggcgccgaggaggtgcacagcgacccctgcgagaacaacccctgcctgcacggcggcacctgcaacgccaacggcaccatgtacggctgcagctgcgaccagggcttcgccggcgagaactgcgagatcgacatcgacgactgcctgtgcagcccctgcgagaacggcggcacctgcatcgacgaggtgaacggcttcgtgtgcctgtgcctgcccagctacggcggcagcttctgcgagaaggacaccgagggctgcgacagaggctggcacaagttccagggccactgctacagatacttcgcccacagaagagcctgggaggacgccgagaaggactgcagaagaagaagcggccacctgaccagcgtgcacagccccgaggagcacagcttcatcaacagcttcggccacgagaacacctggatcggcctgaacgacagaatcgtggagagagacttccagtggaccgacaacaccggcctgcagttcgagaactggagagagaaccagcccgacaacttcttcgccggcggcgaggactgcgtggtgatggtggcccacgagagcggcagatggaacgacgtgccctgcaactacaacctgccctacgtgtgcaagaagggcaccgtgctgtgcggccccccccccgccgtggagaacgccagcctgatcggcgccagaaaggccaagtacaacgtgcacgccaccgtgagataccagtgcaacgagggcttcgcccagcaccacgtggccaccatcagatgcagaagcaacggcaagtgggacagaccccagatcgtgtgcaccaagcccagaagaagccacagaatgagaagacaccaccaccaccaccagcaccaccaccagcaccaccaccacaagagcagaaaggagagaagaaagcacaagaagcaccccaccgaggactgggagaaggacgagggcaacttctgctag

SEQ ID NO: 145928 - DNA, 2319 bp, Artificial Sequence
  derived and/or modified sequence
atgcccggcgccggcagcgccggcggcaagagcagccccgagccctggctgtggccccccaccatggtgccccccagcatcagcggccacagcagagcccccgtgctggagctggagaaggccgagggccccagcgccagacccgccacccccgacctgttctggagccccctggaggccaccgtgagcgcccccagccccgccccctgggaggccttccccgtggccaccagccccgacctgcccatgatggccatgctgagaggccccaaggagtggatgctgccccaccccacccccatcagcaccgaggccaacagagtggaggcccacggcgaggccaccgccaccgccccccccagccccgccgccgagaccaaggtgtacagcctgcccctgagcctgacccccaccggccagggcggcgaggccatgcccaccacccccgagagccccagagccgacttcagagagaccggcgagaccagccccgcccaggtgaacaaggccgagcacagcagcagcagcccctggcccagcgtgaacagaaacgtggccgtgggcttcgtgcccaccgagaccgccaccgagcccaccggcctgagaggcatccccggcagcgagagcggcgtgttcgacaccgccgagagccccaccagcggcctgcaggccaccgtggacgaggtgcaggacccctggcccagcgtgtacagcaagggcctggacgccagcagccccagcgcccccctgggcagccccggcgtgttcctggtgcccaaggtgacccccaacctggagccctgggtggccaccgacgagggccccaccgtgaaccccatggacagcaccgtgacccccgcccccagcgacgccagcggcatctgggagcccggcagccaggtgttcgaggaggccgagagcaccaccctgagcccccaggtggccctggacaccagcatcgtgacccccctgaccaccctggagcagggcgacaaggtgggcgtgcccgccatgagcaccctgggcagcagcagcagccagccccaccccgagcccgaggaccaggtggagacccagggcaccagcggcgccagcgtgcccccccaccagagcagccccctgggcaagcccgccgtgccccccggcacccccaccgccgccagcgtgggcgagagcgccagcgtgagcagcggcgagcccaccgtgccctgggaccccagcagcaccctgctgcccgtgaccctgggcatcgaggacttcgagctggaggtgctggccggcagccccggcgtggagagcttctgggaggaggtggccagcggcgaggagcccgccctgcccggcacccccatgaacgccggcgccgaggaggtgcacagcgacccctgcgagaacaacccctgcctgcacggcggcacctgcaacgccaacggcaccatgtacggctgcagctgcgaccagggcttcgccggcgagaactgcgagatcgacatcgacgactgcctgtgcagcccctgcgagaacggcggcacctgcatcgacgaggtgaacggcttcgtgtgcctgtgcctgcccagctacggcggcagcttctgcgagaaggacaccgagggctgcgacagaggctggcacaagttccagggccactgctacagatacttcgcccacagaagagcctgggaggacgccgagaaggactgcagaagaagaagcggccacctgaccagcgtgcacagccccgaggagcacagcttcatcaacagcttcggccacgagaacacctggatcggcctgaacgacagaatcgtggagagagacttccagtggaccgacaacaccggcctgcagttcgagaactggagagagaaccagcccgacaacttcttcgccggcggcgaggactgcgtggtgatggtggcccacgagagcggcagatggaacgacgtgccctgcaactacaacctgccctacgtgtgcaagaagggcaccgtgctgtgcggccccccccccgccgtggagaacgccagcctgatcggcgccagaaaggccaagtacaacgtgcacgccaccgtgagataccagtgcaacgagggcttcgcccagcaccacgtggccaccatcagatgcagaagcaacggcaagtgggacagaccccagatcgtgtgcaccaagcccagaagaagccacagaatgagaagacaccaccaccaccaccagcaccaccaccagcaccaccaccacaagagcagaaaggagagaagaaagcacaagaagcaccccaccgaggactgggagaaggacgagggcaacttctgctag

SEQ ID NO: 145929 - DNA, 4008 bp, Artificial Sequence
  derived and/or modified sequence
agaccccccagagacgccagcgagctgggcgccagaagcagaatgggcgcccccttcgtgtgggccctgggcctgctgatgctgcagatgctgctgttcgtggccggcgagcagggcacccaggacatcaccgacgccagcgagagaggcctgcacatgcagaagctgggcagcggcagcgtgcaggccgccctggccgagctggtggccctgccctgcctgttcaccctgcagcccagacccagcgccgccagagacgcccccagaatcaagtggaccaaggtgagaaccgccagcggccagagacaggacctgcccatcctggtggccaaggacaacgtggtgagagtggccaagagctggcagggcagagtgagcctgcccagctaccccagaagaagagccaacgccaccctgctgctgggccccctgagagccagcgacagcggcctgtacagatgccaggtggtgagaggcatcgaggacgagcaggacctggtgcccctggaggtgaccggcgtggtgttccactacagaagcgccagagacagatacgccctgaccttcgccgaggcccaggaggcctgcagactgagcagcgccatcatcgccgcccccagacacctgcaggccgccttcgaggacggcttcgacaactgcgacgccggctggctgagcgacagaaccgtgagataccccatcacccagagcagacccggctgctacggcgacagaagcagcctgcccggcgtgagaagctacggcagaagaaacccccaggagctgtacgacgtgtactgcttcgccagagagctgggcggcgaggtgttctacgtgggccccgccagaagactgaccctggccggcgccagagcccagtgcagaagacagggcgccgccctggccagcgtgggccagctgcacctggcctggcacgagggcctggaccagtgcgaccccggctggctggccgacggcagcgtgagataccccatccagacccccagaagaagatgcggcggccccgcccccggcgtgagaaccgtgtacagattcgccaacagaaccggcttccccagccccgccgagagattcgacgcctactgcttcagagcccaccaccccaccagccagcacggcgacctggagacccccagcagcggcgacgagggcgagatcctgagcgccgagggcccccccgtgagagagctggagcccaccctggaggaggaggaggtggtgacccccgacttccaggagcccctggtgagcagcggcgaggaggagaccctgatcctggaggagaagcaggagagccagcagaccctgagccccacccccggcgaccccatgctggccagctggcccaccggcgaggtgtggctgagcaccgtggcccccagccccagcgacatgggcgccggcaccgccgccagcagccacaccgaggtggcccccaccgaccccatgcccagaagaagaggcagattcaagggcctgaacggcagatacttccagcagcaggagcccgagcccggcctgcagggcggcatggaggccagcgcccagccccccaccagcgaggccgccgtgaaccagatggagccccccctggccatggccgtgaccgagatgctgggcagcggccagagcagaagcccctgggccgacctgaccaacgaggtggacatgcccggcgccggcagcgccggcggcaagagcagccccgagccctggctgtggccccccaccatggtgccccccagcatcagcggccacagcagagcccccgtgctggagctggagaaggccgagggccccagcgccagacccgccacccccgacctgttctggagccccctggaggccaccgtgagcgcccccagccccgccccctgggaggccttccccgtggccaccagccccgacctgcccatgatggccatgctgagaggccccaaggagtggatgctgccccaccccacccccatcagcaccgaggccaacagagtggaggcccacggcgaggccaccgccaccgccccccccagccccgccgccgagaccaaggtgtacagcctgcccctgagcctgacccccaccggccagggcggcgaggccatgcccaccacccccgagagccccagagccgacttcagagagaccggcgagaccagccccgcccaggtgaacaaggccgagcacagcagcagcagcccctggcccagcgtgaacagaaacgtggccgtgggcttcgtgcccaccgagaccgccaccgagcccaccggcctgagaggcatccccggcagcgagagcggcgtgttcgacaccgccgagagccccaccagcggcctgcaggccaccgtggacgaggtgcaggacccctggcccagcgtgtacagcaagggcctggacgccagcagccccagcgcccccctgggcagccccggcgtgttcctggtgcccaaggtgacccccaacctggagccctgggtggccaccgacgagggccccaccgtgaaccccatggacagcaccgtgacccccgcccccagcgacgccagcggcatctgggagcccggcagccaggtgttcgaggaggccgagagcaccaccctgagcccccaggtggccctggacaccagcatcgtgacccccctgaccaccctggagcagggcgacaaggtgggcgtgcccgccatgagcaccctgggcagcagcagcagccagccccaccccgagcccgaggaccaggtggagacccagggcaccagcggcgccagcgtgcccccccaccagagcagccccctgggcaagcccgccgtgccccccggcacccccaccgccgccagcgtgggcgagagcgccagcgtgagcagcggcgagcccaccgtgccctgggaccccagcagcaccctgctgcccgtgaccctgggcatcgaggacttcgagctggaggtgctggccggcagccccggcgtggagagcttctgggaggaggtggccagcggcgaggagcccgccctgcccggcacccccatgaacgccggcgccgaggaggtgcacagcgacccctgcgagaacaacccctgcctgcacggcggcacctgcaacgccaacggcaccatgtacggctgcagctgcgaccagggcttcgccggcgagaactgcgagatcgacatcgacgactgcctgtgcagcccctgcgagaacggcggcacctgcatcgacgaggtgaacggcttcgtgtgcctgtgcctgcccagctacggcggcagcttctgcgagaaggacaccgagggctgcgacagaggctggcacaagttccagggccactgctacagatacttcgcccacagaagagcctgggaggacgccgagaaggactgcagaagaagaagcggccacctgaccagcgtgcacagccccgaggagcacagcttcatcaacagcttcggccacgagaacacctggatcggcctgaacgacagaatcgtggagagagacttccagtggaccgacaacaccggcctgcagttcgagaactggagagagaaccagcccgacaacttcttcgccggcggcgaggactgcgtggtgatggtggcccacgagagcggcagatggaacgacgtgccctgcaactacaacctgccctacgtgtgcaagaagggcaccgtgctgtgcggccccccccccgccgtggagaacgccagcctgatcggcgccagaaaggccaagtacaacgtgcacgccaccgtgagataccagtgcaacgagggcttcgcccagcaccacgtggccaccatcagatgcagaagcaacggcaagtgggacagaccccagatcgtgtgcaccaagcccagaagaagccacagaatgagaagacaccaccaccaccaccagcaccaccaccagcaccaccaccacaagagcagaaaggagagaagaaagcacaagaagcaccccaccgaggactgggagaaggacgagggcaacttctgctag

SEQ ID NO: 145930 - protein, 324 aa, Artificial Sequence
  derived and/or modified sequence
MFPSPALTPTPFSVKDILNLEQQQRSLAAAGELSARLEATLAPSSCMLAAFKPEAYAGPEAAAPGLPELRAELGRAPSPAKCASAFPAAPAFYPRAYSDPDPAKDPRAEKKELCALQKAVELEKTEADNAERPRARRRRKPRVLFSQAQVYELERRFKQQRYLSAPERDQLASVLKLTSTQVKIWFQNRRYKCKRQRQDQTLELVGLPPPPPPPARRIAVPVLVRDGKPCLGDSAPYAPAYGVGLNPYGYNAYPAYPGYGGAACSPGYSCTAAYPAGPSPAQPATAAANNNFVNFGVGDLNAVQSPGIPQSNSGVSTLHGIRAW

SEQ ID NO: 145931 - protein, 112 aa, Artificial Sequence
  derived and/or modified sequence
MFPSPALTPTPFSVKDILNLEQQQRSLAAAGELSARLEATLAPSSCMLAAFKPEAYAGPEAAAPGLPELRAELGRAPSPAKCASAFPAAPAFYPRAYSDPDPAKDPRAEKKA

SEQ ID NO: 145932 - DNA, 1669 bp, Artificial Sequence
  derived and/or modified sequence
gctcctgtcatcgaggcccctggcccaatggcaggctgagtccccctcctctggcctggtcccgcctctcctgccccttgtgctcagcgctacctgctgcccggacacatccagagctggccgacgggtgcgcgggcgggcggcggcaccatgcagggaagctgccaggggccgtgggcagcgccgctttctgccgcccacctggcgctgtgagactggcgctgccaccatgttccccagccctgctctcacgcccacgcccttctcagtcaaagacatcctaaacctggaacagcagcagcgcagcctggctgccgccggagagctctctgcccgcctggaggcgaccctggcgccctcctcctgcatgctggccgccttcaagccagaggcctacgctgggcccgaggcggctgcgccgggcctcccagagctgcgcgcagagctgggccgcgcgccttcaccggccaagtgtgcgtctgcctttcccgccgcccccgccttctatccacgtgcctacagcgaccccgacccagccaaggaccctagagccgaaaagaaagagctgtgcgcgctgcagaaggcggtggagctggagaagacagaggcggacaacgcggagcggccccgggcgcgacggcggaggaagccgcgcgtgctcttctcgcaggcgcaggtctatgagctggagcggcgcttcaagcagcagcggtacctgtcggcccccgaacgcgaccagctggccagcgtgctgaaactcacgtccacgcaggtcaagatctggttccagaaccggcgctacaagtgcaagcggcagcggcaggaccagactctggagctggtggggctgcccccgccgccgccgccgcctgcccgcaggatcgcggtgccagtgctggtgcgcgatggcaagccatgcctaggggactcggcgccctacgcgcctgcctacggcgtgggcctcaatccctacggttataacgcctaccccgcctatccgggttacggcggcgcggcctgcagccctggctacagctgcactgccgcttaccccgccgggccttccccagcgcagccggccactgccgccgccaacaacaacttcgtgaacttcggcgtcggggacttgaatgcggttcagagccccgggattccgcagagcaactcgggagtgtccacgctgcatggtatccgagcctggtagggaagggacccgcgtggcgcgaccctgaccgatcccacctcaacagctccctgactctcggggggagaaggggctcccaacatgaccctgagtcccctggattttgcattcactcctgcggagacctaggaactttttctgtcccacgcgcgtttgttcttgcgcacgggagagtttgtggcggcgattatgcagcgtgcaatgagtgatcctgcagcctggtgtcttagctgtccccccaggagtgccctccgagagtccatgggcacccccggttggaactgggactgagctcgggcacgcagggcctgagatctggccgcccattccgcgagccagggccgggcgcccgggcctttgctatctcgccgtcgcccgcccacgcacccacccgtatttatgtttttacctattgctgtaagaaatgacgatccccttcccattaaagagagtgcgttgaccccg

SEQ ID NO: 145933 - DNA, 1961 bp, Artificial Sequence
  derived and/or modified sequence
gctcctgtcatcgaggcccctggcccaatggcaggctgagtccccctcctctggcctggtcccgcctctcctgccccttgtgctcagcgctacctgctgcccggacacatccagagctggccgacgggtgcgcgggcgggcggcggcaccatgcagggaagctgccaggggccgtgggcagcgccgctttctgccgcccacctggcgctgtgagactggcgctgccaccatgttccccagccctgctctcacgcccacgcccttctcagtcaaagacatcctaaacctggaacagcagcagcgcagcctggctgccgccggagagctctctgcccgcctggaggcgaccctggcgccctcctcctgcatgctggccgccttcaagccagaggcctacgctgggcccgaggcggctgcgccgggcctcccagagctgcgcgcagagctgggccgcgcgccttcaccggccaagtgtgcgtctgcctttcccgccgcccccgccttctatccacgtgcctacagcgaccccgacccagccaaggaccctagagccgaaaagaaagcctgaaattttaagtcaccgtctgtctccctcaccagggtgtgaactgccccgagggcagagacctcccgttttgttctccagcgccttgagccagcctgactttctacaaatgctgagtgagacgtgtcggtggctcccagtgcacttggcagagtgagccgcagccagctgggcgctccaggcaggacacagtggcctccacgaggatcccttaccattactgtgcggccgcgctccgtaggtcaagccgctcttaccaagcgtctctctgcctctctgttccccctcagagctgtgcgcgctgcagaaggcggtggagctggagaagacagaggcggacaacgcggagcggccccgggcgcgacggcggaggaagccgcgcgtgctcttctcgcaggcgcaggtctatgagctggagcggcgcttcaagcagcagcggtacctgtcggcccccgaacgcgaccagctggccagcgtgctgaaactcacgtccacgcaggtcaagatctggttccagaaccggcgctacaagtgcaagcggcagcggcaggaccagactctggagctggtggggctgcccccgccgccgccgccgcctgcccgcaggatcgcggtgccagtgctggtgcgcgatggcaagccatgcctaggggactcggcgccctacgcgcctgcctacggcgtgggcctcaatccctacggttataacgcctaccccgcctatccgggttacggcggcgcggcctgcagccctggctacagctgcactgccgcttaccccgccgggccttccccagcgcagccggccactgccgccgccaacaacaacttcgtgaacttcggcgtcggggacttgaatgcggttcagagccccgggattccgcagagcaactcgggagtgtccacgctgcatggtatccgagcctggtagggaagggacccgcgtggcgcgaccctgaccgatcccacctcaacagctccctgactctcggggggagaaggggctcccaacatgaccctgagtcccctggattttgcattcactcctgcggagacctaggaactttttctgtcccacgcgcgtttgttcttgcgcacgggagagtttgtggcggcgattatgcagcgtgcaatgagtgatcctgcagcctggtgtcttagctgtccccccaggagtgccctccgagagtccatgggcacccccggttggaactgggactgagctcgggcacgcagggcctgagatctggccgcccattccgcgagccagggccgggcgcccgggcctttgctatctcgccgtcgcccgcccacgcacccacccgtatttatgtttttacctattgctgtaagaaatgacgatccccttcccattaaagagagtgcgttgaccccg

SEQ ID NO: 145934 - DNA, 1924 bp, Artificial Sequence
  derived and/or modified sequence
gctcctgtcatcgaggcccctggcccaatggcaggctgagtccccctcctctggcctggtcccgcctctcctgccccttgtgctcagcgctacctgctgcccggacacatccagagctggccgacgggtgcgcgggcgggcggcggcaccatgcagggaagctgccaggggccgtgggcagcgccgctttctgccgcccacctggcgctgtgagactggcgctgccaccatgttccccagccctgctctcacgcccacgcccttctcagtcaaagacatcctaaacctggaacagcagcagcgcagcctggctgccgccggagagctctctgcccgcctggaggcgaccctggcgccctcctcctgcatgctggccgccttcaagccagaggcctacgctgggcccgaggcggctgcgccgggcctcccagagctgcgcgcagagctgggccgcgcgccttcaccggccaagtgtgcgtctgcctttcccgccgcccccgccttctatccacgtgcctacagcgaccccgacccagccaaggaccctagagccgaaaagaaagggtgtgaactgccccgagggcagagacctcccgttttgttctccagcgccttgagccagcctgactttctacaaatgctgagtgagacgtgtcggtggctcccagtgcacttggcagagtgagccgcagccagctgggcgctccaggcaggacacagtggcctccacgaggatcccttaccattactgtgcggccgcgctccgtaggtcaagccgctcttaccaagcgtctctctgcctctctgttccccctcagagctgtgcgcgctgcagaaggcggtggagctggagaagacagaggcggacaacgcggagcggccccgggcgcgacggcggaggaagccgcgcgtgctcttctcgcaggcgcaggtctatgagctggagcggcgcttcaagcagcagcggtacctgtcggcccccgaacgcgaccagctggccagcgtgctgaaactcacgtccacgcaggtcaagatctggttccagaaccggcgctacaagtgcaagcggcagcggcaggaccagactctggagctggtggggctgcccccgccgccgccgccgcctgcccgcaggatcgcggtgccagtgctggtgcgcgatggcaagccatgcctaggggactcggcgccctacgcgcctgcctacggcgtgggcctcaatccctacggttataacgcctaccccgcctatccgggttacggcggcgcggcctgcagccctggctacagctgcactgccgcttaccccgccgggccttccccagcgcagccggccactgccgccgccaacaacaacttcgtgaacttcggcgtcggggacttgaatgcggttcagagccccgggattccgcagagcaactcgggagtgtccacgctgcatggtatccgagcctggtagggaagggacccgcgtggcgcgaccctgaccgatcccacctcaacagctccctgactctcggggggagaaggggctcccaacatgaccctgagtcccctggattttgcattcactcctgcggagacctaggaactttttctgtcccacgcgcgtttgttcttgcgcacgggagagtttgtggcggcgattatgcagcgtgcaatgagtgatcctgcagcctggtgtcttagctgtccccccaggagtgccctccgagagtccatgggcacccccggttggaactgggactgagctcgggcacgcagggcctgagatctggccgcccattccgcgagccagggccgggcgcccgggcctttgctatctcgccgtcgcccgcccacgcacccacccgtatttatgtttttacctattgctgtaagaaatgacgatccccttcccattaaagagagtgcgttgaccccg

SEQ ID NO: 145935 - DNA, 975 bp, Artificial Sequence
  derived and/or modified sequence
atgttcccttcacctgcacttacgccaacaccattttccgttaaagacatcctgaatctcgagcagcaacagaggtcactggcagctgccggagagctgagtgcacgtctcgaggctaccctcgccccctcttcctgtatgctggcagccttcaaaccagaggcctacgccggtccagaggcggctgctccaggactgccagagctgcgagccgagctaggcagagcacctagcccagccaagtgtgctagcgccttccctgctgctcccgcattctacccccgagcatacagcgatccggatcctgccaaagatcctcgtgcggagaagaaagaactatgtgcactgcagaaggccgtagagctcgaaaaaaccgaagccgataacgccgaacgccctagagctaggcggcgtaggaaacctcgggtgctctttagccaagctcaagtgtatgagctcgagcgccgattcaaacagcagcggtatttaagcgcacctgagagggatcagctcgcaagcgtgctgaaacttacctccacccaggtaaagatctggtttcagaatcggcgttataagtgtaaaagacagaggcaggatcaaacattggaattggtaggcctgcctccaccccccccaccacccgccagaaggatagccgtgcctgtcctcgtgcgggacggtaagccatgtctgggggattctgctccatacgcgccagcatacggagttgggttgaacccttatggttacaacgcttatccagcttaccctggatacggcggcgccgcctgttctcctggatactcttgtactgccgcctaccccgcaggaccgtcccctgctcaaccggccacagcggcagctaataataatttcgtgaatttcggcgtaggggatctgaatgccgtgcagtcccccggaatcccgcagtccaacagtggagtgtccacattgcatggtatcagagcctggtag

SEQ ID NO: 145936 - DNA, 975 bp, Artificial Sequence
  derived and/or modified sequence
atgttccccagccctgccctgacccccacccccttctctgtgaaggacatcctgaacctggagcagcagcagaggagcctggccgccgccggggagctgagcgcccggctggaggccaccctggcccccagcagctgcatgctggccgccttcaagccagaggcctatgccggccctgaggccgccgcccctggcctgcctgagctgcgggcagagctgggccgggcccccagccctgccaagtgtgccagcgccttccctgctgccccagccttctacccccgggcctacagcgaccctgaccctgccaaggaccccagggctgagaagaaggagctgtgtgccctgcagaaggctgtggagctggagaagacagaagctgacaatgctgagcggccccgggccaggagaagaaggaagccccgggtgctcttcagccaggcccaggtgtatgagctggagcggcgcttcaagcagcagcgctacctgagcgcccctgagcgggaccagctggcctctgtgctgaagctgaccagcacccaggtgaagatctggttccagaacagacgctacaagtgcaagaggcagaggcaggaccagaccctggagctggtgggcctgcccccacctcctcctcctccagccaggagaattgctgtgcctgtgctggtgagagatggcaagccctgcctgggggacagcgccccctatgccccagcctatggagtgggcctgaacccctacggctacaatgcctacccagcctacccaggctatggaggagctgcctgcagccctggctacagctgcacagctgcctacccagctggccccagccctgcccagcctgccacagctgctgccaacaacaactttgtgaactttggagtgggggacctgaatgctgtgcagagccctggcatcccccagagcaacagcggcgtgtccaccctgcacggcatccgggcctggtag

SEQ ID NO: 145937 - DNA, 975 bp, Artificial Sequence
  derived and/or modified sequence
atgttccccagccccgccctgacccccacccccttcagcgtgaaggatatactgaacctggaacagcagcaacgctcattagcagcagcaggtgagctgtccgcgagactggaagctaccctcgctccctcaagctgcatgcttgcagcctttaaacctgaagcctatgccggacctgaggcagccgccccaggactcccagagctacgagccgaactggggagagctccatctcctgcaaagtgcgcctcggccttccctgcagctcctgctttttaccccagagcgtactccgaccctgacccagccaaagacccccgcgctgagaagaaagagctatgtgcactgcagaaagctgtggaattagagaaaaccgaagctgataatgctgaaaggccccgcgccaggcggagacggaaaccacgcgtactatttagccaggctcaggtctacgaacttgagcggcgctttaagcagcaaaggtatctgtcagccccggaacgcgaccaattggcttctgttctgaaacttacttccacccaggtaaagatatggttccagaacaggcggtataagtgtaaaaggcagcggcaggaccagaccttggagcttgttggcctcccacccccccctcctcccccggccagacgaatcgctgtcccagtgcttgtgagggacggaaagccgtgcttgggcgattccgccccttatgccccagcgtatggcgttgggctgaatccatacggctataacgcctatcccgcctatcccggttatggcggggcagcatgtagccccggctatagctgtactgcggcctatcccgcaggcccgagtccagctcagccagccaccgccgctgctaataataatttcgtgaactttggcgtgggagacctaaacgccgtgcaaagcccgggaatcccccagagcaactctggtgtctctacattgcatggtatccgtgcatggtag

SEQ ID NO: 145938 - DNA, 1709 bp, Artificial Sequence
  derived and/or modified sequence
tttttttgccgtatgactatattaggtgacacgaaactgctcatcgctcctgtcatcgaggcccctggcccaatggcaggctgagtccccctcctctggcctggtcccgcctctcctgccccttgtgctcagcgctacctgctgcccggacacatccagagctggccgacgggtgcgcgggcgggcggcggcaccatgcagggaagctgccaggggccgtgggcagcgccgctttctgccgcccacctggcgctgtgagactggcgctgccaccatgttccccagccctgctctcacgcccacgcccttctcagtcaaagacatcctaaacctggaacagcagcagcgcagcctggctgccgccggagagctctctgcccgcctggaggcgaccctggcgccctcctcctgcatgctggccgccttcaagccagaggcctacgctgggcccgaggcggctgcgccgggcctcccagagctgcgcgcagagctgggccgcgcgccttcaccggccaagtgtgcgtctgcctttcccgccgcccccgccttctatccacgtgcctacagcgaccccgacccagccaaggaccctagagccgaaaagaaagagctgtgcgcgctgcagaaggcggtggagctggagaagacagaggcggacaacgcggagcggccccgggcgcgacggcggaggaagccgcgcgtgctcttctcgcaggcgcaggtctatgagctggagcggcgcttcaagcagcagcggtacctgtcggcccccgaacgcgaccagctggccagcgtgctgaaactcacgtccacgcaggtcaagatctggttccagaaccggcgctacaagtgcaagcggcagcggcaggaccagactctggagctggtggggctgcccccgccgccgccgccgcctgcccgcaggatcgcggtgccagtgctggtgcgcgatggcaagccatgcctaggggactcggcgccctacgcgcctgcctacggcgtgggcctcaatccctacggttataacgcctaccccgcctatccgggttacggcggcgcggcctgcagccctggctacagctgcactgccgcttaccccgccgggccttccccagcgcagccggccactgccgccgccaacaacaacttcgtgaacttcggcgtcggggacttgaatgcggttcagagccccgggattccgcagagcaactcgggagtgtccacgctgcatggtatccgagcctggtagggaagggacccgcgtggcgcgaccctgaccgatcccacctcaacagctccctgactctcggggggagaaggggctcccaacatgaccctgagtcccctggattttgcattcactcctgcggagacctaggaactttttctgtcccacgcgcgtttgttcttgcgcacgggagagtttgtggcggcgattatgcagcgtgcaatgagtgatcctgcagcctggtgtcttagctgtccccccaggagtgccctccgagagtccatgggcacccccggttggaactgggactgagctcgggcacgcagggcctgagatctggccgcccattccgcgagccagggccgggcgcccgggcctttgctatctcgccgtcgcccgcccacgcacccacccgtatttatgtttttacctattgctgtaagaaatgacgatccccttcccattaaagagagtgcgttga

SEQ ID NO: 145939 - DNA, 1124 bp, Artificial Sequence
  derived and/or modified sequence
ctctggcctggtcccgcctctcctgccccttgtgctcagcgctacctgctgcccggacacatccagagctggccgacgggtgcgcgggcgggcggcggcaccatgcagggaagctgccaggggccgtgggcagcgccgctttctgccgcccacctggcgctgtgagactggcgctgccaccatgttccccagccctgctctcacgcccacgcccttctcagtcaaagacatcctaaacctggaacagcagcagcgcagcctggctgccgccggagagctctctgcccgcctggaggcgaccctggcgccctcctcctgcatgctggccgccttcaagccagaggcctacgctgggcccgaggcggctgcgccgggcctcccagagctgcgcgcagagctgggccgcgcgccttcaccggccaagtgtgcgtctgcctttcccgccgcccccgccttctatccacgtgcctacagcgaccccgacccagccaaggaccctagagccgaaaagaaagcctgaaattttaagtcaccgtctgtctccctcaccagggtgtgaactgccccgagggcagagacctcccgttttgttctccagcgccttgagccagcctgactttctacaaatgctgagtgagacgtgtcggtggctcccagtgcacttggcagagtgagccgcagccagctgggcgctccaggcaggacacagtggcctccacgaggatcccttaccattactgtgcggccgcgctccgtaggtcaagccgctcttaccaagcgtctctctgcctctctgttccccctcagagctgtgcgcgctgcagaaggcggtggagctggagaagacagaggcggacaacgcggagcggccccgggcgcgacggcggaggaagccgcgcgtgctcttctcgcaggcgcaggtctatgagctggagcggcgcttcaagcagcagcggtacctgtcggcccccgaacgcgaccagctggccagcgtgctgaaactcacgtccacgcaggtcaagatctggttccagaaccggcgctacaagtgcaagcggcagcggcaggaccagactctggagctggtggggctgcccccgccgccgccgccgcctgcccgcagg

SEQ ID NO: 145940 - DNA, 975 bp, Artificial Sequence
  derived and/or modified sequence
atgtttccttctccagccctcactcctacccctttctccgtaaaagacatcctgaacctggaacagcagcaaagaagcttagccgctgccggagagctatccgccaggctggaggctacactggcaccctccagttgtatgttagctgcttttaaaccagaggcttacgcaggtccagaagccgcagcccctgggttgccagagcttagagctgagctcgggcgagcgccaagtcccgctaaatgcgcaagcgcattcccagcagcccctgccttctatcctagagcttactctgatccagatcctgcgaaagatcctcgcgctgagaaaaaagagttgtgtgccctgcagaaggctgtggagcttgagaaaaccgaggccgacaacgccgagcgccctcgtgctcgtaggcggcgtaagcctagagtactgttctcccaggcccaggtgtacgagttagagaggaggtttaagcagcagaggtacctttctgctccggagagggaccagctggcatctgtgctaaaacttacctctactcaggttaagatttggttccagaatcgccgttataagtgcaaacggcagagacaggatcaaacattggaactcgtgggactgccccctcctcctcctccaccagcacgcagaatagccgttccagtgctggtgagggatggaaagccgtgtttaggtgatagcgcgccttacgcaccagcctacggcgttggcctgaacccttacggttataacgcctaccccgcttatccaggatatggcggagcagcatgcagccccggttacagttgcaccgccgcttatcccgcaggtccttccccagctcagcctgccaccgccgctgctaataataattttgttaattttggagtcggcgatctgaacgccgtccagagccctggtattcctcaatctaattcgggcgtgtccactttacatgggatccgcgcatggtag

SEQ ID NO: 145941 - DNA, 975 bp, Artificial Sequence
  derived and/or modified sequence
atgttccccagccccgccctgacccccacccccttcagcgtgaaggacatcctgaacctggagcagcagcagagaagcctggccgccgccggcgagctgagcgccagactggaggccaccctggcccccagcagctgcatgctggccgccttcaagcccgaggcctacgccggccccgaggccgccgcccccggcctgcccgagctgagagccgagctgggcagagcccccagccccgccaagtgcgccagcgccttccccgccgcccccgccttctaccccagagcctacagcgaccccgaccccgccaaggaccccagagccgagaagaaggagctgtgcgccctgcagaaggccgtggagctggagaagaccgaggccgacaacgccgagagacccagagccagaagaagaagaaagcccagagtgctgttcagccaggcccaggtgtacgagctggagagaagattcaagcagcagagatacctgagcgcccccgagagagaccagctggccagcgtgctgaagctgaccagcacccaggtgaagatctggttccagaacagaagatacaagtgcaagagacagagacaggaccagaccctggagctggtgggcctgcccccccccccccccccccccgccagaagaatcgccgtgcccgtgctggtgagagacggcaagccctgcctgggcgacagcgccccctacgcccccgcctacggcgtgggcctgaacccctacggctacaacgcctaccccgcctaccccggctacggcggcgccgcctgcagccccggctacagctgcaccgccgcctaccccgccggccccagccccgcccagcccgccaccgccgccgccaacaacaacttcgtgaacttcggcgtgggcgacctgaacgccgtgcagagccccggcatcccccagagcaacagcggcgtgagcaccctgcacggcatcagagcctggtag

SEQ ID NO: 145942 - protein, 66 aa, Artificial Sequence
  derived and/or modified sequence
MTSATSPIILKWDPKSLEIRTLTVERLLEPLVTQVTTLVNTSNKGPSGKKKGRSKKAHVLAASVEQ

SEQ ID NO: 145943 - protein, 905 aa, Artificial Sequence
  derived and/or modified sequence
MTSATSPIILKWDPKSLEIRTLTVERLLEPLVTQVTTLVNTSNKGPSGKKKGRSKKAHVLAASVEQATQNFLEKGEQIAKESQDLKEELVAAVEDVRKQGETMRIASSEFADDPCSSVKRGTMVRAARALLSAVTRLLILADMADVMRLLSHLKIVEEALEAVKNATNEQDLANRFKEFGKEMVKLNYVAARRQQELKDPHCRDEMAAARGALKKNATMLYTASQAFLRHPDVAATRANRDYVFKQVQEAIAGISNAAQATSPTDEAKGHTGIGELAAALNEFDNKIILDPMTFSEARFRPSLEERLESIISGAALMADSSCTRDDRRERIVAECNAVRQALQDLLSEYMNNTGRKEKGDPLNIAIDKMTKKTRDLRRQLRKAVMDHISDSFLETNVPLLVLIEAAKSGNEKEVKEYAQVFREHANKLVEVANLACSISNNEEGVKLVRMAATQIDSLCPQVINAALTLAARPQSKVAQDNMDVFKDQWEKQVRVLTEAVDDITSVDDFLSVSENHILEDVNKCVIALQEGDVDTLDRTAGAIRGRAARVIHIINAEMENYEAGVYTEKVLEATKLLSETVMPRFAEQVEVAIEALSANVPQPFEENEFIDASRLVYDGVRDIRKAVLMIRTPEELEDDSDFEQEDYDVRSRTSVQTEDDQLIAGQSARAIMAQLPQEEKAKIAEQVEIFHQEKSKLDAEVAKWDDSGNDIIVLAKQMCMIMMEMTDFTRGKGPLKNTSDVINAAKKIAEAGSRMDKLARAVADQCPDSACKQDLLAYLQRIALYCHQLNICSKVKAEVQNLGGELIVSGLDSATSLIQAAKNLMNAVVLTVKASYVASTKYQKVYGTAAVNSPVVSWKMKAPEKKPLVKREKPEEFQTRVRRGSQKKHISPVQALSEFKAMDSF

SEQ ID NO: 145944 - DNA, 2718 bp, Artificial Sequence
  derived and/or modified sequence
atgacctccgcgaccagcccaataattttaaaatgggatccgaaatctctggagatccgaaccctaacagtagagagacttctcgaacctctggttactcaggtaactaccttggtgaatacttcgaataaggggccatcaggcaagaaaaaaggcaggtctaaaaaggcgcatgttctggccgccagcgtcgagcaggccacccagaacttcctggaaaagggtgaacaaattgcaaaagaaagccaagatctgaaggaagaactcgtggcagccgttgaagatgtgcggaagcagggtgagactatgagaatcgctagctccgagttcgcagacgacccatgcagcagcgtgaagagggggaccatggtgagagccgccagagctcttctctccgcggttacgaggctcctcattctcgccgatatggccgatgtcatgcgcttgctatctcacttaaaaatcgtggaggaggcccttgaagctgtaaagaacgcaacaaacgagcaggatctcgcgaacagattcaaggaattcgggaaagagatggtgaagttgaattatgtagccgcaagaagacagcaggagctgaaagacccacattgtcgtgacgaaatggccgcagcacgcggtgctctcaaaaaaaacgccaccatgctgtacactgcatctcaggccttcctgcggcacccagacgtggctgccactcgggcaaatcgcgactacgtgttcaagcaagtccaggaagccattgcgggcatatctaatgccgcccaggctacgagcccaaccgatgaggctaaaggacataccggaatcggcgaacttgccgctgccctcaacgaatttgataacaagatcatccttgacccgatgacattttcggaagcccgttttagaccgtctctggaggagcgcctggagagcattataagcggcgccgcactgatggcagattcatcgtgcacacgcgacgataggagagaaagaattgtcgcagagtgcaacgcagtgcgccaggccctccaggaccttctgagtgagtatatgaacaacacgggcaggaaggagaaaggagatcccctcaacatcgcaatagataagatgacgaaaaagaccagagatctgcgccgtcagttacgcaaggcagtgatggatcatatctccgacagtttcctagagaccaacgtgcccttgctggtactcatcgaggcagcgaaaagcgggaacgagaaggaggtcaaggagtatgcacaggtatttcgcgagcatgcaaataagcttgtggaagtggccaaccttgcttgctctatctccaacaacgaagagggcgtgaagttagtgagaatggccgccactcagatcgattccctatgcccccaggtaatcaacgcggctttgactctagcggccagaccacagtcgaaggttgctcaagacaacatggatgtgtttaaggatcagtgggagaagcaggtaagagtgctgactgaggcggtggatgacatcaccagtgtagacgatttcctctctgtttctgaaaaccacatcctggaggacgtgaataagtgcgtcatcgctctccaagagggggacgtggatacattggacagaacagctggcgcgatcagagggcgcgccgcaagggtgatccacatcatcaatgcagagatggagaattacgaagcaggagtctacactgaaaaggtcttagaggcaacaaagctgttgtcagaaaccgtgatgcctcgatttgcagagcaggtcgaagttgctatcgaagctctttctgcaaatgtgcctcagccatttgaagagaacgagtttatcgatgccagcaggctcgtctacgatggcgtcagagacattcggaaggcagtcctcatgattagaacgccagaggaactagaggatgactccgatttcgaacaagaggactacgatgtcagatctagaaccagcgtgcagacggaggatgaccagctgattgccgggcagtcagccagggcaatcatggcccagctgccacaggaggaaaaagcgaagattgccgagcaggttgagatttttcaccaggaaaagagtaagcttgatgccgaagtcgccaagtgggacgactcaggaaatgacataatcgtgctcgctaaacagatgtgcatgatcatgatggaaatgactgacttcaccagaggaaaaggacctctcaagaatacatctgatgttatcaacgcagctaagaagatcgccgaggccggctcgcgcatggacaaacttgcccgggcagtcgcagaccagtgtcccgattctgcatgcaaacaagacctcttggcctaccttcagaggattgcactctactgtcatcagttgaacatatgttccaaggtgaaagctgaagtccaaaacttgggcggagagttaattgtctcgggactggactcagctacctcattaatacaggctgctaaaaacctgatgaatgcagtggtcctgacagtgaaagcgagttatgtcgcctcaaccaaatatcaaaaagtttacgggaccgctgccgttaacagccccgtggtttcttggaagatgaaggcacctgaaaagaaaccgctggtgaagcgcgagaaaccagaggagttccagacacgcgtcaggcgcggttctcaaaagaaacacatttccccagtacaggcactctctgagttcaaagcaatggacagcttctag

SEQ ID NO: 145945 - DNA, 2718 bp, Artificial Sequence
  derived and/or modified sequence
atgacaagcgcaaccagcccaatcatcctaaagtgggatcctaagtcactcgagattcgaactcttaccgttgagcggctgctggagcctctggtcacacaagtcaccaccctggtcaatacctccaacaaggggccatctggtaaaaaaaagggccggtccaaaaaggctcacgtcctggccgcaagtgtggagcaggccactcaaaatttcctcgaaaaaggggagcagattgcaaaggagagccaagatttgaaggaggaactggtggcagccgtagaggatgttcggaaacagggcgaaacaatgagaatcgctagctccgagttcgctgacgacccctgttcttctgtaaaacgtggcacaatggtccgcgcagctagagcactgctctcagctgtcacccgcctgcttattctggccgatatggctgatgtcatgaggttgttgtcccacctcaagatcgtggaggaagccctggaagccgtcaagaatgcaactaacgagcaggacctggcaaacagatttaaggaatttggaaaggagatggtgaaattgaattacgtggcggctagacggcagcaggagctgaaggatcctcattgccgagatgagatggccgcagcccggggtgctttaaagaagaatgctaccatgctgtatactgctagtcaggcttttttaagacaccccgatgtcgccgccacacgggctaatagagactatgtcttcaagcaggtgcaggaggccatcgccggcatcagcaacgcagcgcaggcaaccagccccacagatgaggcaaaaggacacactggaataggcgaactggccgccgcccttaatgaattcgacaacaagatcatactcgatccaatgaccttctctgaggcccgtttccgcccctcgctcgaggagagactagagtccatcatcagcggcgccgccctcatggctgactccagctgtacgagggacgacagaagagagcggatcgtcgcagagtgcaacgctgtccgccaggccctgcaggatctgctgtctgaatacatgaataatacaggccggaaagaaaaaggtgatccgctaaacatcgctatcgataagatgactaagaagaccagagacctaagaaggcagctcagaaaggctgtcatggatcacataagcgattccttcctggagacgaatgttccacttttggtactcatcgaggctgccaagtcggggaatgagaaagaagtaaaagagtatgctcaggtcttccgagagcacgctaacaagctggtggaggtagctaaccttgcttgtagcatcagcaacaacgaagagggagtcaaactcgtgcgtatggcagctactcagattgattcactgtgcccgcaggtaattaacgccgctttgactctcgcggcgcggccacagtccaaagttgcccaggataatatggatgttttcaaagatcagtgggaaaaacaggtgagagtgctaacagaggcagtggacgacatcacgagtgtggatgactttcttagcgtttctgagaatcacatcctcgaagatgtcaataaatgtgttattgctttgcaggaaggagatgtcgatacccttgatcggacagccggcgctatccgagggagggccgcccgcgtaattcacatcataaatgcggaaatggagaactatgaggctggagtgtacaccgagaaggtactggaagctaccaaactgctgtctgagacagtcatgccccgcttcgcagagcaggtcgaagtggcaattgaggcactctccgccaacgttccacagcctttcgaggagaacgagtttattgatgccagtcggttggtgtatgatggggtcagagacataagaaaggccgtgttaatgattcgtactccagaggaactggaagatgactctgattttgaacaggaggattacgacgttagaagccggacaagcgtgcagacggaggatgatcaactcattgctggacagtctgctagggctattatggcacaactcccccaagaagaaaaggctaagatcgcagagcaggtcgagatatttcatcaagagaagagtaaactggacgcggaagttgccaaatgggacgattccggtaacgacatcatcgtgctggccaagcagatgtgcatgatcatgatggagatgacagacttcactaggggcaagggtccacttaagaataccagcgatgtgattaatgccgccaagaagatcgcagaggccggatcacgaatggacaaattagcaagagcagtggcagaccagtgccccgatagcgcttgtaaacaggacttgctcgcctaccttcagcgcattgccctttactgtcaccaacttaacatttgtagcaaggtcaaagccgaggtccaaaacctagggggcgagcttatcgtgtccggtctggacagcgcaacatccctgattcaggccgcaaagaacctgatgaacgccgtggttctcaccgtgaaggcttcgtacgtggcgtccacgaaataccagaaagtgtacggcactgctgctgtaaactccccagtagtgagttggaagatgaaggctcccgaaaagaaacccctggtgaagcgggaaaaacccgaggagttccagacccgggtgcgcagaggatctcagaagaagcatattagcccagtccaggccctgagtgagttcaaagcgatggactcattttag

SEQ ID NO: 145946 - DNA, 2718 bp, Artificial Sequence
  derived and/or modified sequence
atgacaagcgcaacaagtcctattatactgaagtgggacccaaagtctctcgagataagaaccctaactgtggaacgccttctcgaacctttggtcacgcaggtcaccacacttgtaaacacttccaataaggggccaagtgggaagaagaaaggcaggtccaaaaaagcccacgtgcttgccgcatccgtcgagcaggctactcagaacttccttgaaaagggcgagcaaatcgctaaagagtcccaggacctgaaagaggagctcgttgccgccgtggaggatgtgcgcaagcagggggagaccatgcgtatcgcttcctcagagttcgcagatgatccctgcagcagcgtgaagcggggaaccatggtccgggccgcacgagcgctgctgagcgccgtcacacgacttctaatcctggcagatatggcagacgtcatgagactgcttagtcatctgaaaatagtagaggaggccctcgaggctgtaaagaatgccactaacgaacaggacttggccaataggtttaaagagttcggaaaagagatggtgaagctcaactacgtggctgcccgtcgtcagcaggagttgaaggatccacactgtcgtgatgaaatggctgcagctaggggagctctgaagaaaaatgccaccatgctttatactgcctctcaggcgttcctgagacaccccgacgtggctgccacaagagctaatcgggattacgttttcaagcaggtgcaggaggctatcgccggaatctctaacgcagctcaggccacatcccctaccgatgaggccaaagggcacacagggattggagagctggccgctgcacttaacgagtttgataacaagattatcctcgatccgatgaccttcagcgaggcacgatttcgccccagcctggaagagagactggaaagcattataagcggagcagccctgatggccgactccagctgcacacgcgatgataggcgggaacgtattgtcgctgagtgcaacgcagtcaggcaagcattgcaagatctgctgagtgaatatatgaacaatacggggaggaaggagaaaggtgatccactgaatatcgccatcgataaaatgaccaagaaaacaagagacctcagaaggcagctgcgcaaggcagttatggaccacatctctgattcatttctcgagactaatgtccccctcctggttcttatagaggccgctaagtctggcaacgagaaggaggtgaaagaatacgcccaagtgttccgagagcacgccaacaagctcgtggaggtcgcaaacctcgcctgttctatcagtaacaatgaggagggagtgaaactcgtgagaatggctgctacccagatcgacagcctgtgcccccaagtcattaacgctgccctgactctggctgctcggccacagtctaaggttgctcaggataacatggacgtatttaaggatcagtgggagaagcaggttcgggtactaacggaggcagtggacgatataacctccgttgacgattttttatccgtgagtgaaaatcatatcctggaagatgtcaacaaatgtgtgattgctctacaggagggagatgtcgacactctagaccgtactgctggtgccattcgcggaagagcggcccgcgtaatccatatcattaatgcagagatggagaattacgaggctggcgtctatacagaaaaggtcctagaggcaaccaaactcctgagcgaaactgtgatgcctagatttgcagaacaggttgaagtggcgattgaggcgctgtctgctaacgtgccccagccctttgaggagaatgagttcatcgacgcctcccgtctggtgtatgacggggtccgcgatatccgcaaagccgtattgatgatacgtacgccagaggaacttgaggatgatagcgatttcgagcaggaggattacgacgttagatcaagaactagcgtacaaacagaagatgatcagctgatcgctggacagtccgctagagctataatggcccaactgccccaagaggagaaggcaaagatcgctgaacaggtagagatctttcatcaagaaaaaagtaagctagacgcagaggtggctaagtgggatgactctggaaatgacattatcgtcctcgccaaacagatgtgcatgattatgatggaaatgacagactttacgagagggaaggggccgttgaaaaatacttccgacgtgatcaacgcagccaagaagattgcggaagccggaagccgtatggacaagctagccagggctgtggccgatcagtgtcctgattcagcttgcaagcaggaccttctcgcctacctgcagcgtatagcactgtactgtcatcagcttaacatatgcagcaaggtgaaagctgaagtgcaaaatctgggtggtgagttgatagtgtcaggactagactctgccacctcattgattcaggcggccaagaatctgatgaatgcagtggtcctcacggtcaaagcgagttacgtggcctcaactaagtatcaaaaagtgtatgggacggctgcggtgaattctcctgttgtcagttggaagatgaaagctccagagaaaaagcccctagtgaaacgcgaaaagcccgaagaatttcagactcgagtgcggaggggcagccaaaagaaacacatctcacccgtccaggctctgagcgagttcaaggccatggattctttctag

SEQ ID NO: 145947 - DNA, 2718 bp, Artificial Sequence
  derived and/or modified sequence
atgaccagcgccaccagccccatcatcctgaagtgggaccccaagagcctggagatccgcaccctgactgtggagcggctgctggagcccctggtgacccaggtgaccaccctggtgaacaccagcaacaagggccccagcggcaagaagaagggccgcagcaagaaggcccacgtgctggccgcctctgtggagcaggccacccagaacttcctggagaagggggagcagatcgccaaggagagccaggacctgaaggaggagctggtggccgctgtggaggatgtgaggaagcagggcgagaccatgagaattgccagcagcgagtttgctgatgacccctgcagctctgtgaagaggggcaccatggtgcgggccgcccgggccctgctgtctgctgtgacccggctgctgatcctggccgacatggctgatgtgatgaggctgctgagccacctgaagatcgtggaggaggccctggaggccgtgaagaatgccaccaatgagcaggacctggccaaccgcttcaaggagtttgggaaggagatggtgaagctgaactacgtggccgcccggcggcagcaggagctgaaggacccccactgcagagatgagatggccgccgcccggggggccctgaagaagaatgccaccatgctgtacacagccagccaggccttcctgcggcacccagatgtggccgccacccgggccaacagagattatgtgttcaagcaggtgcaggaggccatcgccggcatcagcaatgctgcccaggccaccagccccacagatgaggccaagggccacactggaattggagagctggccgccgccctgaatgaatttgacaacaagatcatcctggaccccatgaccttcagcgaggcccgcttccggcccagcctggaggagcggctggagagcatcatcagcggggccgccctgatggctgacagcagctgcaccagagatgacagaagagaaagaattgtggccgagtgcaatgctgtgcggcaggccctgcaggacctgctgtctgagtacatgaacaacacaggcaggaaggagaagggggaccccctgaacatcgccatcgacaagatgaccaagaagacccgggacctgcggcggcagctgaggaaggctgtgatggaccacatcagtgacagcttcctggagaccaacgtgcccctgctggtgctgattgaagctgccaagtctggaaatgagaaggaggtgaaggagtatgcccaggtgttccgggagcacgccaacaagctggtggaggtggccaacctggcctgcagcatcagcaacaatgaggagggcgtgaagctggtgaggatggccgccacccagattgacagcctgtgcccccaggtgatcaatgctgccctgaccctggccgcccggccccagagcaaggtggcccaggacaacatggatgtgttcaaggaccagtgggagaagcaggtgcgggtgctgacagaagctgtggatgacatcacctctgtggatgacttcctgtctgtgtctgagaaccacatcctggaggatgtgaacaagtgtgtgattgccctgcaggagggagatgtggacaccctggacagaacagctggggccatccggggccgggccgcccgggtcatccacatcatcaatgctgagatggagaactatgaagctggggtgtacacagagaaggtgctggaggccaccaagctgctgtctgagaccgtgatgcccaggtttgctgagcaggtggaggtggccatcgaggccctgagcgccaacgtgccccagccctttgaggagaatgagttcattgatgccagccggctggtgtatgatggagtgcgggacatcaggaaggctgtgctgatgatccgcaccccagaggagctggaggatgacagcgactttgagcaggaggactatgatgtgcgcagcaggacctctgtgcagacagaagatgaccagctgattgctggccagagcgcccgggccatcatggcccagctgccccaggaggagaaggccaagattgctgagcaggtggagatcttccaccaggagaagagcaagctggatgctgaggtggccaagtgggatgattctggaaatgacatcatcgtgctggccaagcagatgtgcatgatcatgatggagatgacagacttcacccggggcaagggccccctgaagaacaccagtgatgtgatcaatgctgccaagaagattgctgaggccggcagcaggatggacaagctggcccgggctgtggccgaccagtgcccagattctgcctgcaagcaggacctgctggcctacctgcagagaattgccctgtactgccaccagctgaacatctgcagcaaggtgaaggccgaggtgcagaacctgggcggggagctgattgtgtctggcctggacagcgccaccagcctcatccaggccgccaagaacctgatgaatgctgtggtgctgactgtgaaggccagctatgtggccagcaccaagtaccagaaggtgtatggaacagctgctgtgaacagccctgtggtgtcctggaagatgaaggcccctgagaagaagcccctggtgaagcgggagaagccagaggagttccagaccagggtgcggcggggcagccagaagaagcacatcagccctgtgcaggccctgtctgagttcaaggccatggacagcttctag

SEQ ID NO: 145948 - DNA, 2718 bp, Artificial Sequence
  derived and/or modified sequence
atgaccagcgccaccagccccatcatcctgaagtgggaccccaagtccctagagatccggacccttacggttgaacgcctccttgagccccttgttacccaggtgacaacgttagtcaacacatctaataaagggcctagtggtaaaaagaagggcagaagtaaaaaagctcacgttctggcagccagcgtggagcaggccacccaaaatttcctagaaaaaggcgaacagattgctaaggagagccaagacctcaaggaggagctggtagcagccgtcgaagacgtcaggaagcagggcgaaacaatgcgtatcgcaagttccgaattcgcggacgatccctgcagtagtgtcaagagggggaccatggtacgggccgcccgggcactcctttctgccgttacccgactcctgattctcgcggatatggcagacgtgatgcgtcttctcagccatctaaaaatagtggaagaggctctggaagctgttaagaacgccactaatgagcaggatctggccaaccgattcaaagaatttggcaaagaaatggtgaagcttaactatgttgctgcccggcgccagcaggaattgaaagacccccattgtcgcgacgaaatggcagcagcccggggcgccttgaagaagaacgccacgatgctatacacagccagtcaagccttcttacgtcaccccgatgtcgccgccactcgtgctaatcgcgactacgttttcaaacaagttcaggaagccatcgccggaatcagtaacgcagcccaggcaacctcccctacagatgaagctaaaggccacacagggataggtgaacttgccgcagctctgaacgaattcgacaataaaataatactagaccccatgacatttagtgaggccagattccgcccctccctggaggaacggctggagagcatcatatcaggcgccgctctcatggccgattcaagctgcacccgggacgatagacgtgaacggatcgtggccgaatgcaacgcagtgcgacaggccctccaggatctgctgtccgagtacatgaataacaccggaagaaaggaaaaaggcgatccactcaacatcgctattgataagatgaccaagaaaacaagggacctgcgccgccagctacgcaaagccgtaatggatcatatatctgactctttcctggagaccaacgtgcccctgttggtcctcatcgaagctgccaagtccgggaatgagaaagaagttaaggagtacgctcaggtctttagggaacatgcgaataagctggttgaagtggcaaatctggcttgcagtatttctaacaacgaggagggcgtgaagctggtcaggatggctgccacacaaatcgattccctgtgcccacaggtgatcaatgcagctcttaccctggctgctagaccccagtcgaaggtcgcccaagacaacatggacgtcttcaaggaccaatgggagaagcaagtgcgtgtcctcaccgaggctgtggatgacatcacaagtgtcgatgactttctgtcagtatcagaaaaccatatcttggaggacgtgaacaaatgtgtcatagctcttcaggagggggatgttgacactttagatagaaccgccggtgcaattcgcggtcgagccgcccgcgttatccatatcattaatgctgagatggagaactacgaggccggcgtgtacactgagaaagtgctggaggccaccaagttactgagtgaaaccgttatgcctaggttcgcagagcaggtcgaggttgccatcgaggctcttagcgcaaacgtgccccagccctttgaggagaatgagttcattgatgctagccgacttgtttatgacggggtacgtgacatacgcaaggcagtccttatgataaggacaccagaagagctggaagatgatagcgatttcgaacaggaggattacgacgttcggagccggacctccgttcaaacagaagatgatcagctcatcgccggacagagtgccagagccatcatggcacagctgccccaggaagagaaagccaaaattgcggaacaagttgagatcttccaccaggagaaatcaaaactggatgctgaagtggcgaaatgggacgattccggtaacgacattatcgtcctagccaagcagatgtgcatgattatgatggaaatgaccgatttcaccaggggcaagggccctctcaagaacacgtcagatgtgattaatgccgcaaaaaaaatcgccgaagctggaagcagaatggacaaactggcccgagctgtggccgatcagtgccccgattccgcatgcaagcaggatctgctcgcctacttacaaagaatcgcactctattgtcaccagttaaatatctgtagcaaggtgaaggcggaggtgcagaatctaggcggcgaactgatcgtgtctggacttgactccgccacttccctgatccaggccgccaagaatcttatgaatgctgtggtcctaaccgtgaaagcttcgtatgtggctagcacaaaataccaaaaagtgtacggcactgccgcagtgaactccccagtggtgtcttggaagatgaaggcccctgaaaagaaacccttagttaagcgggaaaaaccggaggagttccaaacgcgggtacggcggggttcgcagaaaaaacatatttcccctgtacaagctctctccgaatttaaggccatggactcattctag

SEQ ID NO: 145949 - DNA, 2718 bp, Artificial Sequence
  derived and/or modified sequence
atgaccagcgccaccagccccatcatcctgaagtgggaccccaagtcactcgagatcaggaccctgactgtcgagaggctgctagagccactagtaactcaggtcacaactcttgtgaacacatcaaacaaaggcccctccggcaagaaaaagggtagatccaagaaggcgcacgttttggccgcttccgttgagcaggctactcagaatttcctggagaagggagagcagatcgcaaaagagtcacaggatcttaaggaggagctggtggcagctgtggaggatgtacgtaaacagggtgaaactatgcggattgcaagctcggagttcgctgatgacccctgctcatccgtaaagcgcggtacaatggtgagggccgcgagagctttgctgagcgcagtaaccaggcttctgatcctcgcagacatggcagatgtcatgaggctcttgagtcacctgaagatagtcgaagaggctctggaggccgttaagaatgccactaacgagcaggatctcgcaaataggttcaaggagtttggaaaggaaatggtcaagcttaactatgtggctgcacggcgacagcaggagctgaaggacccgcattgcagggatgagatggcagcagcaaggggcgcgctcaaaaagaatgcgaccatgctgtatacagcgtctcaagcctttctccgccaccctgatgttgctgcaactcgagctaatcgtgattatgtgttcaaacaggtccaagaggctatcgccggcatctccaacgccgcccaagctaccagccccaccgatgaggccaaggggcatactggcattggagaattagccgctgcactgaatgagttcgacaataagatcattttggaccctatgactttttctgaagcaagatttaggccttcactggaagagcggcttgagagcattatttcaggcgcggctctaatggcagattcatcatgtaccagagacgatagacgtgagcggatcgtggcggagtgcaatgcagtaagacaggccctgcaagatcttttgtcagagtatatgaacaataccggtcgtaaggagaaaggagacccccttaatattgccattgataaaatgactaagaaaacccgcgatctgagaaggcagcttaggaaggctgtgatggaccacattagcgatagcttcctggaaacgaacgtaccccttctagtgctcatcgaggcagctaaaagcggaaacgaaaaggaggtcaaggaatacgcccaagtatttcgggaacacgctaacaaactggtggaggtggcaaatctcgcttgtagtatcagtaataatgaggaaggcgtaaaactggttcgcatggccgctactcaaattgattcactgtgccctcaagtgataaacgctgcattgactctggccgcacggccccagtcaaaagtggcccaggataacatggacgtgttcaaggaccagtgggagaaacaagtgagagtactcacggaagcagtggatgacattactagcgtagacgattttctgtccgtgtcagaaaatcatatacttgaagacgttaataaatgcgtgatagcccttcaggagggcgacgttgacaccttagaccgcacagcaggcgcaatcagaggcagagctgctcgtgtcatccatattattaacgcagaaatggaaaactacgaggcaggcgtgtacacggaaaaagtgcttgaggcaactaagcttctgtctgaaacagtgatgccccgttttgccgaacaggtcgaagtcgcgatcgaagccttatctgctaatgtgccgcaaccttttgaggaaaatgagttcatcgatgctagccgcctggtgtatgacggggtccgcgacattcgcaaagccgttttgatgatccgcacccccgaggaactggaggacgactctgacttcgagcaggaagactatgatgtgcgcagtagaacgtcagttcaaactgaggacgaccagctcatcgctggtcagagcgccagggccatcatggcccagctgccacaagaggagaaagccaagattgccgagcaggttgaaattttccatcaagagaaatcgaagttagacgctgaggtcgccaagtgggacgacagtggcaacgacattatagtcctggctaaacagatgtgcatgatcatgatggaaatgacagactttactaggggcaaaggaccgctcaagaatacaagcgacgtcatcaacgcagcaaagaaaattgcagaggccggatctcgcatggacaagttggcccgcgcagtcgcagatcaatgtccagatagcgcatgtaaacaggacctgctggcttatctccagcgtatcgcgctgtactgtcaccaactgaatatatgtagtaaggtcaaggctgaagtccagaacctgggaggcgagctcattgtctccgggctggattcagctacgtccttaatacaggccgccaagaaccttatgaacgctgttgttcttaccgtgaaagcttcttacgtcgcttctacaaagtaccagaaagtttacgggactgccgctgtgaatagtcccgtggtctcttggaagatgaaggctccggaaaagaagcctctagtgaaacgagagaagcccgaggagttccagacaagagtccggagaggctcccaaaagaaacacatatcccccgtacaagccctctccgagtttaaggccatggactcattctag

SEQ ID NO: 145950 - DNA, 2718 bp, Artificial Sequence
  derived and/or modified sequence
atgaccagcgccaccagccccatcatcctgaagtgggaccccaagtcactggagattaggacactgaccgtggaacgcctgcttgagcctctggtaacacaggtcaccactctggtcaacacctctaataagggtccctcaggaaaaaaaaagggccggtctaaaaaggcccacgtcttagccgcttcagtggagcaggctactcaaaactttctggaaaaaggcgagcagattgcaaaggagagtcaggatctgaaggaagagctcgtggctgccgtggaagacgtcaggaaacaaggtgaaactatgaggattgcctcctctgaattcgctgatgacccatgctcatccgtcaagcggggcaccatggtgagagcggccagagcactcctgagtgctgtgacaagattgcttatcctcgcggatatggccgatgtaatgaggttactctcacacctgaagattgtagaggaagcactcgaggctgtaaagaacgcgactaacgaacaggatttggcaaatcggttcaaggagtttgggaaagagatggtcaaactcaactatgtggccgcaagacgccagcaggaactgaaggacccacactgccgcgacgaaatggcggccgccagaggcgctttgaagaaaaatgctactatgctatacacagcctcccaggcttttcttcgccatcctgacgtcgccgcaactagagccaaccgggactatgtgtttaagcaggtgcaggaagccatcgccggcatatccaatgctgcccaagcaactagtccgacagatgaggccaaaggccacactggaatcggtgagctggctgccgcactaaacgagtttgataataaaatcatcctggaccctatgacattctcggaggcgagattcagacctagcctggaggagcgcctggagtccataattagcggggcagcgctaatggccgattcctcttgcacgcgcgacgaccgtcgggagaggattgtggccgaatgcaatgcggtgagacaagccctacaggatctattatcagaatatatgaataacactggccgaaaagagaagggggatcctctaaatattgcaatcgacaagatgaccaagaaaacacgcgatctgcggcgccagttgaggaaggcagtcatggaccacatcagtgactcatttttagaaactaacgtcccgcttctggtgctgattgaggccgccaagagtggtaatgagaaagaggtgaaagaatacgctcaagtattcagagaacacgcgaataagctagttgaggtcgccaacctggcctgctccatttctaacaatgaggagggggtcaaactggtgcggatggccgccacacagatcgattccttgtgccctcaagttattaatgccgccttaacactggccgcccgtccacagtctaaagtggcgcaggataacatggatgttttcaaggatcagtgggagaaacaagtcagagtcttaactgaggcggttgacgatatcacttccgtggacgatttcctgtccgtgtcggaaaaccacatactggaggatgtcaacaaatgcgtgatcgctcttcaggaaggcgacgtggataccctagataggacagcgggcgcaatacgcggccgggccgctcgagtgattcacatcattaatgccgagatggagaactacgaggctggggtctacaccgagaaggttctggaggctaccaagctgctctccgagacagtaatgcccaggttcgccgagcaggtcgaagtagctatagaggctctgtccgctaacgtgccccaaccattcgaagagaatgaattcattgacgcaagcagactggtttacgacggggttcgggatattcggaaggctgtcctgatgatcaggacacctgaagaactagaggacgacagcgacttcgagcaagaagattacgacgtgaggtcacgcacatcagtccagacggaagacgatcagttaatcgccgggcaatcagcccgagccattatggcccaacttccgcaggaggaaaaggccaagattgccgagcaagtggagatcttccatcaggaaaagagcaaactggatgccgaagtagcgaagtgggacgactctggcaacgatataatcgttcttgcaaaacagatgtgcatgattatgatggagatgactgactttactaggggaaagggcccattgaagaatacaagtgacgtgatcaacgctgctaaaaagattgccgaagccggatctcgcatggataagctggcaagagccgtggctgatcagtgccctgatagcgcctgtaagcaagatctcctggcctatctgcaaaggatcgccttatactgccatcaactgaatatttgttcaaaagtaaaggcagaagtgcaaaatctcgggggggagttgatcgtttccggtctcgacagcgcaacaagtttaatccaggctgccaagaacctgatgaacgcggttgtgctcaccgtaaaagcctcttatgtcgcatcaactaaatatcagaaggtatacggtacagccgcagtgaattctcctgtggtttcgtggaagatgaaggcgcctgaaaaaaagcccctcgtgaagagggagaaacctgaggaattccaaacccgggttaggcggggaagccagaagaagcatatttcccccgtgcaagccctgagcgagttcaaagccatggacagcttttag

SEQ ID NO: 145951 - DNA, 2718 bp, Artificial Sequence
  derived and/or modified sequence
atgactagcgccacctctccaatcatattgaagtgggaccccaaaagcctggagatccggacgctgacggtcgagcgcctgttggagccactggtgactcaggtcactacgttggtgaacacatcaaacaaaggaccttccggaaaaaagaagggcaggtcaaagaaagcccacgtcctcgccgcatcagttgaacaagccacccagaactttctggagaaaggagaacaaattgcgaaagaaagtcaggatctgaaagaagagttggtggcagctgtcgaggacgtgaggaagcaaggagaaacaatgcggatcgcttctagcgaatttgccgatgacccatgctcttctgttaagcgcggaactatggtgcgagccgcaagggctcttttgagcgctgtcaccaggctgctcatcctggccgatatggcagacgtaatgaggcttctgagtcacttgaaaattgttgaggaggccctcgaggctgtgaagaatgctacaaatgaacaggatctggccaatcggttcaaggagtttggaaaagaaatggtgaagctcaactacgtggcggctcgcagacagcaagagctcaaagacccccactgtcgcgatgagatggcggctgcaagaggagctctgaaaaagaacgccacaatgctgtacacggccagtcaggccttcttaaggcaccctgatgtggcagccacgagggctaacagggactacgtattcaaacaagttcaggaagctatcgccggtatttctaatgccgcacaggcaaccagcccgacagatgaggctaagggtcacaccggaattggcgagttggcagccgcactgaatgaattcgataataagattatcctggatcccatgacatttagtgaggcacggttccgcccttcccttgaggaacggctggagtccattatctctggggcagctcttatggccgatagttcgtgtacacgcgatgacagacgtgagcgtattgtggctgagtgcaacgccgttagacaagctctgcaggacctcctatcagagtacatgaataatactggccgtaaagagaaaggcgaccctctgaacatagctattgataaaatgaccaagaaaaccagggacctgcggcgacagcttcgcaaggccgtgatggaccacatttcagacagttttttggaaacaaatgtgccgttgctcgttttgatcgaggccgctaagtctggcaacgagaaagaggtgaaagagtatgcacaagtcttccgcgagcatgctaataagctggtggaggtggcgaatctggcttgtagcatatcgaataatgaggagggcgtcaagctggtacgaatggctgccactcagatcgattccctgtgccctcaagtgataaacgccgcacttaccctggcagcgaggcctcagtctaaggtagctcaggataacatggatgtcttcaaggaccaatgggagaaacaggtgagggttcttacagaggcagttgacgacattaccagcgtagatgatttcctctctgtgtctgagaatcacatcctcgaggacgttaataagtgcgttatcgccttgcaggaaggcgacgttgacaccctcgatagaaccgctggtgctattcgcggacgggctgccagagttatccatatcattaatgctgaaatggaaaactacgaggccggtgtgtacactgagaaagtcctggaggccactaaactcttgtccgaaacagtgatgcccagattcgccgagcaagtggaggtcgcaatcgaagcactgagcgccaatgtgccacaaccttttgaagagaacgaatttatcgacgctagcagactggtctacgatggtgtacgggacattcgaaaagctgttctgatgataaggacccctgaagaattggaggatgacagcgacttcgaacaggaggactatgacgtccggtctcgtacctcagtgcagactgaggacgatcagctcatcgcaggacagagcgcccgtgccatcatggcgcagctcccccaggaagagaaagcaaagattgcggagcaggtggagatctttcatcaggagaagagcaagctcgacgcagaagtggccaaatgggacgatagcggcaacgatattatcgtgttagctaaacagatgtgtatgattatgatggagatgactgactttacccggggaaaaggtccgctgaagaacaccagcgacgtgatcaatgccgcaaagaagattgctgaggctggctcccgcatggataagctggctagagctgtcgccgatcagtgtcctgactccgcctgcaagcaggacctgcttgcctatctgcaaaggatcgccctatactgccaccagcttaacatctgttccaaagtaaaggcagaggtgcaaaatctcggcggagagctgatcgtgtctgggctcgattccgcaacctctctgatccaggccgcaaaaaatctgatgaatgccgtggtcttaactgtgaaggcttcgtatgtggcttccaccaagtatcaaaaagtgtacggcacagcggctgtgaattcccccgtcgtgtcatggaaaatgaaagcccctgagaaaaagcccctcgtgaagagagagaaaccagaagaatttcagacgcgcgtaaggcgcggaagtcaaaagaagcatatatccccagtgcaagctctctccgaattcaaagccatggatagtttttag

SEQ ID NO: 145952 - DNA, 2718 bp, Artificial Sequence
  derived and/or modified sequence
atgacctccgcaaccagccctattatcctgaaatgggatcccaaaagcctcgaaatacggaccctgaccgtggaacggctgcttgagcccctagttacacaggtgacaaccttggtaaatacaagcaacaaagggccttccggtaagaaaaagggcagatcaaaaaaggcacatgttctggctgccagcgtggaacaggcaacgcagaactttcttgaaaagggcgaacaaatcgctaaggaaagccaggacttaaaggaagagctggttgctgcagttgaggacgtgaggaagcagggcgagactatgcgcattgcttcctccgagtttgccgacgatccttgttcatctgtgaaacgtggaaccatggttcgtgctgctcgggctttgctttctgctgttacacggctcctcattttagcagatatggctgatgttatgcgcctgctgagccacctcaagatcgtcgaagaggctcttgaagcagtgaagaacgcgacaaatgaacaggacctagcaaataggttcaaagagttcggaaaggaaatggtgaagctaaattacgtggcggcaagaagacagcaggagctgaaagatccacactgcagagatgagatggccgctgccaggggcgctttgaagaagaacgctacgatgttgtacaccgcttctcaagccttcttaagacaccccgatgtcgctgcaactcgggcaaatcgcgattacgtgtttaaacaggtacaggaagcaatcgctgggatcagcaatgctgcccaggctacatcccctacagacgaagccaagggccacaccggtattggcgaactggccgcagccttaaatgaatttgataacaaaattattctggaccctatgaccttctcagaggctcgttttcgcccatcccttgaggagcgattggaatccataattagcggagctgccctcatggccgatagttcctgtacgcgcgacgatagacgggagaggattgtagccgaatgtaacgcagttcgacaagcactgcaggatttactgagcgaatacatgaacaataccggcagaaaggaaaagggggacccactgaacattgcaatcgataagatgaccaaaaagaccagggacttgagaaggcagctccggaaggcggtaatggatcatatcagtgactcctttctggaaactaacgtgcctctgcttgttctcatagaagccgctaagagcggcaatgagaaggaagtgaaggaatatgcccaggtgttcagagagcacgccaataagttagtggaggtcgctaatttggcgtgttcaatatctaacaatgaagagggggttaagctcgttcgaatggcggctactcagatcgatagtctctgtccacaagttattaacgctgccctgacactggccgctcggcctcagtctaaagtggctcaggacaatatggacgtcttcaaggatcagtgggagaaacaggtgcgtgtacttaccgaggctgtggacgatatcacttccgtcgacgatttcttgagcgtttctgagaaccacatccttgaagatgtgaataaatgtgtgattgccctgcaggagggggacgtcgacacactggatcgaacagcaggagctataaggggcagagccgcaagagtaatccatattatcaatgccgaaatggaaaactacgaagccggagtgtacactgagaaggtactggaggctacaaaactgctgagcgagacggtcatgccacggttcgccgaacaagtggaggtagctatcgaggccctgagtgctaatgttcctcagccattcgaagagaacgagttcatagacgcctctcgcctggtgtatgacggcgttagagatatccgaaaggcagtgcttatgattcgcacccccgaggagctcgaggacgactccgatttcgaacaggaagactacgacgtgagatctcggacttccgtgcagacagaggacgaccagctgatcgccggtcagagcgcccgagctatcatggcacagctgccccaggaggagaaggccaaaatcgccgaacaggtggaaatcttccatcaggaaaagtctaagctggatgcggaggttgcaaagtgggacgattccggaaacgatatcattgttcttgcaaaacaaatgtgtatgatcatgatggagatgaccgattttacgcggggaaaggggccactgaagaatacatccgatgtgataaacgccgctaagaagatcgcagaggcgggatcaaggatggacaagctggctagggcagttgccgatcagtgccctgatagcgcctgcaagcaggatctgctggcgtatctgcaacgcattgctctctactgccaccagttgaacatctgcagcaaggtgaaagccgaggtgcagaacctgggcggagaactgatcgtgagtggattagactccgctacatctctcatccaggccgctaaaaatttgatgaatgcggtggtactgacggtcaaagcctcttacgtggcctcaacaaaataccagaaagtgtacggaacagcagcagttaattctcctgtggtctcctggaagatgaaggcaccagagaagaaacctcttgtaaagagagagaagcctgaggaattccagacaagggtaagacgtggaagccaaaagaagcatatctcaccggtgcaagcgctcagcgaattcaaggcaatggacagtttttag

SEQ ID NO: 145953 - DNA, 2718 bp, Artificial Sequence
  derived and/or modified sequence
atgacctctgcaacgtcccccataatactcaaatgggaccctaaatccctggaaatccggaccctgacagtggaaagacttctcgagcccctggtcactcaggtaaccacgttagtgaacacatccaacaagggcccatccggcaaaaagaagggacgttccaaaaaggcacacgtgctcgcagccagcgttgagcaagcaacccaaaactttctggaaaagggcgaacagatcgcgaaggagtcccaggacctgaaggaggaactcgtggccgcagtggaggatgtaaggaaacaaggggagactatgcggattgcatctagtgagttcgccgatgatccgtgttcctctgttaaacgcggtaccatggtgcgggcagccagggctttgctgtccgcagtaacacgcctactcatcttagcggacatggctgacgttatgagactgttatctcacctgaaaatcgtggaggaggccctagaggcagtgaagaacgcaacgaatgaacaagacctggccaatcgctttaaggaatttgggaaggaaatggtcaagttaaactacgtagcagcccgacgccagcaggaattaaaggaccctcattgtagggacgagatggcggcagcacgcggagcactgaaaaaaaatgcaacaatgctctacactgcctctcaggcattcttgagacatcccgatgttgccgcaacaagggccaacagagactacgtgtttaaacaggttcaggaggcaatagcaggcattagcaacgcagcccaagcaactagccccaccgatgaggcaaagggccacacaggaatcggggagctggctgccgctctgaatgagttcgataacaagataatattggatccaatgacatttagcgaggcacgattccgcccaagcctggaggagaggctggagtcgataatttccggagctgcacttatggctgattcgagctgcacgcgtgatgaccggagagagcgcattgtggccgagtgcaacgcagtgaggcaggcactgcaggacctactgtctgagtatatgaataataccggacgaaaggagaagggcgatccgttgaacatcgccattgacaagatgaccaagaagacccgggacttacgcaggcagctgcgtaaggctgtgatggatcatatcagcgacagctttctggaaacaaacgtccctcttttagtcctgattgaagccgctaagagcggaaacgagaaggaggtgaaagagtacgcacaagtgttcagggaacatgcaaacaagctcgtggaagtcgctaacctggcttgctctatctccaataatgaagaaggggtaaagctggtgcgtatggcagctacacaaattgactctctttgcccacaagttatcaacgctgcactgaccctcgccgctagaccccagagtaaggtggcgcaggacaatatggacgtcttcaaggatcagtgggaaaagcaagtgcgggttctcacggaggcagttgacgatattacctctgtggatgatttcttatctgtgtccgagaatcacatcttggaggacgtgaataaatgcgtcattgcgctacaggaaggggacgtggataccctagatagaaccgcgggagccattcggggaagagccgcaagagtgatacatattattaacgcagagatggaaaattatgaagccggagtctataccgagaaagtcctcgaagcaacaaaactcttgtccgaaactgtgatgcctcgcttcgcagagcaggtggaggtggccattgaggcacttagcgctaacgtcccccagccctttgaagagaacgagtttatcgacgctagccgcctagtgtacgatggggtgagggatattagaaaggcggtcctgatgatcagaactcctgaagaactcgaagacgattctgactttgagcaagaggattacgacgttcgaagccgcacttccgtccagaccgaagacgaccagcttattgccggtcagagcgcgagagccatcatggcacagctcccacaagaggagaaggcgaaaatagccgagcaggtggaaatcttccaccaggagaagtccaaactggacgctgaggtggctaaatgggacgactccggcaatgacattatcgtgttggcaaagcagatgtgtatgatcatgatggaaatgaccgacttcacgcggggtaagggccctcttaagaacactagtgatgtaatcaatgctgccaagaagatcgcggaagccggttcacgaatggataagcttgccagagctgtcgccgaccagtgcccagactccgcctgcaaacaggacctgctggcatacctgcagcgcatcgccctatactgccatcagctgaatatctgctcgaaagtgaaagccgaggtccagaacctgggcggagaattgattgtcagcggcctggatagcgcaacctccctgattcaggcagccaaaaacttaatgaacgccgtcgttttgactgtaaaagctagctacgtcgcctctactaagtatcagaaggtttacggaaccgctgctgtgaactcccctgtggttagttggaagatgaaagctccagagaagaagcctcttgtcaagagagagaagccagaggagttccagacaagagtcaggcgagggtcgcagaagaagcacatttctccggtgcaggctctgagcgaattcaaggccatggactcgttttag

SEQ ID NO: 145954 - DNA, 3625 bp, Artificial Sequence
  derived and/or modified sequence
atgacttcggcaacttcacctatcattctgaaatgggaccccaaaagtttggaaatccggacgctaacagtggaaaggctgttggagccacttgttacacaggtgactacacttgtcaacacaagcaacaaaggcccatctggtaaaaagaaagggaggtcaaagaaagcccatgtactagctgcctctgtagagcaagccactcagaatttcctggaaaagggtgaacagatcgctaaggagagtcaagatctcaaagaagagttggtggctgctgtagaggatgtgcgcaaacaaggtgagacgatgcggatcgcctcctccgagtttgcagatgacccttgctcgtcggtaaagcgcggcaccatggtacgggcggcaagggctttgctctccgcggtgacacgcttactcatcctggcggacatggcagatgtcatgagacttttatcccatctgaaaattgtggaagaggccctggaagctgtcaaaaatgctacaaatgagcaagaccttgcaaaccgttttaaagagtttgggaaagagatggtgaaacttaactatgtagcagcaagaagacaacaggagctgaaggatcctcactgtcgggatgagatggcagccgcccgaggggctctgaagaagaatgccacaatgctgtacacggcctctcaagcatttctccgccacccagatgtcgccgctacgagagccaaccgagattatgtgttcaaacaagtccaggaggccatcgccggcatctccaatgctgctcaagctacctcgcccactgacgaagccaagggccacacgggcatcggcgagctggctgcggctcttaatgagtttgacaataagattatcctggaccccatgacgttcagcgaggccaggttccggccgtccctggaggagaggctggagagcatcatcagcggcgcagcgctgatggccgactcctcctgcacgcgagacgaccggcgcgagaggatcgtggcggagtgcaacgccgtgcggcaggcgctccaggacctgctcagcgagtacatgaataatactggaaggaaagaaaaaggagatcctctcaacattgcgattgataagatgactaagaaaacaagagatctaaggagacagcttcggaaagcagtgatggatcacatatctgactctttcctggaaaccaatgttcctttgctagttctcattgaggctgcaaagagcggaaatgaaaaggaagtgaaagaatatgcccaagttttccgtgagcatgccaacaaactggtagaggttgccaatttggcctgttccatctccaacaatgaagaaggggtgaaattagttcggatggcagccacccagattgacagcctgtgtccccaggtcatcaatgccgctctgacactggctgcccggccacagagcaaagttgctcaggataacatggacgtcttcaaagaccagtgggagaagcaggtccgagtgttgacagaggccgtggatgacatcacctcagtggatgacttcctctctgtctcagaaaatcacatcttggaggatgtgaacaagtgtgtgatagccctccaagagggcgatgtggacactctggaccggactgcaggggccatcaggggccgggcagctcgagtcatacacatcatcaatgctgagatggagaactatgaagctggggtttatactgagaaggtgttggaagctacaaaattgctttctgaaacagtgatgccacgcttcgctgaacaagtagaggttgccattgaagccctgagtgccaacgttcctcaaccgtttgaggagaatgagttcatcgatgcctctcgcctggtgtatgatggcgttcgggacatcagaaaggctgtgctgatgatcaggaccccagaagaactagaggatgattctgactttgagcaggaagattatgatgtgcgtagcaggacaagtgttcagactgaggatgaccagctcattgcagggcagagcgcacgggccatcatggcgcaactaccgcaggaggagaaggcaaaaatagctgagcaggtggagatattccatcaagagaaaagcaagctggatgcagaagtggccaaatgggacgacagcggcaatgatatcattgtactggccaagcagatgtgtatgatcatgatggaaatgacagacttcacaagaggcaaaggcccattgaaaaatacatctgatgtcattaatgctgccaagaaaattgccgaagcaggttctcgaatggacaaattagctcgtgctgtggctgatcagtgtcctgattcagcatgtaagcaggatttattagcctaccttcaacgaattgccttgtattgccatcagcttaatatctgcagcaaggtgaaggcagaagtgcagaatctgggaggagagctcattgtgtcagggctggacagtgccacatcgcttatccaggcagctaaaaacctgatgaatgctgttgtcctcacggtgaaagcatcctatgtggcctcaaccaaataccagaaggtctatgggacagcagctgtcaactcacctgttgtgtcttggaagatgaaggctccagagaagaagccccttgtgaagagagaaaagcctgaagaattccagacacgagttcgacgaggttctcagaagaaacacatttcgcctgtacaggctttaagtgaattcaaagcaatggattccttctaggacgataggttttaacaagaaagctttttctttcttttctttctttctttttctttttaattccatttttgtatgcatacctgccagctcgtatgcctctggcatggggaaattaagggaacagtgtctgtttgcatgtaagatgagatgagatcaatactactgatccatctgtagcctgggaaggagacaggacattcctgtactaaggtggcacagagctgtcctttgcaacattctcataaaattgggcacagagttcgcattggcgcaatatttatgggagtgggagggatggggaaaataaacttaactctacaaaagcaaactctaatgcatgcaagaatcattaggttggcaggtatatgcataagtgaaaaatctggaagtgtaatggtagaacataaaacttgtattgcttctgtttcagtgcaaaaatgtactagccaatacgcttaagtgtgtggcccatgaattgaacaatttaaccttgaagtctatatccgtgatattatgtcgatttttaactgaggggaaattaactagtccagcctaaaatgcttcttttaatctgcattctgtttcctcttctagttgtgccattactagtgatcatgtttttttcccccctttaatgaaaacaataaacatctatttgagacaattaaaatccttctgggggcactggaagcacaatacggtgaccaatcttgctttcatttttttttctttttaatttgaaccatgattttgctagaaatagaaggcccagtggtggaatattagagggaaggaaactgacaacgtgtgaaagttagaggcaaatacataggtgtagcttggagtgctggtatctaatataccattgtattcactaactaactcaaaataaacacatttaatcttg

SEQ ID NO: 145955 - DNA, 2718 bp, Artificial Sequence
  derived and/or modified sequence
atgaccagcgccaccagccccatcatcctgaagtgggaccccaagagcctggagatcagaaccctgaccgtggagagactgctggagcccctggtgacccaggtgaccaccctggtgaacaccagcaacaagggccccagcggcaagaagaagggcagaagcaagaaggcccacgtgctggccgccagcgtggagcaggccacccagaacttcctggagaagggcgagcagatcgccaaggagagccaggacctgaaggaggagctggtggccgccgtggaggacgtgagaaagcagggcgagaccatgagaatcgccagcagcgagttcgccgacgacccctgcagcagcgtgaagagaggcaccatggtgagagccgccagagccctgctgagcgccgtgaccagactgctgatcctggccgacatggccgacgtgatgagactgctgagccacctgaagatcgtggaggaggccctggaggccgtgaagaacgccaccaacgagcaggacctggccaacagattcaaggagttcggcaaggagatggtgaagctgaactacgtggccgccagaagacagcaggagctgaaggacccccactgcagagacgagatggccgccgccagaggcgccctgaagaagaacgccaccatgctgtacaccgccagccaggccttcctgagacaccccgacgtggccgccaccagagccaacagagactacgtgttcaagcaggtgcaggaggccatcgccggcatcagcaacgccgcccaggccaccagccccaccgacgaggccaagggccacaccggcatcggcgagctggccgccgccctgaacgagttcgacaacaagatcatcctggaccccatgaccttcagcgaggccagattcagacccagcctggaggagagactggagagcatcatcagcggcgccgccctgatggccgacagcagctgcaccagagacgacagaagagagagaatcgtggccgagtgcaacgccgtgagacaggccctgcaggacctgctgagcgagtacatgaacaacaccggcagaaaggagaagggcgaccccctgaacatcgccatcgacaagatgaccaagaagaccagagacctgagaagacagctgagaaaggccgtgatggaccacatcagcgacagcttcctggagaccaacgtgcccctgctggtgctgatcgaggccgccaagagcggcaacgagaaggaggtgaaggagtacgcccaggtgttcagagagcacgccaacaagctggtggaggtggccaacctggcctgcagcatcagcaacaacgaggagggcgtgaagctggtgagaatggccgccacccagatcgacagcctgtgcccccaggtgatcaacgccgccctgaccctggccgccagaccccagagcaaggtggcccaggacaacatggacgtgttcaaggaccagtgggagaagcaggtgagagtgctgaccgaggccgtggacgacatcaccagcgtggacgacttcctgagcgtgagcgagaaccacatcctggaggacgtgaacaagtgcgtgatcgccctgcaggagggcgacgtggacaccctggacagaaccgccggcgccatcagaggcagagccgccagagtgatccacatcatcaacgccgagatggagaactacgaggccggcgtgtacaccgagaaggtgctggaggccaccaagctgctgagcgagaccgtgatgcccagattcgccgagcaggtggaggtggccatcgaggccctgagcgccaacgtgccccagcccttcgaggagaacgagttcatcgacgccagcagactggtgtacgacggcgtgagagacatcagaaaggccgtgctgatgatcagaacccccgaggagctggaggacgacagcgacttcgagcaggaggactacgacgtgagaagcagaaccagcgtgcagaccgaggacgaccagctgatcgccggccagagcgccagagccatcatggcccagctgccccaggaggagaaggccaagatcgccgagcaggtggagatcttccaccaggagaagagcaagctggacgccgaggtggccaagtgggacgacagcggcaacgacatcatcgtgctggccaagcagatgtgcatgatcatgatggagatgaccgacttcaccagaggcaagggccccctgaagaacaccagcgacgtgatcaacgccgccaagaagatcgccgaggccggcagcagaatggacaagctggccagagccgtggccgaccagtgccccgacagcgcctgcaagcaggacctgctggcctacctgcagagaatcgccctgtactgccaccagctgaacatctgcagcaaggtgaaggccgaggtgcagaacctgggcggcgagctgatcgtgagcggcctggacagcgccaccagcctgatccaggccgccaagaacctgatgaacgccgtggtgctgaccgtgaaggccagctacgtggccagcaccaagtaccagaaggtgtacggcaccgccgccgtgaacagccccgtggtgagctggaagatgaaggcccccgagaagaagcccctggtgaagagagagaagcccgaggagttccagaccagagtgagaagaggcagccagaagaagcacatcagccccgtgcaggccctgagcgagttcaaggccatggacagcttctag

SEQ ID NO: 145956 - protein, 335 aa, Artificial Sequence
  derived and/or modified sequence
MWATLPLLCAGAWLLGVPVCGAAELCVNSLEKFHFKSWMSKHRKTYSTEEYHHRLQTFASNWRKINAHNNGNHTFKMALNQFSDMSFAEIKHKYLWSEPQNCSATKSNYLRGTGPYPPSVDWRKKGNFVSPVKNQGACGSCWTFSTTGALESAIAIATGKMLSLAEQQLVDCAQDFNNHGCQGGLPSQAFEYILYNKGIMGEDTYPYQGKDGYCKFQPGKAIGFVKDVANITIYDEEAMVEAVALYNPVSFAFEVTQDFMMYRTGIYSSTSCHKTPDKVNHAVLAVGYGEKNGIPYWIVKNSWGPQWGMNGYFLIERGKNMCGLAACASYPIPLV

SEQ ID NO: 145957 - protein, 323 aa, Artificial Sequence
  derived and/or modified sequence
MWATLPLLCAAELCVNSLEKFHFKSWMSKHRKTYSTEEYHHRLQTFASNWRKINAHNNGNHTFKMALNQFSDMSFAEIKHKYLWSEPQNCSATKSNYLRGTGPYPPSVDWRKKGNFVSPVKNQGACGSCWTFSTTGALESAIAIATGKMLSLAEQQLVDCAQDFNNHGCQGGLPSQAFEYILYNKGIMGEDTYPYQGKDGYCKFQPGKAIGFVKDVANITIYDEEAMVEAVALYNPVSFAFEVTQDFMMYRTGIYSSTSCHKTPDKVNHAVLAVGYGEKNGIPYWIVKNSWGPQWGMNGYFLIERGKNMCGLAACASYPIPLV

SEQ ID NO: 145958 - protein, 206 aa, Artificial Sequence
  derived and/or modified sequence
MWATLPLLCAGAWLLGVPVCGAAELCVNSLEKFHFKSWMSKHRKTYSTEEYHHRLQTFASNWRKINAHNNGNHTFKMALNQFSDMSFAEIKHKYLWSEPQNCSATKSNYLRGTGPYPPSVDWRKKGNFVSPVKNQVCLAISILSLQNGHTPRQYTRKNNSKGPQNHHKHIPASVSSRHLSPGRPSLPQLREICEGKRLGEASVNLG

SEQ ID NO: 145959 - DNA, 972 bp, Artificial Sequence
  derived and/or modified sequence
atgtgggccacacttccacttctctgcgcagcggagctgtgtgtgaactccctcgaaaagttccatttcaaaagctggatgagcaaacatcgtaaaacatactccacggaagaataccaccatagactccaaacttttgccagtaattggagaaaaatcaacgcccacaataatggtaatcatacttttaagatggctctcaatcaattctccgatatgagcttcgcggagatcaaacataagtatctgtggtctgaaccacaaaattgtagcgccaccaagagtaactatcttcggggaacaggcccctaccccccttccgtcgattggcggaagaaagggaatttcgtgagccccgtcaagaaccaaggggcttgcggaagctgttggaccttttcaactaccggcgcattagaaagcgctatcgccatcgccacaggcaaaatgctgtccctcgctgagcaacagcttgtcgactgtgctcaagactttaataaccacggttgtcaggggggtctgccatcacaggccttcgagtacatactgtataacaaagggataatgggtgaggatacgtatccctaccagggcaaggacgggtattgtaaattccagcctggaaaggctattggcttcgtgaaagatgttgccaatatcacaatctacgatgaggaggccatggtggaggccgttgcactttacaacccagtaagtttcgcgttcgaagtaacccaagatttcatgatgtaccgaacaggcatttattcttcgacctcatgccataaaacaccagacaaggtgaaccacgccgtactcgctgtcggttacggggagaagaacggtatcccgtattggatcgtgaagaactcttggggtcctcagtggggcatgaatgggtattttctgatagagagaggtaagaatatgtgtggattggcggcatgcgcatcctatcctatccccctggtatag

SEQ ID NO: 145960 - DNA, 1008 bp, Artificial Sequence
  derived and/or modified sequence
atgtgggcaactctgccccttctgtgtgccggagcttggctgttaggcgtccctgtgtgtggagcagcggagctatgtgtaaactccctggaaaagttccattttaagagttggatgagcaagcaccgcaaaacatactccactgaggaataccatcaccgcttgcagactttcgcatccaattggcggaaaattaacgcccacaacaacggtaatcatacattcaagatggcgcttaaccagttttccgatatgtcctttgctgagatcaagcataagtatctttggtctgaacctcagaactgctccgctactaaatcgaactatctacgcggaaccggcccctatccgccctcagtcgactggaggaagaaggggaattttgtgtctccagtgaaaaatcaaggggcttgtgggagctgctggacattctcaacgaccggcgctctcgagagcgcgatcgctattgctactggtaagatgttgtctttggccgagcagcagctcgtagactgtgcgcaggacttcaataaccacggctgtcaaggcgggcttccgtcccaggcctttgagtatattttgtacaataaaggtatcatgggtgaggacacttatccctaccaaggtaaggacggttattgcaagttccagcctggtaaggcgattggttttgtcaaggacgtagcaaacatcaccatctacgacgaagaggctatggtggaggctgtcgcactgtataaccctgtatccttcgccttcgaggttacccaagatttcatgatgtacagaaccggcatttactcttctacaagttgtcataagacaccagataaagttaaccacgcggttcttgctgtcggatacggcgagaaaaacgggatcccctattggattgtaaagaacagctgggggcctcagtggggcatgaatgggtattttttgatcgaacggggtaagaacatgtgcggtctcgccgcatgcgcttcctatccaattcctcttgtctag

SEQ ID NO: 145961 - DNA, 972 bp, Artificial Sequence
  derived and/or modified sequence
atgtgggccaccctgcccctgctgtgtgccgctgagctgtgtgtgaacagcctggagaagttccacttcaagtcctggatgagcaagcacaggaagacctacagcacagaggagtaccaccaccggctgcagacctttgccagcaactggaggaagatcaatgcccacaacaacggcaaccacaccttcaagatggccctgaaccagttcagtgacatgagctttgctgagatcaagcacaagtacctgtggagcgagccccagaactgcagcgccaccaagagcaactacctgcggggcaccggcccctacccaccttctgtggactggaggaagaagggcaactttgtgtcccctgtgaagaaccagggcgcctgtggcagctgctggaccttcagcaccactggagccctggagagcgccatcgccatcgccaccgggaagatgctgagcctggccgagcagcagctggtggactgtgcccaggacttcaacaaccacggctgccagggcggcctgcccagccaggcctttgagtacatcctgtacaacaagggcatcatgggagaggacacctacccctaccagggcaaggatggctactgcaagttccagcccgggaaggccatcggctttgtgaaggatgtggccaacatcaccatctatgatgaggaggccatggtggaggccgtggccctgtacaaccctgtgtcctttgcctttgaggtgacccaggacttcatgatgtacagaacaggcatctacagcagcaccagctgccacaagaccccagacaaggtgaaccacgctgtgctggccgtgggctacggggagaagaatggcatcccctactggatcgtgaagaacagctggggcccccagtggggcatgaatggctacttcctgattgagcggggcaagaacatgtgtggcctggccgcctgtgccagctaccccatccccctggtgtag

SEQ ID NO: 145962 - DNA, 1008 bp, Artificial Sequence
  derived and/or modified sequence
atgtgggccaccctgcccctgctgtgtgccggggcctggctgctgggcgtgcctgtgtgtggggctgctgagctgtgtgtgaacagcctggagaagttccacttcaagtcctggatgagcaagcacaggaagacctacagcacagaggagtaccaccaccggctgcagacctttgccagcaactggaggaagatcaatgcccacaacaacggcaaccacaccttcaagatggccctgaaccagttcagtgacatgagctttgctgagatcaagcacaagtacctgtggagcgagccccagaactgcagcgccaccaagagcaactacctgcggggcaccggcccctacccaccttctgtggactggaggaagaagggcaactttgtgtcccctgtgaagaaccagggcgcctgtggcagctgctggaccttcagcaccactggagccctggagagcgccatcgccatcgccaccgggaagatgctgagcctggccgagcagcagctggtggactgtgcccaggacttcaacaaccacggctgccagggcggcctgcccagccaggcctttgagtacatcctgtacaacaagggcatcatgggagaggacacctacccctaccagggcaaggatggctactgcaagttccagcccgggaaggccatcggctttgtgaaggatgtggccaacatcaccatctatgatgaggaggccatggtggaggccgtggccctgtacaaccctgtgtcctttgcctttgaggtgacccaggacttcatgatgtacagaacaggcatctacagcagcaccagctgccacaagaccccagacaaggtgaaccacgctgtgctggccgtgggctacggggagaagaatggcatcccctactggatcgtgaagaacagctggggcccccagtggggcatgaatggctacttcctgattgagcggggcaagaacatgtgtggcctggccgcctgtgccagctaccccatccccctggtgtag

SEQ ID NO: 145963 - DNA, 972 bp, Artificial Sequence
  derived and/or modified sequence
atgtgggccaccctgcccctgctgtgcgccgccgagctgtgcgtgaatagtctagaaaaatttcattttaagtcatggatgtcaaaacaccgaaagacatattcaaccgaggaataccaccatcgcctgcaaactttcgcttctaattggcgcaaaatcaacgcccacaataatggcaatcatacgttcaaaatggcccttaatcagttttcagacatgagcttcgccgagattaagcacaagtacctgtggtccgaaccgcagaactgtagcgcaacaaagtctaactatttaaggggaaccggaccttacccgcctagcgtcgactggcggaagaagggaaactttgttagccctgtcaagaatcagggagcttgtgggagctgctggaccttttcgacaactggcgctcttgagtctgctatagcaattgcaaccggcaagatgctttccttggcggagcaacaactcgtagactgcgcacaggatttcaacaatcatggctgccagggaggcctgccctcccaagcgtttgaatatatcctgtacaacaagggtataatgggcgaggacacgtacccttaccaagggaaagacggctactgtaagtttcagccggggaaagccattgggttcgtgaaggatgtggctaacataacgatctacgatgaagaggcgatggtcgaagctgttgccctgtacaaccccgtgtcctttgcttttgaggtgactcaggacttcatgatgtatcgcaccggaatctattcctcaacaagctgccacaaaacacctgacaaggttaaccacgcggtcctggcagtcggatatggtgagaaaaacgggattccatattggatcgtgaaaaacagctgggggccccaatggggtatgaatggctactttctgattgaacgcggaaagaacatgtgcggattggctgcctgcgccagctatccgatcccacttgtgtag

SEQ ID NO: 145964 - DNA, 1008 bp, Artificial Sequence
  derived and/or modified sequence
atgtgggccaccctgcccctgctgtgcgccggcgcctggctgctgggagttccagtatgtggggccgcggaactttgtgtgaacagcctggagaaatttcattttaaatcatggatgtccaagcatcggaagacctactctaccgaggaatatcatcaccgcttacagacatttgcatccaattggagaaaaatcaacgcgcacaacaacgggaaccacaccttcaaaatggcacttaatcagttctctgatatgtcttttgcagaaataaaacataagtatctgtggtcagaaccccaaaactgttctgctacaaagtctaattatttacgcggcaccggaccgtatcccccatcagtggattggcgtaaaaagggcaactttgtctctcctgtgaaaaaccagggtgcatgcgggtcttgttggactttcagcactaccggagcactggaatctgctattgctattgccacaggcaaaatgcttagcctcgccgagcaacagttagtagactgtgcccaggattttaacaatcatgggtgccaggggggactgccatcccaggcatttgagtatatcctttataacaaggggattatgggagaagacacatatccgtatcagggcaaagatggctactgtaagttccagcctggcaaggcaattggctttgtgaaggatgtcgcaaatataacaatctacgacgaggaggctatggtggaggcagttgctctttataatccggtcagcttcgccttcgaggttacccaggattttatgatgtatcgcactggcatttattctagcacctcgtgccataaaacccctgataaggttaatcatgcagtgttagcagtaggatacggggagaagaatggaattccctactggatagtaaagaactcttggggaccgcaatggggcatgaacggatatttcctcattgagcggggaaagaatatgtgtggattggctgcatgcgcatcttatccgattccgctggtctag

SEQ ID NO: 145965 - DNA, 972 bp, Artificial Sequence
  derived and/or modified sequence
atgtgggccactttgcccctgctttgtgctgccgaactttgcgttaattccctggagaagtttcatttcaagtcctggatgagtaagcacagaaagacttatagtaccgaggagtatcatcacaggctacaaacgtttgcctccaattggcgtaagattaatgcccacaataacggcaaccacacattcaagatggcactgaaccaatttagcgacatgtcgttcgctgagatcaagcacaaatatctgtggtctgaacctcagaactgcagcgcaacgaaaagtaattacctcaggggcacaggtccctatccccctagcgtggactggcgtaaaaagggcaattttgttagcccggtgaagaaccagggcgcttgcggcagttgctggaccttctctactactggtgccttggagtccgcaatcgctatcgcgacggggaagatgctttcactagcagagcagcagctggtggactgcgcccaagacttcaataatcacggctgccaaggaggcctgccctcccaggccttcgaatacattttgtataacaagggaataatgggcgaggacacttacccctatcaggggaaggatggctactgcaagttccagcctggcaaagcaattggttttgtcaaagatgtcgccaatatcacgatatatgacgaggaggctatggtggaggccgtggccctttataacccagtgtcattcgcctttgaagtaacccaggatttcatgatgtacagaacaggcatctattcttcaacgtcctgccataaaacaccggataaagtgaatcatgccgttcttgctgtcggctatggcgagaagaatggtatcccctactggatcgtaaagaacagctgggggccacaatgggggatgaacggatacttcctgattgagcgcggaaagaatatgtgcggcctcgctgcatgtgccagttaccccattccgctcgtatag

SEQ ID NO: 145966 - DNA, 1008 bp, Artificial Sequence
  derived and/or modified sequence
atgtgggccacactacctctgttatgcgctggggcttggttgctcggggttccagtatgtggtgctgccgagctgtgcgtgaattccttagagaaattccacttcaagtcatggatgtcaaagcacaggaaaacctatagtacggaagagtaccatcaccgcttgcagacatttgcttctaactggcgtaagatcaatgcccacaacaatggcaatcacaccttcaagatggccttgaaccagttctccgacatgtcattcgccgaaattaagcacaaatacctgtggtctgagccgcaaaattgttccgcaaccaaatccaactatctgcggggtacaggcccttacccacccagcgtagattggaggaagaaaggaaatttcgtcagccccgtgaagaatcagggcgcatgtggcagctgctggacattcagcaccaccggcgcattagaaagcgccatcgcaattgccacaggcaagatgttgtcactggccgagcagcaactcgtggattgtgcccaggactttaataaccacggatgccaggggggtctaccttcacaagcctttgaatatattctttataacaagggcattatgggcgaggatacctacccctaccaaggcaaggacggatactgcaagttccagccgggaaaagctatcggctttgtgaaagacgtcgccaacattaccatttatgatgaagaggctatggtggaggctgttgcactgtacaacccagtgagtttcgccttcgaggttacgcaggacttcatgatgtatagaacaggcatctacagctcaacaagctgccacaaaacgcccgataaagtgaatcacgccgtgctcgccgtaggatatggagagaagaatggcataccctattggattgtgaagaacagctggggccctcagtggggcatgaacggatacttcctcattgaacgcggaaagaatatgtgtggattggccgcatgcgcgtcctatcccatcccattagtgtag

SEQ ID NO: 145967 - DNA, 2190 bp, Artificial Sequence
  derived and/or modified sequence
tcccgccgctcctccacgctcgtgccgctccccccccgcgctcccagttgacgctctgggccgccacctccgcggaccctgagcgcaagagccaagccgccagcgctgcgatgtgggccacgctgccgctgctctgcgccggggcctggctcctgggagtccccgtctgcggtgccgccgaactgtgcgtgaactccttagagaagtttcacttcaagtcatggatgtctaagcaccgtaagacctacagtacggaggagtaccaccacaggctgcagacgtttgccagcaactggaggaagataaacgcccacaacaatgggaaccacacatttaaaatggcactgaaccaattttcagacatgagctttgctgaaataaaacacaagtatctctggtcagagcctcagaattgctcagccaccaaaagtaactaccttcgaggtactggtccctacccaccttccgtggactggcggaaaaaaggaaattttgtctcacctgtgaaaaatcagggtgcctgcggcagttgctggactttctccaccactggggccctggagtctgcgatcgccatcgcaaccggaaagatgctgtccttggcggaacagcagctggtggactgcgcccaggacttcaataatcacggctgccaagggggtctccccagccaggctttcgagtatatcctgtacaacaaggggatcatgggtgaagacacctacccctaccagggcaaggatggttattgcaagttccaacctggaaaggccatcggctttgtcaaggatgtagccaacatcacaatctatgacgaggaagcgatggtggaggctgtggccctctacaaccctgtgagctttgcctttgaggtgactcaggacttcatgatgtatagaaccggcatctactccagtacttcctgccataaaactccagataaagtaaaccatgcagtactggctgttgggtatggagaaaaaaatgggatcccttactggatcgtgaaaaactcttggggtccccagtggggaatgaacgggtacttcctcatcgagcgcggaaagaacatgtgtggcctggctgcctgcgcctcctaccccatccctctggtgtgagccgtggcagccgcagcgcagactggcggagaaggagaggaacgggcagcctgggcctgggtggaaatcctgccctggaggaagttgtggggagatccactgggacccccaacattctgccctcacctctgtgcccagcctggaaacctacagacaaggaggagttccaccatgagctcacccgtgtctatgacgcaaagatcaccagccatgtgccttagtgtccttcttaacagactcaaaccacatggaccacgaatattctttctgtccagaagggctactttccacatatagagctccagggactgtcttttctgtattcgctgttcaataaacattgagtgagcacctccccagatggagcatgctggtcctgggccatgactcaaaccaggtctgtcctcgccactcagtctcccaggagggaggcatcagggggtgtccaggctctggctgggaggatggtgggggtgctggcggtattatccaccagatggggtatccaggatgaagagcaggcttaatttgagatcttgactatttgtcccaaacctgagtggagaggtggggaggaaggagaaaaacgggccaagctgcggcagaggcaggattcaaacccacaatgtcagcccagaagcctgtacttctctgtgtggcctccccagtctcagctgcctactcctactcagactctgccccccacctccacatgagactgcccaccccttcctcaccaaccccttatttatttcaaacgtgcccagatgctcctgtcgtttccacaccatcccttcccttatcttgccttttgagaaatcttgatctctgtttagagggcggccatgaagttgctgctgcttcctgaagcctccgggctctgggatgtctgtagaacaagctggagtccaccagctctttgtcctatggctcacagactttcttaatgataaaagctgtcatcttatttgggcttcctgaaaagctaaaggcttgagaatatttgaaaaatatatatgttcatgataaggcttatttagataatgcaaatatagtttaatttattagaaaa

SEQ ID NO: 145968 - DNA, 972 bp, Artificial Sequence
  derived and/or modified sequence
atgtgggccacgctgccgctgctctgcgccgccgaactgtgcgtgaactccttagagaagtttcacttcaagtcatggatgtctaagcaccgtaagacctacagtacggaggagtaccaccacaggctgcagacgtttgccagcaactggaggaagataaacgcccacaacaatgggaaccacacatttaaaatggcactgaaccaattttcagacatgagctttgctgaaataaaacacaagtatctctggtcagagcctcagaattgctcagccaccaaaagtaactaccttcgaggtactggtccctacccaccttccgtggactggcggaaaaaaggaaattttgtctcacctgtgaaaaatcagggtgcctgcggcagttgctggactttctccaccactggggccctggagtctgcgatcgccatcgcaaccggaaagatgctgtccttggcggaacagcagctggtggactgcgcccaggacttcaataatcacggctgccaagggggtctccccagccaggctttcgagtatatcctgtacaacaaggggatcatgggtgaagacacctacccctaccagggcaaggatggttattgcaagttccaacctggaaaggccatcggctttgtcaaggatgtagccaacatcacaatctatgacgaggaagcgatggtggaggctgtggccctctacaaccctgtgagctttgcctttgaggtgactcaggacttcatgatgtatagaaccggcatctactccagtacttcctgccataaaactccagataaagtaaaccatgcagtactggctgttgggtatggagaaaaaaatgggatcccttactggatcgtgaaaaactcttggggtccccagtggggaatgaacgggtacttcctcatcgagcgcggaaagaacatgtgtggcctggctgcctgcgcctcctaccccatccctctggtgtga

SEQ ID NO: 145969 - DNA, 972 bp, Artificial Sequence
  derived and/or modified sequence
atgtgggccaccctgcccctgctgtgcgccgccgagctgtgcgtgaacagcctggagaagttccacttcaagagctggatgagcaagcacagaaagacctacagcaccgaggagtaccaccacagactgcagaccttcgccagcaactggagaaagatcaacgcccacaacaacggcaaccacaccttcaagatggccctgaaccagttcagcgacatgagcttcgccgagatcaagcacaagtacctgtggagcgagccccagaactgcagcgccaccaagagcaactacctgagaggcaccggcccctacccccccagcgtggactggagaaagaagggcaacttcgtgagccccgtgaagaaccagggcgcctgcggcagctgctggaccttcagcaccaccggcgccctggagagcgccatcgccatcgccaccggcaagatgctgagcctggccgagcagcagctggtggactgcgcccaggacttcaacaaccacggctgccagggcggcctgcccagccaggccttcgagtacatcctgtacaacaagggcatcatgggcgaggacacctacccctaccagggcaaggacggctactgcaagttccagcccggcaaggccatcggcttcgtgaaggacgtggccaacatcaccatctacgacgaggaggccatggtggaggccgtggccctgtacaaccccgtgagcttcgccttcgaggtgacccaggacttcatgatgtacagaaccggcatctacagcagcaccagctgccacaagacccccgacaaggtgaaccacgccgtgctggccgtgggctacggcgagaagaacggcatcccctactggatcgtgaagaacagctggggcccccagtggggcatgaacggctacttcctgatcgagagaggcaagaacatgtgcggcctggccgcctgcgccagctaccccatccccctggtgtag

SEQ ID NO: 145970 - DNA, 1008 bp, Artificial Sequence
  derived and/or modified sequence
atgtgggccaccctgcccctgctgtgcgccggcgcctggctgctgggcgtgcccgtgtgcggcgccgccgagctgtgcgtgaacagcctggagaagttccacttcaagagctggatgagcaagcacagaaagacctacagcaccgaggagtaccaccacagactgcagaccttcgccagcaactggagaaagatcaacgcccacaacaacggcaaccacaccttcaagatggccctgaaccagttcagcgacatgagcttcgccgagatcaagcacaagtacctgtggagcgagccccagaactgcagcgccaccaagagcaactacctgagaggcaccggcccctacccccccagcgtggactggagaaagaagggcaacttcgtgagccccgtgaagaaccagggcgcctgcggcagctgctggaccttcagcaccaccggcgccctggagagcgccatcgccatcgccaccggcaagatgctgagcctggccgagcagcagctggtggactgcgcccaggacttcaacaaccacggctgccagggcggcctgcccagccaggccttcgagtacatcctgtacaacaagggcatcatgggcgaggacacctacccctaccagggcaaggacggctactgcaagttccagcccggcaaggccatcggcttcgtgaaggacgtggccaacatcaccatctacgacgaggaggccatggtggaggccgtggccctgtacaaccccgtgagcttcgccttcgaggtgacccaggacttcatgatgtacagaaccggcatctacagcagcaccagctgccacaagacccccgacaaggtgaaccacgccgtgctggccgtgggctacggcgagaagaacggcatcccctactggatcgtgaagaacagctggggcccccagtggggcatgaacggctacttcctgatcgagagaggcaagaacatgtgcggcctggccgcctgcgccagctaccccatccccctggtgtag

SEQ ID NO: 145971 - protein, 501 aa, Artificial Sequence
  derived and/or modified sequence
MVLWGPVLGALLVVIAGYLCLPGMLRQRRPWEPPLDKGTVPWLGHAMAFRKNMFEFLKRMRTKHGDVFTVQLGGQYFTFVMDPLSFGSILKDTQRKLDFGQYAKKLVLKVFGYRSVQGDHEMIHSASTKHLRGDGLKDLNETMLDSLSFVMLTSKGWSLDASCWHEDSLFRFCYYILFTAGYLSLFGYTKDKEQDLLQAGELFMEFRKFDLLFPRFVYSLLWPREWLEVGRLQRLFHKMLSVSHSQEKEGISNWLGNMLQFLREQGVPSAMQDKFNFMMLWASQGNTGPTSFWALLYLLKHPEAIRAVREEATQVLGEARLETKQSFAFKLGALQHTPVLDSVVEETLRLRAAPTLLRLVHEDYTLKMSSGQEYLFRHGDILALFPYLSVHMDPDIHPEPTVFKYDRFLNPNGSRKVDFFKTGKKIHHYTMPWGSGVSICPGRFFALSEVKLFILLMVTHFDLELVDPDTPLPHVDPQRWGFGTMQPSHDVRFRYRLHPTE

SEQ ID NO: 145972 - DNA, 1506 bp, Artificial Sequence
  derived and/or modified sequence
atggtcctctggggcccggtgctcggcgcgttattagtggtgattgcagggtatctctgcctgccgggcatgctgcgccagagaagaccttgggaaccgcccctcgataaggggacagtcccatggctggggcatgctatggcattcagaaaaaacatgtttgaatttctaaagcgtatgcgtaccaagcacggtgacgtcttcaccgtgcagctggggggtcagtattttacttttgtgatggaccccctctctttcgggtcaattttaaaagacacccagcggaagttagactttgggcagtacgccaagaagctcgttctcaaggtctttggatataggtccgttcagggggaccatgaaatgattcactctgccagcaccaagcacttgagaggcgatggcctcaaagatctcaacgaaacaatgctggattcactaagcttcgttatgctaactagtaaggggtggagccttgatgccagctgttggcatgaggattccctcttccgattctgttattatatactgtttaccgcaggttatttgagcctctttgggtacactaaggataaggaacaagatctgttacaggcgggagagttgttcatggagtttcgtaagttcgatctgctatttccaaggttcgtttactccttactgtggcccagggaatggctcgaagttggaagactgcagcgtctatttcataagatgctgagtgtgagccactctcaggagaaagagggtatctccaattggctcggtaacatgctgcagttcttgcgggaacagggagtgccatctgcaatgcaagacaaattcaacttcatgatgttgtgggcctctcagggaaacactggtccaacctcattctgggcacttctctacttgctgaagcaccctgaagccataagagccgtgcgcgaggaggcgacccaggtgctcggcgaggccagacttgagactaaacagtcattcgctttcaagctgggcgccctgcagcatactcccgttctcgacagtgttgtcgaggaaacactgaggttgagagccgcacccacattgctgagactcgtacatgaagactatactctgaaaatgagcagcggacaagagtatctgttccgccacggtgacatcttggcactcttcccgtacctgtctgttcacatggaccccgatatccaccccgaacccactgtatttaagtatgaccgtttccttaatccaaacggcagccgcaaggtggatttctttaagaccggcaagaaaatccatcattataccatgccatggggctctggagtgtccatctgccccggtcgtttcttcgcactgtccgaggtgaaactctttattctcctcatggtgacgcactttgatctggaactggtggaccccgacactcctctgccccacgtggatccccagagatggggctttggcaccatgcagccatcacacgacgtcaggtttcgatatcgacttcatccaaccgaatag

SEQ ID NO: 145973 - DNA, 1506 bp, Artificial Sequence
  derived and/or modified sequence
atggtgctgtggggccctgtgctgggcgccctgctggtggtgattgctggctacctgtgcctgcccggcatgctgcggcagaggcggccctgggagccccccctggacaagggcaccgtgccctggctgggccacgccatggccttcaggaagaacatgtttgagttcctgaagaggatgaggaccaagcatggagatgtgttcaccgtgcagctgggcggccagtacttcacctttgtgatggaccccctgagctttggcagcatcctgaaggacacccagaggaagctggactttggccagtatgccaagaagctggtgctgaaggtgtttggctacagatctgtgcagggcgaccacgagatgatccacagcgccagcaccaagcacctgcggggagatggcctgaaggacctgaatgagaccatgctggacagcctgagctttgtgatgctgaccagcaagggctggagcctggatgccagctgctggcatgaggacagcctcttccgcttctgctactacatcctcttcaccgctggctacctgagcctgtttggctacaccaaggacaaggagcaggacctgctgcaggccggggagctgttcatggagttcaggaagtttgacctgctcttccccaggtttgtgtacagcctgctgtggccccgggagtggctggaggtgggccgcctgcagaggctcttccacaagatgctgtctgtgagccacagccaggagaaggagggcatcagcaactggctgggcaacatgctgcagttcctgcgggagcagggcgtgcccagcgccatgcaggacaagttcaacttcatgatgctgtgggccagccagggcaacacaggccccaccagcttctgggccctgctgtacctgctgaagcaccctgaggccatccgggctgtgcgggaggaggccacccaggtgctgggggaggcccggctggagaccaagcagagctttgccttcaagctgggcgccctgcagcacacccctgtgctggacagcgtggtggaggagaccctgcggctgcgggccgcccccaccctgctgcggctggtgcatgaggactacaccctgaagatgagcagcggccaggagtacctgttccgccacggggacatcctggccctcttcccctacctgtctgtgcacatggaccctgacatccaccctgagcccaccgtcttcaagtatgaccgcttcctgaaccccaacggcagcaggaaggtggacttcttcaagacaggcaagaagatccaccactacaccatgccctggggcagcggcgtgtccatctgccccggccgcttctttgccctgtctgaggtgaagctgttcatcctgctgatggtgacccactttgacctggagctggtggaccctgacacccccctgccccacgtggacccccagcgctggggcttcggcaccatgcagcccagccatgatgtgcgcttccgctaccgcctgcaccccacagaatag

SEQ ID NO: 145974 - DNA, 1506 bp, Artificial Sequence
  derived and/or modified sequence
atggtgctgtggggccccgtgctgggcgccctgctggtggtgatcgcaggctatttatgcctacccggtatgctgaggcagcggcggccttgggagcctccgttagataaaggaacagtgccctggctaggccacgcgatggcatttagaaaaaacatgttcgaattccttaaaagaatgcgtaccaaacatggcgatgtcttcaccgtgcaactgggaggacagtatttcacgtttgtaatggatcctctgagtttcggcagcatcttaaaagacacacagcggaaactagacttcggccagtacgcaaaaaaacttgtcctaaaagtattcgggtaccgatcagtgcaaggggaccatgaaatgatacatagtgcctctactaaacatttgcggggcgacggcttaaaagacctcaacgagacaatgctagactctttatcgttcgtgatgcttacatccaaagggtggagtctcgacgcctcctgttggcacgaggatagccttttccgtttttgctattatatactgttcaccgccggctatttaagtcttttcggttacaccaaggataaggagcaggacttattacaagccggcgaactctttatggagtttagaaaatttgacctgctgttccccagattcgtttactctctactgtggcctcgcgagtggctcgaagtcggcaggctgcagagattattccacaaaatgttgtctgtctcacatagtcaggagaaggaaggaatctcgaactggctggggaatatgctgcaatttctgcgggagcagggcgtaccgtctgccatgcaggacaagttcaactttatgatgctgtgggcaagccagggaaacacggggcctaccagcttttgggctcttctgtatctactgaagcaccctgaagccatcagggccgtgcgggaagaggcaacacaggtgcttggagaagctcgcctagagactaaacaaagttttgcctttaagctgggtgcattacagcacactcctgttctggacagtgtggtagaggaaactctgcgcctgagagccgcccccaccctgttaaggcttgtgcatgaggactacaccctgaaaatgtcctctggacaagagtacctgtttaggcatggcgacattctggccttattcccatatctgagcgtgcacatggatcccgatatccacccggaacctactgtttttaaatatgaccgttttttgaatccaaacggtagcagaaaagtcgacttctttaaaacaggcaaaaaaatccatcactacaccatgccttggggatctggagtgagcatttgtcccggtagatttttcgctctgtccgaagtcaaactgttcatcctcttgatggtcacccactttgatctcgagctagtcgaccccgatacacctctgccccacgtcgaccctcaacgctggggtttcggaaccatgcaaccctcccatgatgttcgctttaggtataggttacatcccacagagtag

SEQ ID NO: 145975 - DNA, 1506 bp, Artificial Sequence
  derived and/or modified sequence
atggtgctgtggggcccagtcctcggggctctgcttgtggtcattgccggttatctttgtctccccggaatgttaaggcagcggagaccatgggagccacctcttgacaagggaacggtgccctggctgggccacgctatggcttttaggaagaatatgtttgaattccttaagaggatgagaacaaaacacggggacgtgtttaccgtacagctgggcggacagtacttcactttcgtaatggacccattgtctttcggatccatcctgaaggacacccaaagaaaacttgattttggccaatacgccaagaaacttgtgctgaaggttttcgggtaccgaagtgtacaaggagaccatgagatgatccactccgcgtccaccaaacatttgcggggtgatggacttaaggatctgaacgagaccatgctggatagcctctcattcgtcatgctgacgagtaaaggatggtccttggacgcctcttgttggcacgaggacagtctgttccgcttctgttactatattttattcacggctgggtatctgagcctttttgggtacaccaaagacaaggagcaagacctgctgcaggccggtgagcttttcatggagttccgcaaatttgatcttctgtttcccaggtttgtgtactctctcctctggccacgcgaatggctcgaggtgggaaggttacagaggctgtttcacaagatgctttccgtctcacatagccaggaaaaagaaggaatttcaaactggctaggaaatatgctccaatttctgcgggaacagggtgtaccgagcgccatgcaagacaagttcaattttatgatgctgtgggcctctcaaggaaacacgggaccaacctcattttgggcactgctgtacctgctcaagcacccagaagcaatcagggcggtaagggaggaagctacccaggtattgggggaagccagactggaaaccaagcagtccttcgccttcaaattgggcgcactgcaacatacaccggtgctcgatagtgtagtagaggagaccctgcgcttgagagctgccccaacactccttcgactggtccatgaagactacaccttgaagatgtctagtggtcaggagtatctgtttcggcacggggacattctggcactgtttccatatctgtcggtgcatatggatcccgacatccaccccgaacctaccgtgtttaagtatgatcgttttctgaaccccaacgggtctcggaaggtcgatttctttaagaccggcaagaagatccaccactataccatgccatggggcagcggagtgagcatttgccccggtcgcttttttgccttatcggaagtgaagctttttattcttctgatggtcacacactttgatttagaattggtcgacccagacactcccttaccacatgtcgatcctcagaggtggggctttggtactatgcagccctcccacgatgtgaggtttcggtacaggctccaccccacagaatag

SEQ ID NO: 145976 - DNA, 3950 bp, Artificial Sequence
  derived and/or modified sequence
gaaggtgcaagagctgtctgaaaaggtcagagcaaagcatgaagctggtgagcagctgtgaccatagctggaagcttctctctgagctttctcctggttacctcctcctcccctacgtgaccagtcagccaagtgttaagtccaggggaacattttgctgcttccaagtactgtctcactagtgttatttgccataacttgcggccacagggcaaggtccaggtgctcagacctttacatcctggactttccaaggcctcccaaagctctctggcacccagggaacagtgtgcgtgtcgagagcttaatccgcaggagcatagccatggttctctggggtccagtgctgggagctctgctggtggtcattgctggatacctgtgcctgccagggatgctccgacaacgcaggccatgggagccccctctggacaagggtaccgtgccctggcttggccatgccatggctttccggaagaatatgtttgaatttctgaagcgcatgaggaccaagcatggggatgtgttcacagtgcagctagggggccagtacttcaccttcgtcatggaccccctctcctttggctccatcctcaaggacacacagagaaaactagactttgggcaatatgcaaaaaaactggtgctgaaggtatttggataccgttcagtgcaaggggaccatgagatgatacactcagccagcaccaagcatctgaggggggatggcttgaaggatcttaatgagaccatgctggacagcctgtcctttgtaatgctgacgtccaaaggctggagtctggatgccagttgctggcatgaggacagcctctttcgcttctgctattacatcttgttcacagctggctacctgagcttgttcggctacacgaaggacaaggagcaggacctgctacaggcaggagagttattcatggagttccgcaagtttgaccttcttttcccaaggtttgtctactccctgctgtggccccgggagtggctagaagtgggccgactccagcgtctctttcacaagatgctctccgtgagccacagccaggagaaggagggcatcagcaactggctgggcaacatgcttcagtttctgagggagcagggggtaccctcagctatgcaggacaagttcaacttcatgatgctctgggcctcccaggggaacacggggcctacctctttctgggccctcttgtacctcctgaagcacccagaagctattcgggctgtgagggaggaagctacccaggtcctgggtgaggccaggctggagaccaagcagtcctttgccttcaaactcggtgccctgcaacacaccccagttctagacagcgtggtggaggagacgctgcggctgagggctgcacccaccctcctcaggttggttcatgaagactataccctgaagatgtccagtgggcaggagtatctgttccgccatggagacatcctggccctctttccctacctctcagtgcacatggaccctgacatccaccctgagcccaccgtcttcaagtacgatcgcttcctcaaccctaatggcagccggaaagtggacttcttcaagacaggcaagaagatccaccactacaccatgccctggggttcgggcgtttccatctgccctgggaggttctttgcactcagtgaggtgaagctctttatcctgcttatggtcacacactttgacttagagttggtggaccctgacacaccactaccccatgttgacccgcagcgctggggttttggcaccatgcagcccagccacgatgtgcgcttccgctaccgcctgcatcctacagagtgagcttggccaagccagctgcaaacctggccagaggagttctattgcatctctcacctgttctcacccctctgcagccccaagaccccactggccacccctccctctggtcctgtggcaccccctacctctgttctgcctgtcctcgctctctccccgcctagtcatctgacaggcttatcattctctttaaaataccatctctcagagtgggttctgccgaaccctcctctcacaggaagtccagaggaagggggagtatctgtgggcaacttggtttgggagatgatgcctgccttgagaagtcctgagtacagagactggttccccccagacacgagtaacatggcatcttgcaaacatcagcctccactctcccagcttgctttagttttttcagcaacacttatcccacatcctatggaattcaggttctagaacagtgtcatccaacataaatatgaagcaagctacatgagtagtggggttttttggttttgtttgtttgttttgagacagagtcttgctctgtcgccgaggctgcagtgcagcggtgcgatctctgctcactgcaacctctgcctcctgggtttaagcaattctcctgcctcagcctccccagtagctgggattacaggcacctaccaccttgcccagctaatttagtttcctggtaaacacatttttaaaaagtaaaatgaaacaattcatttttataatatactttacttaatccaatatatccaaaatattggcatttcaacgtgatcactattaaaaattttaacgtaatagtttttaccttccctttttcatcctgtcttcaaagtctggtatgtactgtacttttgcagttcttcccagttcagactagccacattccaagtgcttaattgccgtgtgtggcaggtggctgccctattggatagcacaggtctagagaaatgatacctttttttttttttgagacagagtctcactctgttgcccaggctgcagtgcagtggtgtgatcttggctcactacaacctctgcctcccgggttcaagtaattctcctgcctcaggcttctgagtagctgggattataggtgcgcaccaccacacccggctagtttctgtatttttagtagagacggcgtttcaccattttggccggcctcctcggcctcccaaagttctgggattacaggcatgagccactgtgcccagtcaggatgtctttaatgtaggaatcattcaagatccctcctcagtgcccatgtctcccccacctcagggtgctgtcaaccctcccttggtttccatgatcattgctgaactcagagctttcttctatccccagacccacatgggagtctcccagcacctctgactcagcttggccaatgcagaacttggcatctgaacccctgcctcttccctgaaccactcctcctcctgatttccctgctctctctgctcagaacactaccattcaccccatctcccagagacactctccctcctcctctttcaccttcatacaagcaggcccccgtcctatcagtacacccccctgtgatgcctctgaaatatgtaccctcctcccctctcctactgtcattcttatacctgtgatctctgcgtttctcttctacactgctgccagaggcctttttgccaaaagcactgctgattgtcactcttttactttcctggttcccctttgacttcacacacttgacgtttacattttgtcacagttggtcccccttgccttcacatacctgatgtttaaattttgtcacggttagtctccaaacttctcaactttgccagctttctccaatgaaaccatcagtagagacattgctgttcctgcccatcccagtgccagctactccttcctggaagccttcctggatttcacgcatcccatcctctggccagaaatggcctccgaactgtgcagctcctgcagcaccatttgtatcatagcatatctgttatgtgtcgttgctttctgtgtcttggtttctgcctgctgcccacttccctagactggagcctactggggcatggtattttattcatttctgacctccaattccctaagtggagattaaatgttagaaacctga

SEQ ID NO: 145977 - DNA, 1506 bp, Artificial Sequence
  derived and/or modified sequence
atggtgctgtggggccccgtgctgggcgccctgctggtggtgatcgccggctacctgtgcctgcccggcatgctgagacagagaagaccctgggagccccccctggacaagggcaccgtgccctggctgggccacgccatggccttcagaaagaacatgttcgagttcctgaagagaatgagaaccaagcacggcgacgtgttcaccgtgcagctgggcggccagtacttcaccttcgtgatggaccccctgagcttcggcagcatcctgaaggacacccagagaaagctggacttcggccagtacgccaagaagctggtgctgaaggtgttcggctacagaagcgtgcagggcgaccacgagatgatccacagcgccagcaccaagcacctgagaggcgacggcctgaaggacctgaacgagaccatgctggacagcctgagcttcgtgatgctgaccagcaagggctggagcctggacgccagctgctggcacgaggacagcctgttcagattctgctactacatcctgttcaccgccggctacctgagcctgttcggctacaccaaggacaaggagcaggacctgctgcaggccggcgagctgttcatggagttcagaaagttcgacctgctgttccccagattcgtgtacagcctgctgtggcccagagagtggctggaggtgggcagactgcagagactgttccacaagatgctgagcgtgagccacagccaggagaaggagggcatcagcaactggctgggcaacatgctgcagttcctgagagagcagggcgtgcccagcgccatgcaggacaagttcaacttcatgatgctgtgggccagccagggcaacaccggccccaccagcttctgggccctgctgtacctgctgaagcaccccgaggccatcagagccgtgagagaggaggccacccaggtgctgggcgaggccagactggagaccaagcagagcttcgccttcaagctgggcgccctgcagcacacccccgtgctggacagcgtggtggaggagaccctgagactgagagccgcccccaccctgctgagactggtgcacgaggactacaccctgaagatgagcagcggccaggagtacctgttcagacacggcgacatcctggccctgttcccctacctgagcgtgcacatggaccccgacatccaccccgagcccaccgtgttcaagtacgacagattcctgaaccccaacggcagcagaaaggtggacttcttcaagaccggcaagaagatccaccactacaccatgccctggggcagcggcgtgagcatctgccccggcagattcttcgccctgagcgaggtgaagctgttcatcctgctgatggtgacccacttcgacctggagctggtggaccccgacacccccctgccccacgtggacccccagagatggggcttcggcaccatgcagcccagccacgacgtgagattcagatacagactgcaccccaccgagtag

SEQ ID NO: 145978 - protein, 506 aa, Artificial Sequence
  derived and/or modified sequence
MAVPAALIPPTQLVPPQPPISTSASSSGTTTSTSSATSSPAPSIGPPASSGPTLFRPEPIASAAAAAATVTSTGGGGGGGGGGSGGGGGSSGNGGGGGGGGGGSNCNPNLAAASNGSGGGGGGISAGGGVASSTPINASTGSSSSSSSSSSSSSSSSSSSSSSSSCGPLPGKPVYSTPSPVENTPQNNECKMVDLRGAKVASFTVEGCELICLPQAFDLFLKHLVGGLHTVYTKLKRLEITPVVCNVEQVRILRGLGAIQPGVNRCKLISRKDFETLYNDCTNASSRPGRPPKRTQSVTSPENSHIMPHSVPGLMSPGIIPPTDETPLSTPTARDSLDKLSLTGHGQPLPPGFPSPFLFPDGLSSIETLLTNIQGLLKVAIDNARAQEKQVQLEKTELKMDFLRERELRETLEKQLAMEQKNRAIVQKRLKKEKKAKRKLQEALEFETKRREQAEQTLKQAASTDSLRVLNDSLTPEIEADRSGGRTDAERTIQDGRLYLKTTVMY

SEQ ID NO: 145979 - DNA, 4640 bp, Artificial Sequence
  derived and/or modified sequence
atctttgatcaatgtacttgccagggagagcccaagtccttcaaacctcctccttttcaccttcatccttaactttgtgctagagcgagacccacacaacaacagccgaccctccccgccccacccccacccccaaaccagccctcgatcccagcccccggagaggactcgcatttcgacttgcgggacacttttgtgcgttcctctccagagcgcctctcgtgctcgcccctcttgcgctcgctctttattaccttcacctccttttctcccccttctctccctttctccttctcgttctctcccggagttgttgttgcccccctcgctccttctccccccttttttccccttcccctcccgggggtgtgtggcaacttttcctctcgcttctcctccgtctgtttccccttatatgtgaccatggcagtgccggcggctttgatccctccgacccagctggtcccccctcaacccccaatctccacgtctgcttcctcctctggcaccaccacctccacctcttcggcgacttcgtctccggctccttccatcggacccccggcgtcctctgggccaactctgttccgcccggagcccatcgcttcggcggcggcggcggcggccacagtcacctctaccggcggcggcggcggcggcggcggcggcggcagcggaggcggcggcggcagcagcggcaacggaggcggcggtggcggcggcggcggtggcagcaactgcaaccccaacctggcggccgcgagcaacggcagcggcggcggcggcggcggcatcagcgctggcggcggcgtcgcttccagcacccccatcaacgccagcaccggcagcagcagcagcagcagtagcagcagcagcagcagcagcagtagtagcagcagcagcagtagcagcagcagctgcggccccctccccgggaaacccgtgtactcaaccccgtccccagtggaaaacacccctcagaataatgagtgcaaaatggtggatctgaggggggccaaagtggcttccttcacggtggagggctgcgagctgatctgcctgccccaggctttcgacctgttcctgaagcacttggtggggggcttgcatacggtctacaccaagctgaagcggctggagatcacgccggtggtgtgcaatgtggaacaagttcgcatcctgaggggactgggcgccatccagccaggagtgaaccgctgcaaactcatctccaggaaggacttcgagaccctctacaatgactgcaccaacgcaagttctagacctggaaggcctcctaagaggactcaaagtgtcacctccccagagaactctcacatcatgccgcattctgtccctggtctcatgtctcctgggataattccaccaacagatgagaccccgctttctacaccaaccgcaagagacagccttgacaaactctctctaactgggcatggacaaccactgcctccaggttttccatctccttttctgtttcctgatggactgtcttccatcgagactcttctgactaacatacaggggctgttgaaagttgccatagataatgccagagctcaagagaaacaggtccaactggaaaaaactgagctgaagatggattttttaagggaaagagaactaagggaaacacttgagaagcagttggctatggaacaaaagaatagagccatagttcaaaagaggctaaagaaggagaagaaggcaaagagaaaattgcaggaagcacttgagtttgagacgaaacggcgtgaacaagcagaacagacgctaaaacaggcagcttcaacagatagtctcagggtcttaaatgactctctgaccccagagatagaggctgaccgcagtggcggcagaacagatgctgaaaggacaatacaagatggaagactgtatttgaaaactactgtcatgtactgaatctttcctgttgaagaaatccatgttatagaaaagaactttgcagtcagacattcgtcatgggaaagttcagaaaaaaataaagtccttttaagggaacttcctgaattttgtgtattaatgttctttaaaagtttaagtattctacaaaaaaaaaaaaagttttctccattgattttcacctgtggttcataccagagacctgagaatgtttgtaaatgtacaagtatcaaagttcttacagttaattactgcaacttgctgctggacaattgtatacagagttaaaggcaggtctgaataagacctagctttgtttttttctaatggaatgaaccattttcctcttctgaaaattctgtatctgagcacatcaagagactcttgtagcagtggttacccagacttacagaattatgtcctccagaaaccagcaagaacacttggaatgaacgaatgaacttgtagggggcatagaggattcttgaaaaaaaaaaatgcaagagtgattttctgttacattcaatttcaaactctctaattgtgggttttctcctgaagaattttttttcacatactttccaaaagaccaacaaatggatgttgacaacaacccaatgaaataacattttgcatatctgaaaagaagcattgaatataagccaaaagctttcactgaaggtttttttttcttaaaaataaaaaaaaatatataagtgtaacatgttttcattccaaactggtagtggtatatagaattaaagataataatgttgcttcttattcaaactgttggtcatatgtacagtatataaacataaaacacacaaggaaggtattatgtatgcagtagtatactagagtttaggaaaatgaaaattttagaaaatatgttttgtcaccctgttggtcagaaagatgtctttctggttttaacgcatgcaggcatgtaaatatttgtctggagtcacagtattaatgaatgagatcttaagcatctggtgacatcagaactctgtgtcagccacttttatttgtatattgaaccctagctagtgccccaagctgcactattgggaatggattgtggctgaacagcaaatcaaaacaccagaaatatttttatatgttaacgtcatattatgttaatgttgctgaaaacaaaacctaacaaaccttgatgtaccagtccaataccatgtagcgctgagtgataaagttaaaatgtgctgtgcttcccacccttgtcagagggaagggtggctatgtgttattttcactgtctttttgaaagttacagtatgtgttttcactttcgtgcagataactggaagtaaagcggcaaacagtgcttattacatgctaaagttaccttctctttgttttttgcatatctggaattacacctttaaagactgatatgaatcagtacggtcactatacattttatgatttttctgtcatcttaaaattgtatgatcgtaacattatttattaccacaaaacagcaaaatcttcaatgtctaagaaaactagcttaaaatgtttaaatatagttctgattgggtattaattacttgattaagaaaaaattaacattatagatactctggcattacgcttctataccttttaggtcttccttgcaatactggaacataattcttttgtgtagctcactattagccagctaagttcatctttttaataccataaaaaggttatatgtacagttcctattttagcttgcttacaaagggagcattatttttatttaaagtattgctagtaaatgatttgtagaaacttggttttctaagcatagttcttccataaccaccttttgttgtttgagcacaagggattcttttcctagttctatgtgtttgtttccctatatgcagtctttaaaggattacaacacttaaaattgaatggacttgtgtcaagctttttgcatcatacattttttgaaagatttttaaaaaagcctacaacttacatatgtagtagaatcagccattgctctgctcctggcatagagtcacctgtttgttatgtggattaaatagttttaaaatacatatttgaagacctttgagaatgctttagtgtttgatttgaaataaaaggaaattttagcaaggattaaagaaaaaagctatcagctgtatgttaagagagactcttactaacatgttgtaaatattacaattcatgaaatgttattgtaagtctgtaacttaattttttccctgttttagttatacaggttggtttggaaatttgtgttttggcataaacaagtaaaatgtgcccattttatggtttccatgcttttgtaatcctaaaaatattaatgtctagttgttctatattataaccacatttgcgctctatgcaagcccttggaacagaacatactcatcttcatgtaggacctatgaaaattgtctatttttatctatatatttaaagttttctaaaaatgataaaaggttattacgaattttgttgtacaaaatctgtacaaaaatctgtttttacatcataatgcaagaattggaaatttttctatggtagcctagttatttgagcctggtttcaatgtgagaaccacgtttactgttattgtatttaattttcttttccttttcaacaatctcctaataaaactgtctgaaatctcaaaaaaa

SEQ ID NO: 145980 - DNA, 1521 bp, Artificial Sequence
  derived and/or modified sequence
atggcggttccagcggccttgatcccacctacccagctcgtgccaccacaaccaccaatctctacatccgcttcctcttcaggcaccaccacctcaacctcatccgcaactagcagcccagcccccagcattgggccacccgcgtcctctgggccgaccctgttccgccctgagcccattgcttccgccgcagcggctgccgctaccgtcacatctactggggggggcgggggcggagggggagggggaagcggtgggggcgggggttcatccggaaatggcggaggaggcggtggtggcggcggtggttccaattgcaacccgaacctcgcagccgccagcaacggatctgggggtgggggaggaggcatctctgctggtgggggcgtagcctcctcaaccccaatcaatgcttcgacgggatcaagttcaagtagttcctcgagctcttcgtcttcttctagtagctcgagcagtagcagtagctccagttcttgcggccctctgcctgggaagccagtttactcgaccccttccccagtggaaaacacccctcagaacaatgaatgtaaaatggtggacctgcggggggctaaagtcgccagcttcactgtggagggatgcgagctcatatgtctgcctcaggcctttgacctcttcctgaaacatctcgtaggaggattgcacacggtgtacaccaaacttaagcgcctggagattactcccgtggtatgtaacgtggagcaggtgcgcattctgagggggctgggagcgatccagcccggcgtgaatcggtgcaaactgattagccgcaaggatttcgagactttgtacaacgactgtactaacgcgtcctcaagacctggccgaccccccaagagaacacagtctgttaccagcccggagaactcccacatcatgccacacagcgtaccaggactgatgtcccccggcataattccgcccacggacgagacccccctttctactcccaccgcacgggattctctggataaattgagtttaactggtcacggccaaccattgcctcccggatttccttccccttttttatttccagatggtctttcgagtatcgagaccctcctgaccaacattcagggacttctgaaagtagccattgacaacgcccgtgctcaggaaaagcaagtccagctggagaaaactgagttgaagatggacttcctacgagaaagggagcttagagagactctcgagaagcagctggccatggagcagaaaaatcgcgcaatcgtccagaagagacttaaaaaagagaaaaaggccaagaggaaactccaggaagccttggaattcgagactaaaagacgagagcaagccgagcagacgttaaaacaggctgcctccactgactccttgcgagtgctcaacgacagtctcactcccgagatcgaagcagatcgatcaggtgggcggactgatgcggagcgcactatacaagatggtaggctgtacctcaaaactaccgtcatgtactag

SEQ ID NO: 145981 - DNA, 1521 bp, Artificial Sequence
  derived and/or modified sequence
atggctgtgcctgctgccctgatcccccccacccagctggtgcccccccagccccccatcagcaccagcgccagcagcagcggcaccaccaccagcaccagcagcgccaccagcagccctgcccccagcatcggccccccagccagcagcggccccaccctcttccggcctgagcccatcgccagcgctgctgctgctgctgccaccgtgaccagcactggaggcggcggcggcggcggcggcggcggcagcggcggcggcggcggcagcagtggaaatggaggcggcggcggcggcggcggcggcggcagcaactgcaaccccaacctggccgccgccagcaatggaagtggcggcggcggcggcggcatctctgctgggggcggcgtggccagcagcacccccatcaatgccagcacaggcagcagcagcagcagcagcagcagcagcagcagcagcagcagcagcagcagcagcagcagcagcagcagcagctgtggccccctgcccgggaagcctgtgtacagcacccccagccctgtggagaacaccccccagaacaatgaatgcaagatggtggacctgcggggggccaaggtggccagcttcaccgtggagggctgtgagctgatctgcctgccccaggcctttgacctcttcctgaagcacctggtgggcggcctgcacacagtgtacaccaagctgaagaggctggagatcacccctgtggtgtgcaatgtggagcaggtgcgcatcctgcggggcctgggcgccatccagcccggggtgaaccgctgcaagctgatcagcaggaaggactttgagaccctgtacaatgactgcaccaatgccagcagccggcccggccggccccccaagaggacccagagcgtgaccagccctgagaacagccacatcatgccccacagcgtgcccggcctgatgagccctggcatcatccccccaacagatgagacccccctgagcacccccacagcccgggacagcctggacaagctgagcctgactggacatggccagcccctgcccccaggcttccccagccccttcctgttcccagatggcctgagcagcattgagaccctgctgaccaacatccagggcctgctgaaggtggccatcgacaatgcccgggcccaggagaagcaggtgcagctggagaagacagagctgaagatggacttcctgcgggagcgggagctgcgggagaccctggagaagcagctggccatggagcagaagaacagagccatcgtgcagaagaggctgaagaaggagaagaaggccaagaggaagctgcaggaggccctggagtttgagaccaagaggcgggagcaggccgagcagaccctgaagcaggccgccagcacagacagcctgcgggtgctgaatgacagcctgaccccagaaattgaggccgacagaagtggcggccgcacagatgctgagaggaccatccaggacggccgcctgtacctgaagaccaccgtgatgtactag

SEQ ID NO: 145982 - DNA, 1521 bp, Artificial Sequence
  derived and/or modified sequence
atggccgtgcccgccgccctgatcccccccacccagctggtgccccctcagcctcctataagtacttctgccagctcttctgggaccactacatccactagctcagctacgagcagccctgcaccaagcatcggacctcctgcgtcttccggtccaaccctttttcgacccgaaccaatcgctagtgcagcggccgctgcagcaaccgtgacctctacgggcggggggggcggcggagggggtggaggaagcggaggaggtggcggctcttctggaaatgggggtgggggaggcggagggggtggcgggagtaactgtaacccaaacctcgctgccgcctctaacggttccggtggcggtggcgggggtattagtgccggtggaggcgtggcctccagtacaccaataaatgccagcaccggcagctcttcctctagtagctcatccagttctagcagcagctcttcctcctccagttcatcctcatcatcttcctgcggcccattgccgggcaagcctgtgtactcaacacccagtcccgttgagaatactccccagaacaacgagtgtaagatggtggacctccgtggggcaaaggtcgccagcttcaccgtagaaggttgcgaactgatttgcctcccacaggccttcgacctcttcctgaaacacttggtcggtggattgcatacagtttataccaagcttaaacggctcgagattactcctgtggtatgtaacgtggagcaggtcagaatactgagaggtctgggagccatccagcccggggtgaaccgatgtaaattgatctctcggaaagattttgagactctttataacgattgtactaacgcttcctccagacctgggaggccacccaagcgcacgcagtctgtgacctcaccagagaacagtcacatcatgcctcattcagtacccggcttgatgagccccggaatcatccccccaaccgacgaaacccctttaagcactcccacggcgagggactccctcgacaaattgtctttgactggccatgggcagcctttgccccccggatttcccagcccctttttatttcccgacggactgtcctccattgagacattattgacaaacatccaggggctcctgaaggtggctatcgacaacgcccgggcacaggaaaagcaggtccagctggagaagacggaactgaagatggacttcttgagagagagggagcttcgggagacactcgagaagcagttggctatggaacagaagaaccgcgctattgtccaaaaacgcctaaagaaggaaaagaaggctaaaaggaaactacaggaggccctggagtttgagacaaagaggcgcgagcaggctgagcagacactcaaacaagcagctagcaccgactctctacgagtgctgaatgactccctgaccccagagatcgaagctgaccgtagtgggggcaggactgatgccgaacggactatacaggatgggcgtctatatctgaaaaccacagtgatgtattag

SEQ ID NO: 145983 - DNA, 1521 bp, Artificial Sequence
  derived and/or modified sequence
atggctgtgccagccgcattgattccacccacccagcttgttcctcctcagcccccaataagcacttcagctagcagctccggaacgaccacgtctacaagcagcgccaccagttccccagcgcctagcatcgggccacccgctagttcggggccaacattgtttcggccagaacccatcgcctccgctgccgctgcggcagcaactgtcacttccacaggtggcggaggaggcggtggaggcggtggtagtggagggggaggaggctcaagcggcaacgggggtggagggggtgggggaggcggaggtagcaactgtaatcctaatttagccgctgctagtaatgggtcaggaggaggcggtggcggaatatctgcgggtgggggagtggccagtagcactccaatcaacgccagtaccgggagcagtagttccagctcttccagctccagctctagcagcagttcttcctccagcagtagctcttcgagttcttgcgggccacttcccggaaagcctgtttacagcaccccttctccggtcgagaacacaccccagaacaatgagtgtaaaatggtcgatctgagaggggcaaaagtggcttccttcactgtggaagggtgcgagctgatatgtctgccacaggcgtttgacttgttcctgaagcacttggtgggaggtttgcatactgtgtacaccaaactcaaaagattggaaatcacaccagtggtctgcaacgtggagcaggtgcggatcctgaggggactgggtgccatccagccaggcgtcaaccgctgcaagttgatctcaagaaaggactttgagaccctttataatgattgtaccaacgccagttctcggccaggacgaccgccaaaacgtacccagagtgttacttccccagaaaactcgcacattatgccccactcagtgcctggcctgatgagcccaggcattattccaccgacggacgagacacctctctcaactcccacagctcgcgactccttagacaagttatcgttgaccgggcatgggcagcccttgccacctggctttccctctcctttcttatttcctgatgggctgtccagcattgagaccctactgacaaatattcaaggcctgcttaaagttgcaatagacaacgcgagagcccaggagaaacaagtgcaactggagaaaactgagctgaagatggatttcctcagagagcgggagttgcgtgagacactcgagaagcagctcgcaatggaacaaaagaaccgggctattgtccagaagcgcctgaagaaagagaagaaagccaagagaaaactgcaagaggcactggaatttgaaaccaagagaagagaacaggccgagcagacacttaagcaggccgctagcactgattcgttgagagtactgaacgattctctcacaccggagattgaggccgataggtcaggagggagaaccgacgcagagagaaccattcaggatggcaggttatatctaaaaacgactgttatgtactag

SEQ ID NO: 145984 - DNA, 4633 bp, Artificial Sequence
  derived and/or modified sequence
atctttgatcaatgtacttgccagggagagcccaagtccttcaaacctcctccttttcaccttcatccttaactttgtgctagagcgagacccacacaacaacagccgaccctccccgccccacccccacccccaaaccagccctcgatcccagcccccggagaggactcgcatttcgacttgcgggacacttttgtgcgttcctctccagagcgcctctcgtgctcgcccctcttgcgctcgctctttattaccttcacctccttttctcccccttctctccctttctccttctcgttctctcccggagttgttgttgcccccctcgctccttctccccccttttttccccttcccctcccgggggtgtgtggcaacttttcctctcgcttctcctccgtctgtttccccttatatgtgaccatggcagtgccggcggctttgatccctccgacccagctggtcccccctcaacccccaatctccacgtctgcttcctcctctggcaccaccacctccacctcttcggcgacttcgtctccggctccttccatcggacccccggcgtcctctgggccaactctgttccgcccggagcccatcgcttcggcggcggcggcggcggccacagtcacctctaccggcggcggcggcggcggcggcggcggcggcagcggaggcggcggcggcagcagcggcaacggaggcggcggtggcggcggcggcggtggcagcaactgcaaccccaacctggcggccgcgagcaacggcagcggcggcggcggcggcggcatcagcgctggcggcggcgtcgcttccagcacccccatcaacgccagcaccggcagcagcagcagcagcagtagcagcagcagcagcagcagcagtagtagcagcagcagcagtagcagcagcagctgcggccccctccccgggaaacccgtgtactcaaccccgtccccagtggaaaacacccctcagaataatgagtgcaaaatggtggatctgaggggggccaaagtggcttccttcacggtggagggctgcgagctgatctgcctgccccaggctttcgacctgttcctgaagcacttggtggggggcttgcatacggtctacaccaagctgaagcggctggagatcacgccggtggtgtgcaatgtggaacaagttcgcatcctgaggggactgggcgccatccagccaggagtgaaccgctgcaaactcatctccaggaaggacttcgagaccctctacaatgactgcaccaacgcaagttctagacctggaaggcctcctaagaggactcaaagtgtcacctccccagagaactctcacatcatgccgcattctgtccctggtctcatgtctcctgggataattccaccaacagatgagaccccgctttctacaccaaccgcaagagacagccttgacaaactctctctaactgggcatggacaaccactgcctccaggttttccatctccttttctgtttcctgatggactgtcttccatcgagactcttctgactaacatacaggggctgttgaaagttgccatagataatgccagagctcaagagaaacaggtccaactggaaaaaactgagctgaagatggattttttaagggaaagagaactaagggaaacacttgagaagcagttggctatggaacaaaagaatagagccatagttcaaaagaggctaaagaaggagaagaaggcaaagagaaaattgcaggaagcacttgagtttgagacgaaacggcgtgaacaagcagaacagacgctaaaacaggcagcttcaacagatagtctcagggtcttaaatgactctctgaccccagagatagaggctgaccgcagtggcggcagaacagatgctgaaaggacaatacaagatggaagactgtatttgaaaactactgtcatgtactgaatctttcctgttgaagaaatccatgttatagaaaagaactttgcagtcagacattcgtcatgggaaagttcagaaaaaaataaagtccttttaagggaacttcctgaattttgtgtattaatgttctttaaaagtttaagtattctacaaaaaaaaaaaaagttttctccattgattttcacctgtggttcataccagagacctgagaatgtttgtaaatgtacaagtatcaaagttcttacagttaattactgcaacttgctgctggacaattgtatacagagttaaaggcaggtctgaataagacctagctttgtttttttctaatggaatgaaccattttcctcttctgaaaattctgtatctgagcacatcaagagactcttgtagcagtggttacccagacttacagaattatgtcctccagaaaccagcaagaacacttggaatgaacgaatgaacttgtagggggcatagaggattcttgaaaaaaaaaaatgcaagagtgattttctgttacattcaatttcaaactctctaattgtgggttttctcctgaagaattttttttcacatactttccaaaagaccaacaaatggatgttgacaacaacccaatgaaataacattttgcatatctgaaaagaagcattgaatataagccaaaagctttcactgaaggtttttttttcttaaaaataaaaaaaaatatataagtgtaacatgttttcattccaaactggtagtggtatgtagaattaaagataataatgttgcttcttattcaaactgttggtcatatgtacagtatataaacataaaacacacaaggaaggtattatgtatgcagtagtatactagagtttaggaaaatgaaaattttagaaaatatgttttgtcaccctgttggtcagaaagatgtctttctggttttaacgcatgcaggcatgtaaatatttgtctggagtcacagtattaatgaatgagatcttaagcatctggtgacatcagaactctgtgtcagccacttttatttgtatattgaaccctagctagtgccccaagctgcactattgggaatggattgtggctgaacagcaaatcaaaacaccagaaatatttttatatgttaacgtcatattatgttaatgttgctgaaaacaaaacctaacaaaccttgatgtaccagtccaataccatgtagcgctgagtgataaagttaaaatgtgctgtgcttcccacccttgtcagagggaagggtggctatgtgttattttcactgtctttttgaaagttacagtatgtgttttcactttcgtgcagataactggaagtaaagcggcaaacagtgcttattacatgctaaagttaccttctctttgttttttgcatatctggaattacacctttaaagactgatatgaatcagtacggtcactatacattttatgatttttctgtcatcttaaaattgtatgatcgtaacattatttattaccacaaaacagcaaaatcttcaatgtctaagaaaactagcttaaaatgtttaaatatagttctgattgggtattaattacttgattaagaaaaaattaacattatagatactctggcattacgcttctataccttttaggtcttccttgcaatactggaacataattcttttgtgtagctcactattagccagctaagttcatctttttaataccataaaaaggttatatgtacagttcctattttagcttgcttacaaagggagcattatttttatttaaagtattgctagtaaatgatttgtagaaacttggttttctaagcatagttcttccataaccaccttttgttgtttgagcacaagggattcttttcctagttctatgtgtttgtttccctatatgcagtctttaaaggattacaacacttaaaattgaatggacttgtgtcaagctttttgcatcatacattttttgaaagatttttaaaaaagcctacaacttacatatgtagtagaatcagccattgctctgctcctggcatagagtcacctgtttgttatgtggattaaatagttttaaaatacatatttgaagacctttgagaatgctttagtgtttgatttgaaataaaaggaaattttagcaaggattaaagaaaaaagctatcagctgtatgttaagagagactcttactaacatgttgtaaatattacaattcatgaaatgttattgtaagtctgtaacttaattttttccctgttttagttatacaggttggtttggaaatttgtgttttggcataaacaagtaaaatgtgcccattttatggtttccatgcttttgtaatcctaaaaatattaatgtctagttgttctatattataaccacatttgcgctctatgcaagcccttggaacagaacatactcatcttcatgtaggacctatgaaaattgtctatttttatctatatatttaaagttttctaaaaatgataaaaggttattacgaattttgttgtacaaaatctgtacaaaaatctgtttttacatcataatgcaagaattggaaatttttctatggtagcctagttatttgagcctggtttcaatgtgagaaccacgtttactgttattgtatttaattttcttttccttttcaacaatctcctaataaaactgtctgaaatctc

SEQ ID NO: 145985 - DNA, 1521 bp, Artificial Sequence
  derived and/or modified sequence
atggccgtgcccgccgccctgatcccccccacccagctggtgcccccccagccccccatcagcaccagcgccagcagcagcggcaccaccaccagcaccagcagcgccaccagcagccccgcccccagcatcggcccccccgccagcagcggccccaccctgttcagacccgagcccatcgccagcgccgccgccgccgccgccaccgtgaccagcaccggcggcggcggcggcggcggcggcggcggcagcggcggcggcggcggcagcagcggcaacggcggcggcggcggcggcggcggcggcggcagcaactgcaaccccaacctggccgccgccagcaacggcagcggcggcggcggcggcggcatcagcgccggcggcggcgtggccagcagcacccccatcaacgccagcaccggcagcagcagcagcagcagcagcagcagcagcagcagcagcagcagcagcagcagcagcagcagcagcagcagctgcggccccctgcccggcaagcccgtgtacagcacccccagccccgtggagaacaccccccagaacaacgagtgcaagatggtggacctgagaggcgccaaggtggccagcttcaccgtggagggctgcgagctgatctgcctgccccaggccttcgacctgttcctgaagcacctggtgggcggcctgcacaccgtgtacaccaagctgaagagactggagatcacccccgtggtgtgcaacgtggagcaggtgagaatcctgagaggcctgggcgccatccagcccggcgtgaacagatgcaagctgatcagcagaaaggacttcgagaccctgtacaacgactgcaccaacgccagcagcagacccggcagaccccccaagagaacccagagcgtgaccagccccgagaacagccacatcatgccccacagcgtgcccggcctgatgagccccggcatcatcccccccaccgacgagacccccctgagcacccccaccgccagagacagcctggacaagctgagcctgaccggccacggccagcccctgccccccggcttccccagccccttcctgttccccgacggcctgagcagcatcgagaccctgctgaccaacatccagggcctgctgaaggtggccatcgacaacgccagagcccaggagaagcaggtgcagctggagaagaccgagctgaagatggacttcctgagagagagagagctgagagagaccctggagaagcagctggccatggagcagaagaacagagccatcgtgcagaagagactgaagaaggagaagaaggccaagagaaagctgcaggaggccctggagttcgagaccaagagaagagagcaggccgagcagaccctgaagcaggccgccagcaccgacagcctgagagtgctgaacgacagcctgacccccgagatcgaggccgacagaagcggcggcagaaccgacgccgagagaaccatccaggacggcagactgtacctgaagaccaccgtgatgtactag

SEQ ID NO: 145986 - protein, 102 aa, Artificial Sequence
  derived and/or modified sequence
MSSPPEGKLETKAGHPPAVKAGGMRIVQKHPHTGDTKEEKDKDDQEWESPSPPKPTVFISGVIARGDKDFPPAAAQVAHQKPHASMDKHPSPRTQHIQQPRK

SEQ ID NO: 145987 - DNA, 309 bp, Artificial Sequence
  derived and/or modified sequence
atgagcagcccccccgagggcaagctggagaccaaggccggccacccccccgccgtgaaggccggcggcatgagaatcgtgcagaagcacccccacaccggcgacaccaaggaggagaaggacaaggacgaccaggagtgggagagccccagcccccccaagcccaccgtgttcatcagcggcgtgatcgccagaggcgacaaggacttcccccccgccgccgcccaggtggcccaccagaagccccacgccagcatggacaagcaccccagccccagaacccagcacatccagcagcccagaaagtag

SEQ ID NO: 145988 - DNA, 309 bp, Artificial Sequence
  derived and/or modified sequence
atgtcctcaccgcctgaggggaagttagaaaccaaggcgggtcaccctccagcagtgaaagcaggcggaatgcgcatcgtgcagaaacatccgcacaccggggacacgaaggaagaaaaagacaaggatgaccaggaatgggagtccccgtcccccccaaagcccaccgtctttatttcaggggtcatcgcaagaggagacaaagattttccgcctgccgcagcacaggtagctcatcagaagcctcacgcatctatggacaaacatcccagcccccggacacagcacattcagcagccacgaaagtag

SEQ ID NO: 145989 - DNA, 309 bp, Artificial Sequence
  derived and/or modified sequence
atgagcagccccccagagggcaagctggagaccaaggccggccaccccccagctgtgaaggccggcggcatgagaattgtgcagaagcacccccacactggagacaccaaggaggagaaggacaaggatgaccaggagtgggagagccccagcccccccaagcccaccgtcttcatcagcggcgtgattgcccggggggacaaggacttccccccagctgctgcccaggtggcccaccagaagccccacgcctccatggacaagcaccccagccccaggacccagcacatccagcagcccaggaagtag

SEQ ID NO: 145990 - DNA, 309 bp, Artificial Sequence
  derived and/or modified sequence
atgagcagcccccccgagggcaagctggagaccaaggccggccacccccctgccgtcaaggctggtgggatgcggattgtacaaaagcaccctcacacgggtgatacaaaggaagagaaagataaagatgaccaggagtgggagtcgccctcccccccaaagcctaccgtgttcatttctggtgtaattgctaggggcgacaaggactttcctccagcagcagcacaggtcgcgcaccagaaacctcacgcctcgatggataagcaccccagtccccgcactcagcacattcagcaacctcggaagtag

SEQ ID NO: 145991 - DNA, 309 bp, Artificial Sequence
  derived and/or modified sequence
atgtcatccccaccagaaggaaagcttgagacaaaagccggtcacccacctgctgtaaaggctggaggcatgagaatagtccagaaacaccctcacactggagataccaaggaagagaaggataaggatgatcaggagtgggagagcccttcaccaccaaagccgaccgtatttatctctggagtgatagctagaggcgacaaagattttcccccagctgcagcacaggtcgcccaccagaaaccccatgcttccatggataagcacccctcgccgagaacacagcatattcagcaaccacgaaaatag

SEQ ID NO: 145992 - protein, 649 aa, Artificial Sequence
  derived and/or modified sequence
MAGVSFSGHRLELLAAYEEVIREESAADWALYTYEDGSDDLKLAASGEGGLQELSGHFENQKVMYGFCSVKDSQAALPKYVLINWVGEDVPDARKCACASHVAKVAEFFQGVDVIVNASSVEDIDAGAIGQRLSNGLARLSSPVLHRLRLREDENAEPVGTTYQKTDAAVEMKRINREQFWEQAKKEEELRKEEERKKALDERLRFEQERMEQERQEQEERERRYREREQQIEEHRRKQQTLEAEEAKRRLKEQSIFGDHRDEEEETHMKKSESEVEEAAAIIAQRPDNPREFFKQQERVASASAGSCDVPSPFNHRPGSHLDSHRRMAPTPIPTRSPSDSSTASTPVAEQIERALDEVTSSQPPPLPPPPPPAQETQEPSPILDSEETRAAAPQAWAGPMEEPPQAQAPPRGPGSPAEDLMFMESAEQAVLAAPVEPATADATEIHDAADTIETDTATADTTVANNVPPAATSLIDLWPGNGEGASTLQGEPRAPTPPSGTEVTLAEVPLLDEVAPEPLLPAGEGCATLLNFDELPEPPATFCDPEEVEGESLAAPQTPTLPSALEELEQEQEPEPHLLTNGETTQKEGTQASEGYFSQSQEEEFAQSEELCAKAPPPVFYNKPPEIDITCWDADPVPEEEEGFEGGD

SEQ ID NO: 145993 - protein, 381 aa, Artificial Sequence
  derived and/or modified sequence
MKKSESEVEEAAAIIAQRPDNPREFFKQQERVASASAGSCDVPSPFNHRPGSHLDSHRRMAPTPIPTRSPSDSSTASTPVAEQIERALDEVTSSQPPPLPPPPPPAQETQEPSPILDSEETRAAAPQAWAGPMEEPPQAQAPPRGPGSPAEDLMFMESAEQAVLAAPVEPATADATEIHDAADTIETDTATADTTVANNVPPAATSLIDLWPGNGEGASTLQGEPRAPTPPSGTEVTLAEVPLLDEVAPEPLLPAGEGCATLLNFDELPEPPATFCDPEEVEGESLAAPQTPTLPSALEELEQEQEPEPHLLTNGETTQKEGTQASEGYFSQSQEEEFAQSEELCAKAPPPVFYNKPPEIDITCWDADPVPEEEEGFEGGD

SEQ ID NO: 145994 - protein, 317 aa, Artificial Sequence
  derived and/or modified sequence
MAGVSFSGHRLELLAAYEEVIREESAADWALYTYEDGSDDLKLAASGGGLQELSGHFENQKVMYGFCSVKDSQAALPKYVLINWVGEDVPDARKCACASHVAKVAEFFQGVDVIVNASSVEDIDAGAIGQRLSNGLARLSSPVLHRLRLREDENAEPVGTTYQKTDAAVEMKRINREQFWEQAKKEEELRKEEERKKALDERLRFEQERMEQERQEQEERERRYREREQQIEEHRRKQQTLEAEEAKRRLKEQSIFGDHRDEEEETHMKKSESEVEEAAAIIAQRPDNPREFFKQQERVASASAGSCDVPSPFNHRP

SEQ ID NO: 145995 - DNA, 1950 bp, Artificial Sequence
  derived and/or modified sequence
atggccggagtgtcattttccggtcacagactcgagctgctggccgcttacgaggaggtgatcagagaagagagcgccgctgattgggctctgtacacttacgaagatggctcagacgatctgaagctggccgcctcaggggaaggggggttacaggagctgagcggccactttgagaatcagaaagtgatgtacggtttctgctcagtgaaggactcccaggcagccctgcctaagtacgtactgattaactgggtgggcgaagacgtgcctgacgctcgtaaatgtgcatgcgcctcccacgtggcaaaagtggcagagttctttcagggcgtcgacgtgatagtgaatgcttcatccgtcgaggatattgacgccggcgccattgggcagaggctttctaatggattagcaaggctgtcctcgccagtgctccatcgattgcgactgagggaagatgagaatgcggaaccggtcggcacgacataccaaaaaactgatgcagcagtagagatgaaacgaattaacagggaacaattttgggaacaagccaagaaagaggaagagttgaggaaggaggaggagcggaagaaagcactggatgaaaggctgcggtttgagcaagaacggatggagcaagagagacaggagcaggaggagcgggagaggaggtatagggaacgggaacaacagatcgaggagcatcgtaggaagcagcaaactctggaggccgaggaagccaagcggagactgaaggagcaaagcatcttcggagaccaccgcgacgaagaagaagaaactcacatgaaaaaatccgaaagtgaggtggaagaggcggccgccatcatagcgcagagacccgacaaccctagggagtttttcaagcagcaggagcgggtagcaagtgcttctgccggatcctgcgacgttccaagtccatttaatcatagacccgggagtcacctggattcacatagaaggatggctcctacccctatccccactaggagtcctagcgattcatcaaccgcctctacaccagtggccgagcagatcgagcgggctttggatgaggtcacctcgtctcagcccccccccctgcctcccccccctcctccggctcaggaaacacaagaaccctccccaatcctggacagcgaggaaaccagggccgccgccccacaggcctgggctggcccaatggaagagccaccccaagcccaggcaccaccacgcggccctggatcacctgccgaggatctgatgttcatggaatctgccgaacaagccgtgctggctgctcctgtcgaacccgctacagccgacgctacagaaattcatgacgcggcagatacaatagaaaccgacacagccaccgccgacaccactgtggctaataatgtaccacctgccgctacctccttgattgatctgtggcctgggaatggagagggtgcttctaccctgcagggcgaaccccgcgccccgacaccccccagtggcacagaggtcactttagccgaggtgcccctactggacgaagtcgcccccgagcccttactgccggccggagaaggatgtgccaccctgctcaattttgatgaacttccagagccccctgctacattctgtgatcctgaggaggtggagggcgagtctcttgccgcgcctcaaacaccaactctgccaagcgcccttgaagagctagaacaggagcaggagccagagccccatctcctcaccaacggagagactactcaaaaggaaggcacccaggcctcagagggctacttttcacagtcccaagaagaagagtttgcccagtccgaagaactgtgtgccaaggctcccccacccgtgttttataacaaacctcctgagattgacattacatgctgggatgctgacccggttcccgaagaggaggaaggattcgagggtggggattag

SEQ ID NO: 145996 - DNA, 954 bp, Artificial Sequence
  derived and/or modified sequence
atggcaggcgtaagttttagcggtcaccgcttggagttgctggccgcatacgaggaagtcatcagggaggagtctgcagccgattgggcactctatacttatgaagatggctcagacgaccttaaattggctgcctctggaggaggtttgcaagagctcagtggacattttgagaatcagaaagtgatgtatggcttttgttccgtcaaggacagtcaagccgccttaccaaagtatgtcctgatcaattgggtgggagaggacgtgcccgacgcaagaaaatgcgcctgtgctagccacgtggccaaggtagcggaatttttccagggggtggacgtgatcgttaatgctagttcggtggaagacattgacgccggagcaataggacagcgcctcagtaacggcctggctcgtctcagttcaccggtgctgcatcggctaaggctgagagaagatgagaacgccgagcccgtgggcactacgtaccagaagaccgacgccgcagtggagatgaagaggatcaatagggaacaattttgggaacaggctaagaaggaagaagaattgagaaaggaggaagaacgcaaaaaagctctggacgaacgcctgaggtttgaacaagagcgcatggagcaggagagacaagagcaggaggaaagagaacgccgttaccgcgagagagagcagcaaatagaggagcaccgtagaaaacagcagactttggaagccgaggaggctaagcggagactcaaggaacagagtatctttggcgatcaccgggacgaggaggaggagacccacatgaagaagtcggaatcagaggtggaagaggccgcagcgatcattgcacagcggccggataatcctagagaattcttcaaacagcaggagagagtcgctagcgcaagtgctggatcgtgtgatgtgccctcacccttcaaccaccggccgtag

SEQ ID NO: 145997 - DNA, 375 bp, Artificial Sequence
  derived and/or modified sequence
atggcaggcgtcagcttctcgggacatcggctggaactgctcgctgcttacgaagaagtcatcagggaggagtcagccgctgattgggcattgtatacctatgaggacgggtctgatgatctaaagctggccgcctccggtgagggaggtctacaggagctgtctggccattttgagaaccaaaaagtgatgtacggcttctgttccgtgaaggactcccaggcagcactcccaaagtacgtgctcattaactgggttggcgaggacgtaccagatgccaggaaatgcgcctgcgcttcacatgtggccaaagtggccgagttctttcagggagtggacgtaatagtgaacgcttcatcagttgaagatatctag

SEQ ID NO: 145998 - DNA, 1950 bp, Artificial Sequence
  derived and/or modified sequence
atggccggcgtgtccttcagcggccaccggctggagctgctggccgcctatgaggaggtgatccgggaggagagcgctgctgactgggccctgtacacctatgaagatggcagtgatgacctgaagctggccgccagcggggagggcggcctgcaggagctgagcggccactttgagaaccagaaggtgatgtatggcttctgcagcgtgaaggacagccaggccgccctgcccaagtatgtgctgatcaactgggtgggggaggatgtgcctgatgccaggaaatgtgcctgtgccagccacgtggccaaggtggccgagttcttccagggcgtggatgtgattgtgaatgccagctctgtggaggacattgatgctggggccatcggccagaggctgagcaatggcctggcccggctgagcagccctgtgctgcaccggctgcggctgcgggaggatgaaaatgctgagcctgtgggcaccacctaccagaagacagatgctgctgtggagatgaagaggatcaaccgggagcagttctgggagcaggccaagaaggaggaggagctgaggaaggaggaggagaggaagaaggccctggatgagcggctgcgctttgagcaggagaggatggagcaggagcggcaggagcaggaggagcgggagcggcgctaccgggagcgggagcagcagatcgaggagcacaggaggaagcagcagaccctggaggccgaggaggccaagaggcggctgaaggagcagagcatctttggagaccacagagatgaggaggaggagacccacatgaagaagtctgagagcgaggtggaggaggccgccgccatcatcgcccagaggccagacaacccccgggagttcttcaagcagcaggagcgggtggccagcgccagcgctggcagctgtgatgtgcccagccccttcaaccaccggcccggcagccacctggacagccacaggaggatggcccccacccccatccccaccaggagccccagcgacagcagcacagccagcacccctgtggccgagcagatcgagcgggccctggatgaggtgaccagcagccagcccccacccctgcccccacctcctcctccagcccaggagacccaggagcccagccccatcctggacagcgaggagaccagggctgctgccccccaggcctgggccggccccatggaggagcccccccaggcccaggccccaccccggggccctggcagccctgctgaggacctgatgttcatggagagcgctgagcaggccgtgctggccgcccctgtggagcccgccacagcagatgccacagagatccatgatgctgctgacaccattgaaacagacacagccacagctgacaccaccgtggccaacaacgtgcccccagctgccaccagcctgattgacctgtggccaggaaatggagagggcgccagcaccctgcagggcgagccccgggcccccaccccacccagcggcacagaggtgaccctggccgaggtgcccctgctggatgaggtggcccctgagcccctgctgcctgctggggagggctgtgccaccctgctgaactttgatgagctgcctgagcccccagccaccttctgtgaccctgaggaggtggagggggagagcctggccgccccccagacccccaccctgcccagcgccctggaggagctggagcaggagcaggagcctgagccccacctgctgaccaacggggagaccacccagaaggagggcacccaggccagcgagggctacttcagccagagccaggaggaggagtttgcccagagcgaggagctgtgtgccaaggcccctcctcctgtgttctacaacaagcccccagaaattgacatcacctgctgggatgctgaccctgtgcctgaggaggaggagggctttgaaggaggagactag

SEQ ID NO: 145999 - DNA, 954 bp, Artificial Sequence
  derived and/or modified sequence
atggccggcgtgtccttcagcggccaccggctggagctgctggccgcctatgaggaggtgatccgggaggagagcgctgctgactgggccctgtacacctatgaagatggcagtgatgacctgaagctggccgccagcggcggcggcctgcaggagctgagcggccactttgagaaccagaaggtgatgtatggcttctgcagcgtgaaggacagccaggccgccctgcccaagtatgtgctgatcaactgggtgggagaagatgtgcctgatgccaggaaatgtgcctgtgccagccacgtggccaaggtggccgagttcttccagggcgtggatgtgattgtgaatgccagctctgtggaggacattgatgctggggccatcggccagaggctgagcaatggcctggcccggctgagcagccctgtgctgcaccggctgcggctgagagaagatgaaaatgctgagcctgtgggcaccacctaccagaagacagatgctgctgtggagatgaagaggatcaaccgggagcagttctgggagcaggccaagaaggaggaggagctgaggaaggaggaggagaggaagaaggccctggatgagcggctgcgctttgagcaggagaggatggagcaggagcggcaggagcaggaggagcgggagcggcgctaccgggagcgggagcagcagatcgaggagcacaggaggaagcagcagaccctggaggccgaggaggccaagaggcggctgaaggagcagagcatctttggagaccacagagatgaggaggaggagacccacatgaagaagtctgagagcgaggtggaggaggccgccgccatcatcgcccagaggccagacaacccccgggagttcttcaagcagcaggagcgggtggccagcgccagcgctggcagctgtgatgtgcccagccccttcaaccaccggccctag

SEQ ID NO: 146000 - DNA, 375 bp, Artificial Sequence
  derived and/or modified sequence
atggccggcgtgtccttcagcggccaccggctggagctgctggccgcctatgaggaggtgatccgggaggagagcgctgctgactgggccctgtacacctatgaagatggcagtgatgacctgaagctggccgccagcggggagggcggcctgcaggagctgagcggccactttgagaaccagaaggtgatgtatggcttctgcagcgtgaaggacagccaggccgccctgcccaagtatgtgctgatcaactgggtgggggaggatgtgcctgatgccaggaaatgtgcctgtgccagccacgtggccaaggtggccgagttcttccagggcgtggatgtgattgtgaatgccagctctgtggaggacatctag

SEQ ID NO: 146001 - DNA, 1950 bp, Artificial Sequence
  derived and/or modified sequence
atggccggcgtgagcttcagcggccaccggctggagctgctggccgcatacgaggaagtcatccgagaggaaagtgctgccgattgggccctgtatacctatgaggatggcagcgatgatctgaaacttgccgccagcggcgagggaggtttgcaagaactttctggacactttgagaaccagaaggtgatgtacggattttgctcagtaaaggactcccaggctgccctgccgaagtatgtcctgattaattgggttggggaagacgtgcccgacgcacgaaaatgtgcttgcgcatcgcacgtcgctaaggtcgcagaatttttccagggtgtagacgtgatcgtgaacgcgtctagcgtggaggacatcgacgcgggggcgatcggacagcgactgtcaaacggcctggcacgccttagcagccctgtgcttcatagactccgacttcgggaggacgagaacgccgagccggtgggcactacctaccagaagacagacgcagccgtcgagatgaaaagaatcaaccgggagcagttttgggagcaggcgaagaaagaggaagagctacgaaaagaggaggagagaaaaaaggccctggacgagagattgcggttcgagcaagaaaggatggagcaggagcggcaggagcaagaggagcgggaaagaaggtacagggagcgtgagcaacaaattgaggaacaccgtcggaaacagcagacgctggaggccgaggaagctaagcgtaggctgaaggagcagagcatcttcggcgatcacagggacgaggaagaagagacacacatgaaaaagtccgagagcgaagtggaggaagcagctgcaatcatcgctcagcgacccgataacccgcgcgagttctttaagcagcaagaacgcgtggcatccgcatcagcgggtagttgtgatgttcctagcccgttcaaccaccgtccaggctctcacctagatagccatcgtcggatggcccctacaccgattccaaccagaagccccagcgacagcagtaccgcaagcacaccagtggctgagcagatagaacgggccttggacgaagttacttcaagtcagcctcctcctctccctcctccacctcccccggcccaggaaacacaggagccctcgcctatcctggattcagaagagacacgagccgctgctccgcaggcatgggccggcccaatggaagaaccgcctcaggcacaggcaccccctcgtgggcccggcagccccgcagaagatctaatgtttatggagtcagccgagcaggcagtgctagcagcccctgtggaacctgcaacagcagatgccacagaaatacacgatgccgcagatacgatcgagacagacactgctaccgccgacacaacagtggctaataacgtgcctccagctgcaaccagcctcatcgacctttggccaggtaacggcgaaggagcatccacattgcagggcgaaccaagggctcccacccccccttccggaacagaagtcacccttgccgaggtgcctctcctggacgaagtcgcgcctgaaccattgctgcctgcgggagagggatgtgctacactccttaattttgatgaactgcccgaacctccagccaccttctgcgatcccgaagaggtcgaaggggaatcactggcggctccgcagaccccaaccctcccctccgccctagaggaacttgaacaagagcaggagccagaaccccacctcctcacaaatggcgagaccacgcagaaagagggcacacaggcctcagagggctacttttcccagtcccaagaagaagagttcgcccagtccgaggagctgtgtgctaaggctcccccaccagtcttctacaataaaccccccgagatagatattacctgctgggatgctgaccccgtgcctgaagaagaagaaggcttcgaaggaggggactag

SEQ ID NO: 146002 - DNA, 954 bp, Artificial Sequence
  derived and/or modified sequence
atggccggcgtgagcttcagcggccaccggctggagctgctggccgcgtatgaagaggtcatcagggaggagtctgcggccgattgggcactttacacatacgaggatgggtctgacgatcttaagctggcagctagcgggggcgggctgcaggagctgagcggccacttcgagaaccagaaggtcatgtatggcttctgtagcgtcaaagattcgcaggccgcactgccaaaatacgtgttgatcaactgggtgggcgaggatgtccccgatgctaggaagtgtgcttgtgccagtcacgtggccaaagttgctgagttttttcaaggagtggacgtgatcgtgaatgctagcagcgtggaagatatcgatgccggcgcgataggacagaggctcagcaacggacttgcacgcctgagctctccagtcctccatcgtctgcggcttcgtgaggacgagaatgccgaaccggttggaaccacataccagaagacggacgctgctgtcgagatgaaacggatcaatcgcgagcaattctgggagcaggcaaagaaagaagaggagttgcgcaaagaagaggagcgcaagaaagccctagacgaacgcctgcgttttgagcaggaaaggatggagcaagaacggcaggaacaagaagagagagaaagacgttacagagaaagagaacaacagatcgaagagcaccgaaggaagcagcaaactctcgaggctgaggaggctaagcgccgactgaaagagcagagcatattcggagatcacagggatgaagaagaggagacgcacatgaagaaatctgagtccgaagtggaggaggctgcggctatcatcgcacagagacctgataacccaagagagtttttcaagcagcaggaaagagtggcatctgccagcgcgggtagttgtgatgttccatccccttttaatcacagaccttag

SEQ ID NO: 146003 - DNA, 375 bp, Artificial Sequence
  derived and/or modified sequence
atggccggcgtgagcttcagcggccaccggctggagctgctggccgcttatgaggaggtcatccgagaggagtctgctgcggactgggccctctacacatatgaagatggcagtgacgatctcaagctggccgcgtccggggagggtggactccaggagctgtcaggccacttcgagaaccagaaggtcatgtatggattttgctcagtcaaagatagtcaggccgcattgccaaagtatgtgttaatcaactgggtgggcgaggatgtgccagatgctcgaaaatgtgcttgtgcatcacatgtagcaaaagtcgcagagtttttccagggagttgacgtaattgtgaatgcctcttccgtcgaggacatttag

SEQ ID NO: 146004 - DNA, 1950 bp, Artificial Sequence
  derived and/or modified sequence
atggcaggcgtatccttttcaggtcacaggctggagttgctcgctgcgtacgaagaagtcatccgggaagagagtgccgcagactgggctttgtacacctacgaggacggatctgacgatcttaagctcgcagccagtggtgaagggggtctgcaggagctgagtggacatttcgaaaaccaaaaggtcatgtacggcttctgctcagtgaaagactctcaagcggcactcccaaaatacgtgctgattaactgggttggggaggacgtgccagatgcacgcaagtgtgcgtgcgccagccacgtagcgaaggtggccgaatttttccaaggtgttgacgtgattgtgaatgcaagtagcgttgaagatattgatgcaggggcaatcggtcagcgactgtctaatgggctggcaaggctttccagtccagtgcttcaccgcctgaggctaagagaggacgagaacgcagaacccgtggggacgacttaccagaagaccgacgctgctgtggagatgaagcggatcaaccgggagcagttctgggagcaggctaaaaaagaggaagaactacgcaaggaggaggaacgtaaaaaggctcttgatgaacgcctcaggtttgagcaggagaggatggagcaagaacgacaagagcaggaggaacgggaaagacgctaccgggagcgagagcaacagattgaggagcatcggcgtaagcagcagacgctggaagcggaagaagctaagcgcagattgaaggaacagtctatttttggtgaccacagggatgaggaggaggagacgcatatgaagaaaagcgaaagtgaagtggaggaggctgccgctataattgctcagcgcccagacaatccgcgtgaatttttcaagcagcaagagagggttgctagcgcctccgccggatcctgcgatgtgccttctcctttcaaccacaggcctgggagtcacctggattctcatcggaggatggcacccaccccgatccccacacggagcccaagcgactcgtcaacagcatcaactcccgtcgctgagcagatcgaaagagccctcgatgaagtgacttcttcacagccccctccgcttccccctccgccaccccctgctcaagaaacacaagagccatcaccaatactggacagtgaggagacgcgagccgctgctcctcaggcttgggccggtcccatggaggagccccctcaggcacaggctcccccaagagggccagggagccctgccgaggacctgatgtttatggagagtgcagaacaggccgtgcttgcagcaccagtggagcctgccacagctgacgcaactgagatccacgacgctgctgacactatcgaaacggatacagccacggcagacacaaccgtggctaacaacgtcccaccagccgctacgtccctaatagatctctggcctggcaatggagagggtgccagcactctccagggtgaacctcgggctcctaccccgccaagcggcaccgaagtgacactggccgaggtaccactgctggacgaggtggctcctgaaccactccttccagctggcgaagggtgcgccactctgcttaacttcgacgagctaccagaaccgcctgccaccttctgcgatccggaagaggtagagggggagtcgctggcggctcctcagacccctaccttgccctctgcacttgaggagctggaacaggagcaggagccagagccccacctgctgaccaacggagaaactacccagaaagaggggacacaggcttccgagggttacttttcacagtctcaggaggaagagtttgcccagtcggaagagctgtgcgccaaggctcctcctcccgtcttttataataagccaccagaaatcgacattacatgctgggatgccgacccagtcccagaagaggaagaaggattcgaaggaggagactag

SEQ ID NO: 146005 - DNA, 954 bp, Artificial Sequence
  derived and/or modified sequence
atggccggagtgtccttctcgggacacagactcgagttactggccgcatacgaggaggtcatcagggaagaatctgccgctgattgggcactctacacctatgaggatggctcagacgatctcaaactcgccgctagtggcggaggactgcaagaactgtcaggacactttgagaaccagaaagtgatgtatggtttttgctccgtcaaagacagtcaggccgctctccccaaatacgtgcttataaattgggtcggcgaagacgtccctgacgcacgcaaatgcgcttgcgcctctcacgtagctaaagtggcggaattctttcaaggagtggatgttattgtgaatgcgtcctcagtcgaggacatcgacgccggagctataggccagagactttccaatgggctggctcgcctgtcttcaccagtcctgcataggctgagactcagggaagacgagaacgccgagcctgtggggacaacctaccagaaaacggatgctgcggttgaaatgaaaagaatcaaccgggagcagttttgggagcaagccaaaaaggaagaggagctacggaaggaagaggaacgcaaaaaggccctcgacgagaggctgcgattcgaacaagaaagaatggagcaggagagacaggagcaagaggaacgtgaacggaggtaccgtgagagagagcagcagatcgaagagcaccgacggaaacagcaaaccctggaggccgaggaggcaaaaaggcgcctcaaggaacaaagtatttttggcgaccacagagatgaggaggaggaaacacatatgaagaagagcgaaagtgaagttgaggaagccgctgcgatcatagcccagaggccagataaccccagggaattcttcaaacaacaggagcgcgtggcaagcgcttccgccggttcatgcgacgttccaagcccctttaatcaccgcccatag

SEQ ID NO: 146006 - DNA, 375 bp, Artificial Sequence
  derived and/or modified sequence
atggccggagtgtccttctctggccacagactcgagctgttggccgcttacgaggaagttatccgggaggaatccgctgcagattgggctctttacacatacgaggacgggtccgatgacctgaagctggcggcttcgggagaaggcggtttgcaggagctatccggacacttcgagaatcaaaaagtgatgtatgggttctgcagcgtgaaagattcccaagccgctctgcccaagtacgtcctgattaactgggtaggcgaggacgtgccagacgccaggaaatgtgcttgcgccagccatgtggccaaggtggcagaattcttccagggcgttgatgtgatcgtgaacgctagctcggtcgaagatatatag

SEQ ID NO: 146007 - DNA, 1950 bp, Artificial Sequence
  derived and/or modified sequence
atggccggcgtgagcttcagcggccacagactggagctgctggccgcctacgaggaggtgatcagagaggagagcgccgccgactgggccctgtacacctacgaggacggcagcgacgacctgaagctggccgccagcggcgagggcggcctgcaggagctgagcggccacttcgagaaccagaaggtgatgtacggcttctgcagcgtgaaggacagccaggccgccctgcccaagtacgtgctgatcaactgggtgggcgaggacgtgcccgacgccagaaagtgcgcctgcgccagccacgtggccaaggtggccgagttcttccagggcgtggacgtgatcgtgaacgccagcagcgtggaggacatcgacgccggcgccatcggccagagactgagcaacggcctggccagactgagcagccccgtgctgcacagactgagactgagagaggacgagaacgccgagcccgtgggcaccacctaccagaagaccgacgccgccgtggagatgaagagaatcaacagagagcagttctgggagcaggccaagaaggaggaggagctgagaaaggaggaggagagaaagaaggccctggacgagagactgagattcgagcaggagagaatggagcaggagagacaggagcaggaggagagagagagaagatacagagagagagagcagcagatcgaggagcacagaagaaagcagcagaccctggaggccgaggaggccaagagaagactgaaggagcagagcatcttcggcgaccacagagacgaggaggaggagacccacatgaagaagagcgagagcgaggtggaggaggccgccgccatcatcgcccagagacccgacaaccccagagagttcttcaagcagcaggagagagtggccagcgccagcgccggcagctgcgacgtgcccagccccttcaaccacagacccggcagccacctggacagccacagaagaatggcccccacccccatccccaccagaagccccagcgacagcagcaccgccagcacccccgtggccgagcagatcgagagagccctggacgaggtgaccagcagccagcccccccccctgccccccccccccccccccgcccaggagacccaggagcccagccccatcctggacagcgaggagaccagagccgccgccccccaggcctgggccggccccatggaggagcccccccaggcccaggccccccccagaggccccggcagccccgccgaggacctgatgttcatggagagcgccgagcaggccgtgctggccgcccccgtggagcccgccaccgccgacgccaccgagatccacgacgccgccgacaccatcgagaccgacaccgccaccgccgacaccaccgtggccaacaacgtgccccccgccgccaccagcctgatcgacctgtggcccggcaacggcgagggcgccagcaccctgcagggcgagcccagagcccccaccccccccagcggcaccgaggtgaccctggccgaggtgcccctgctggacgaggtggcccccgagcccctgctgcccgccggcgagggctgcgccaccctgctgaacttcgacgagctgcccgagccccccgccaccttctgcgaccccgaggaggtggagggcgagagcctggccgccccccagacccccaccctgcccagcgccctggaggagctggagcaggagcaggagcccgagccccacctgctgaccaacggcgagaccacccagaaggagggcacccaggccagcgagggctacttcagccagagccaggaggaggagttcgcccagagcgaggagctgtgcgccaaggcccccccccccgtgttctacaacaagccccccgagatcgacatcacctgctgggacgccgaccccgtgcccgaggaggaggagggcttcgagggcggcgactag

SEQ ID NO: 146008 - DNA, 954 bp, Artificial Sequence
  derived and/or modified sequence
atggccggcgtgagcttcagcggccacagactggagctgctggccgcctacgaggaggtgatcagagaggagagcgccgccgactgggccctgtacacctacgaggacggcagcgacgacctgaagctggccgccagcggcggcggcctgcaggagctgagcggccacttcgagaaccagaaggtgatgtacggcttctgcagcgtgaaggacagccaggccgccctgcccaagtacgtgctgatcaactgggtgggcgaggacgtgcccgacgccagaaagtgcgcctgcgccagccacgtggccaaggtggccgagttcttccagggcgtggacgtgatcgtgaacgccagcagcgtggaggacatcgacgccggcgccatcggccagagactgagcaacggcctggccagactgagcagccccgtgctgcacagactgagactgagagaggacgagaacgccgagcccgtgggcaccacctaccagaagaccgacgccgccgtggagatgaagagaatcaacagagagcagttctgggagcaggccaagaaggaggaggagctgagaaaggaggaggagagaaagaaggccctggacgagagactgagattcgagcaggagagaatggagcaggagagacaggagcaggaggagagagagagaagatacagagagagagagcagcagatcgaggagcacagaagaaagcagcagaccctggaggccgaggaggccaagagaagactgaaggagcagagcatcttcggcgaccacagagacgaggaggaggagacccacatgaagaagagcgagagcgaggtggaggaggccgccgccatcatcgcccagagacccgacaaccccagagagttcttcaagcagcaggagagagtggccagcgccagcgccggcagctgcgacgtgcccagccccttcaaccacagaccctag

SEQ ID NO: 146009 - DNA, 375 bp, Artificial Sequence
  derived and/or modified sequence
atggccggcgtgagcttcagcggccacagactggagctgctggccgcctacgaggaggtgatcagagaggagagcgccgccgactgggccctgtacacctacgaggacggcagcgacgacctgaagctggccgccagcggcgagggcggcctgcaggagctgagcggccacttcgagaaccagaaggtgatgtacggcttctgcagcgtgaaggacagccaggccgccctgcccaagtacgtgctgatcaactgggtgggcgaggacgtgcccgacgccagaaagtgcgcctgcgccagccacgtggccaaggtggccgagttcttccagggcgtggacgtgatcgtgaacgccagcagcgtggaggacatctag

SEQ ID NO: 146010 - DNA, 2995 bp, Artificial Sequence
  derived and/or modified sequence
gggcggcgctaggaccgagcgagcggagggagcgagccgggcggagccagcgccccccgccccccgccggccggctcccctcccccggccgctggctcgctcggctcgcgacgctgcagaggctccgaggcggcggcggcgactccctctttccctccctcctcctccgtccgcccgtccgtccgcgcgtctgtccgttcggcccggtccggcccgaagcatggccggcgtcagcttcagcggccaccgcctggagctgctggcggcttacgaggaggtgatccgagaggagagcgcggccgactgggctctgtacacatatgaagatggctccgatgacctcaagcttgcagcatcaggagaagggggcttgcaggagctttcgggacactttgagaaccagaaggtgatgtacggcttctgcagtgtcaaggactcccaagctgctctgccaaaatacgtgctcatcaactgggtgggcgaagatgtgcctgatgcccgcaagtgcgcttgtgccagccacgtggctaaggtggcggagttcttccagggtgtcgacgtgatcgtgaacgccagcagcgtggaagacatagacgcgggtgccatcgggcagcggctctctaacgggctggcgcgactctccagccctgtgctgcaccgactgcggctgcgagaggatgagaacgcagagcccgtgggcaccacctaccagaagacggatgcagctgtggaaatgaagcggattaaccgagagcagttctgggagcaggccaagaaggaagaagagctgcggaaggaggaggagcggaagaaggccctggatgagaggctcaggttcgagcaggagcggatggagcaggagcggcaggagcaagaggagcgcgagcggcgctaccgggagcgggagcagcagatcgaggagcacaggaggaaacagcagactttagaagcggaagaggccaagaggcggttgaaggagcagtctatctttggtgaccatcgggatgaggaggaagagacccacatgaagaagtcagagtcggaggtggaggaggcagcagctattattgcccagcggcctgacaacccaagggagttcttcaagcagcaggaaagagtcgcatcggcctctgcgggcagctgtgatgtaccctcgcccttcaaccatcgaccaggcagccacctggacagccaccggaggatggcgcccactcccatccccacgcggagcccgtctgactccagcaccgcctccacccctgtcgctgagcagatagagcgggccctggatgaggtcacctcctcgcagcctccaccactgccaccgccacccccaccagcccaagagacccaggagcccagccccatcctagacagtgaggagaccagagcagcagcccctcaggcctgggccggccccatggaggagccccctcaggcacaggcgcctccccgggggccaggcagccctgcagaggacttgatgttcatggagtctgcagagcaggctgtcctggctgctcccgtggagcctgccacagctgacgccacggagatccacgatgcagctgacaccattgaaactgacactgccactgctgacaccactgttgccaacaacgtaccccccgccgccaccagcctcattgacctatggcctggcaacggggaaggggcctccacactccagggtgagcccagggcccccacgccaccctcgggtactgaggtcaccctggcagaggtgcccctgctggatgaggtggctccggagccactgctgccagcaggcgaaggctgtgccacccttctcaactttgatgagctgcctgagccgccagccaccttctgtgacccagaggaagtggaaggggagtccctggctgccccccagaccccaactctgccctcagcccttgaggagctggagcaagagcaggagccggagccccacctgctaaccaatggcgagaccacccagaaggaggggacccaggccagtgaggggtacttcagtcaatcacaggaggaggagtttgcccaatcggaagagctctgtgccaaggctccgcctcctgtgttctacaacaagcctccagagatcgacatcacatgctgggatgcagacccagttccagaagaggaggagggcttcgagggtggtgattagcggtggcgccagccctaggctacccttgccaaggccgcccacctgcatcagcctctggccagacggcccgccgtgcctgcattcgcagcagctccgcctggcacccactccggattccggccctggctggggacttggccgcttccctacccacagggcctgacttttacagcttttctctttttttaaaaagttgataggagacttgtacagttgactggctttcctctcgttggtagttgagacgctgttgcaaattccacccctccttccctggtccagattgtagctcttagtcctccctgctcagctggccgggttggaggcctcaccctgcttggggcctggcgtggggggagctctggtgggaaaatgtcccccacctcttttcctagttttatgtttcttgggaaaatatcactttgtattctctgtccagggcttcagatattttgcacgaattttaaaacatggcaataaatggctcgtgggctctggctccctgggaccccctccccgcccttcttttgaccccttcctgtctggcccaaaggaagtagcaggcccagctggggcccctcggctaccccccgtctcctgccgggcaggtcccaggttggaggccctaggcgcggttcaggtcagggctatggatggggcccaggggctttggtggcccctccccaactccttcctctttgcttgggttcctttttcacgtttagtaactgttttttttttttttttttttttttttttggaaagcacaaacttctgtaacgggtcgtgctcatgtctgttaataaagaaatccagatcccttcg

SEQ ID NO: 146011 - DNA, 1403 bp, Artificial Sequence
  derived and/or modified sequence
acgctgcagctggaaaccagagggcctggcccccgggtggggagcaggcatttgggagggaggccagtctcccatgctgaggcttggaggtgggaacgggtgtgcctgttctgggaactgactgcgtcgtgctgaggacttgatgtctacatctcacaggtgaccatcgggatgaggaggaagagacccacatgaagaagtcagagtcggaggtggaggaggcagcagctattattgcccagcggcctgacaacccaagggagttcttcaagcagcaggaaagagtcgcatcggcctctgcgggcagctgtgatgtaccctcgcccttcaaccatcgaccaggcagccacctggacagccaccggaggatggcgcccactcccatccccacgcggagcccgtctgactccagcaccgcctccacccctgtcgctgagcagatagagcgggccctggatgaggtcacctcctcgcagcctccaccactgccaccgccacccccaccagcccaagagacccaggagcccagccccatcctagacagtgaggagaccagagcagcagcccctcaggcctgggccggccccatggaggagccccctcaggcacaggcgcctccccgggggccaggcagccctgcagaggacttgatgttcatggagtctgcagagcaggctgtcctggctgctcccgtggagcctgccacagctgacgccacggagatccacgatgcagctgacaccattgaaactgacactgccactgctgacaccactgttgccaacaacgtaccccccgccgccaccagcctcattgacctatggcctggcaacggggaaggggcctccacactccagggtgagcccagggcccccacgccaccctcgggtactgaggtcaccctggcagaggtgcccctgctggatgaggtggctccggagccactgctgccagcaggcgaaggctgtgccacccttctcaactttgatgagctgcctgagccgccagccaccttctgtgacccagaggaagtggaaggggagtccctggctgccccccagaccccaactctgccctcagcccttgaggagctggagcaagagcaggagccggagccccacctgctaaccaatggcgagaccacccagaaggaggggacccaggccagtgaggggtacttcagtcaatcacaggaggaggagtttgcccaatcggaagagctctgtgccaaggctccgcctcctgtgttctacaacaagcctccagagatcgacatcacatgctgggatgcagacccagttccagaagaggaggagggcttcgagggtggtgattagcggtggcgccagccctaggctacccttgccaaggccgcccacctgcatcagcctctggccagacgg

SEQ ID NO: 146012 - DNA, 1044 bp, Artificial Sequence
  derived and/or modified sequence
ggcggcggcggcgactccctctttccctccctcctcctccgtccgcccgtccgtccgcgcgtctgtccgttcggcccggtccggcccgaagcatggccggcgtcagcttcagcggccaccgcctggagctgctggcggcttacgaggaggtgatccgagaggagagcgcggccgactgggctctgtacacatatgaagatggctccgatgacctcaagcttgcagcatcaggagggggcttgcaggagctttcgggacactttgagaaccagaaggtgatgtacggcttctgcagtgtcaaggactcccaagctgctctgccaaaatacgtgctcatcaactgggtgggcgaagatgtgcctgatgcccgcaagtgcgcttgtgccagccacgtggctaaggtggcggagttcttccagggtgtcgacgtgatcgtgaacgccagcagcgtggaagacatagacgcgggtgccatcgggcagcggctctctaacgggctggcgcgactctccagccctgtgctgcaccgactgcggctgcgagaggatgagaacgcagagcccgtgggcaccacctaccagaagacggatgcagctgtggaaatgaagcggattaaccgagagcagttctgggagcaggccaagaaggaagaagagctgcggaaggaggaggagcggaagaaggccctggatgagaggctcaggttcgagcaggagcggatggagcaggagcggcaggagcaagaggagcgcgagcggcgctaccgggagcgggagcagcagatcgaggagcacaggaggaaacagcagactttagaagcggaagaggccaagaggcggttgaaggagcagtctatctttggtgaccatcgggatgaggaggaagagacccacatgaagaagtcagagtcggaggtggaggaggcagcagctattattgcccagcggcctgacaacccaagggagttcttcaagcagcaggaaagagtcgcatcggcctctgcgggcagctgtgatgtaccctcgcccttcaaccatcgaccag

SEQ ID NO: 146013 - DNA, 456 bp, Artificial Sequence
  derived and/or modified sequence
aaaggatctcctagctggccccatctgagagggcacaggcgtggaggggaggagaggcctggaatggagggataatgagctggcatggccggcgtcagcttcagcggccaccgcctggagctgctggcggcttacgaggaggtgatccgagaggagagcgcggccgactgggctctgtacacatatgaagatggctccgatgacctcaagcttgcagcatcaggagaagggggcttgcaggagctttcgggacactttgagaaccagaaggtgatgtacggcttctgcagtgtcaaggactcccaagctgctctgccaaaatacgtgctcatcaactgggtgggcgaagatgtgcctgatgcccgcaagtgcgcttgtgccagccacgtggctaaggtggcggagttcttccagggtgtcgacgtgatcgtgaacgccagcagcgtggaagacata

SEQ ID NO: 146014 - protein, 603 aa, Artificial Sequence
  derived and/or modified sequence
MSGYSSDRDRGRDRGFGAPRFGGSRAGPLSGKKFGNPGEKLVKKKNFYQEHPDLARRTAQEVETYRRSKEITVRGHNCPKPVLNFYEANFPANVMDVIARQNFTEPTAIQAQGWPVALSGLDMVGVAQTGSGKTLSYLLPAIVHINHQPFLERGDGPICLVLAPTRELAQQVQQVAAEYCRACRLKSTCIYGGAPKGPQIRDLERGVEICIATPGRLIDFLECGKTNLRRTTYLVLDEADRMLDMGFEPQIRKIVDQIRPDRQTLMWSATWPKEVRQLAEDFLKDYIHINIGALELSANHNILQIVDVCHDVEKDEKLIRLMEEIMSEKENKTIVFVETKRRCDELTRKMRRDGWPAMGIHGDKSQQERDWVLNEFKHGKAPILIATDVASRGLDVEDVKFVINYDYPNSSEDYIHRIGRTARSTKTGTAYTFFTPNNIKQVSDLISVLREANQAINPKLLQLVEDRGSGRSRGRGGMKDDRRDRYSAGKRGGFNTFRDRENYDRGYSSLLKRDFGAKTQNGVYSAANYTNGSFGSNFVSAGIQTSFRTGNPTGTYQNGYDSTQQYGSNVPNMHNGMNQQAYAYPATAAAPMIGYPMPTGYSQ

SEQ ID NO: 146015 - protein, 614 aa, Artificial Sequence
  derived and/or modified sequence
MSGYSSDRDRGRDRGFGAPRFGGSRAGPLSGKKFGNPGEKLVKKKWNLDELPKFEKNFYQEHPDLARRTAQEVETYRRSKEITVRGHNCPKPVLNFYEANFPANVMDVIARQNFTEPTAIQAQGWPVALSGLDMVGVAQTGSGKTLSYLLPAIVHINHQPFLERGDGPICLVLAPTRELAQQVQQVAAEYCRACRLKSTCIYGGAPKGPQIRDLERGVEICIATPGRLIDFLECGKTNLRRTTYLVLDEADRMLDMGFEPQIRKIVDQIRPDRQTLMWSATWPKEVRQLAEDFLKDYIHINIGALELSANHNILQIVDVCHDVEKDEKLIRLMEEIMSEKENKTIVFVETKRRCDELTRKMRRDGWPAMGIHGDKSQQERDWVLNEFKHGKAPILIATDVASRGLDVEDVKFVINYDYPNSSEDYIHRIGRTARSTKTGTAYTFFTPNNIKQVSDLISVLREANQAINPKLLQLVEDRGSGRSRGRGGMKDDRRDRYSAGKRGGFNTFRDRENYDRGYSSLLKRDFGAKTQNGVYSAANYTNGSFGSNFVSAGIQTSFRTGNPTGTYQNGYDSTQQYGSNVPNMHNGMNQQAYAYPATAAAPMIGYPMPTGYSQ

SEQ ID NO: 146016 - DNA, 1812 bp, Artificial Sequence
  derived and/or modified sequence
atgagcggctacagcagcgacagagacagaggcagagacagaggcttcggcgcccccagattcggcggcagcagagccggccccctgagcggcaagaagttcggcaaccccggcgagaagctggtgaagaagaagaacttctaccaggagcaccccgacctggccagaagaaccgcccaggaggtggagacctacagaagaagcaaggagatcaccgtgagaggccacaactgccccaagcccgtgctgaacttctacgaggccaacttccccgccaacgtgatggacgtgatcgccagacagaacttcaccgagcccaccgccatccaggcccagggctggcccgtggccctgagcggcctggacatggtgggcgtggcccagaccggcagcggcaagaccctgagctacctgctgcccgccatcgtgcacatcaaccaccagcccttcctggagagaggcgacggccccatctgcctggtgctggcccccaccagagagctggcccagcaggtgcagcaggtggccgccgagtactgcagagcctgcagactgaagagcacctgcatctacggcggcgcccccaagggcccccagatcagagacctggagagaggcgtggagatctgcatcgccacccccggcagactgatcgacttcctggagtgcggcaagaccaacctgagaagaaccacctacctggtgctggacgaggccgacagaatgctggacatgggcttcgagccccagatcagaaagatcgtggaccagatcagacccgacagacagaccctgatgtggagcgccacctggcccaaggaggtgagacagctggccgaggacttcctgaaggactacatccacatcaacatcggcgccctggagctgagcgccaaccacaacatcctgcagatcgtggacgtgtgccacgacgtggagaaggacgagaagctgatcagactgatggaggagatcatgagcgagaaggagaacaagaccatcgtgttcgtggagaccaagagaagatgcgacgagctgaccagaaagatgagaagagacggctggcccgccatgggcatccacggcgacaagagccagcaggagagagactgggtgctgaacgagttcaagcacggcaaggcccccatcctgatcgccaccgacgtggccagcagaggcctggacgtggaggacgtgaagttcgtgatcaactacgactaccccaacagcagcgaggactacatccacagaatcggcagaaccgccagaagcaccaagaccggcaccgcctacaccttcttcacccccaacaacatcaagcaggtgagcgacctgatcagcgtgctgagagaggccaaccaggccatcaaccccaagctgctgcagctggtggaggacagaggcagcggcagaagcagaggcagaggcggcatgaaggacgacagaagagacagatacagcgccggcaagagaggcggcttcaacaccttcagagacagagagaactacgacagaggctacagcagcctgctgaagagagacttcggcgccaagacccagaacggcgtgtacagcgccgccaactacaccaacggcagcttcggcagcaacttcgtgagcgccggcatccagaccagcttcagaaccggcaaccccaccggcacctaccagaacggctacgacagcacccagcagtacggcagcaacgtgcccaacatgcacaacggcatgaaccagcaggcctacgcctaccccgccaccgccgccgcccccatgatcggctaccccatgcccaccggctacagccagtag

SEQ ID NO: 146017 - DNA, 1812 bp, Artificial Sequence
  derived and/or modified sequence
atgagtgggtactcaagtgacagagatcgtgggagggatagaggtttcggcgctccacggttcggagggtctagggcaggacccctctccgggaagaagtttgggaatccgggtgagaagttagtcaagaaaaaaaatttctaccaggaacatccggatttggcacgccggactgcccaagaggtggagacttacagaaggtcaaaggaaattacagtgcgcggtcataactgtcccaaaccggtgttgaacttctacgaggccaattttcctgcaaacgttatggacgtgatcgctcgtcaaaactttactgagcctactgcaatccaggcccaggggtggcccgttgctctgagcgggctcgacatggttggcgtggcccaaacaggaagcgggaaaacactctcctacctgctcccggccattgtacacatcaaccaccagcccttcctggagcgcggcgacggacctatctgcctggttttggcacctacaagagagctggcacagcaggttcaacaggtcgcagccgaatactgcagagcgtgtcggttgaagagtacctgcatatacggcggcgcacctaaaggccctcaaatccgagacctggagcgaggcgtcgagatctgcatcgccacacccgggagacttattgattttttggagtgtggtaagaccaatctcagaaggactacttaccttgtgttggacgaggccgatcgaatgcttgacatgggctttgagccacaaatcaggaaaattgtggatcaaattcgaccagatcgccagaccttgatgtggagcgcgacatggccgaaggaggtgagacaactggctgaggatttcttaaaagactacatccatataaatatcggggctctggagcttagtgctaaccataatattcttcaaatagtggacgtgtgtcatgacgtcgagaaagatgagaaactgatcagactgatggaggagataatgtccgaaaaggagaacaaaaccatcgtgttcgttgagacaaaaagacggtgtgatgaactgaccagaaagatgcggagggatggatggcccgccatgggtatccacggtgacaaatcacagcaggagcgggactgggtgctaaacgagttcaaacacggcaaagcccctatactgatcgctaccgatgtggcatccaggggactcgacgtcgaagatgtgaaattcgttatcaattatgactacccgaatagcagcgaagattatattcatcgaatcggccggacggcgcgtagtacgaagaccggaacggcctatactttctttactccaaacaatataaagcaggtgagcgatttaattagtgtcttgagagaggcaaaccaggccatcaatccaaaactcttgcagttggtcgaggatcggggatcgggaagatcacgggggaggggcggtatgaaagatgacagaagagacagatacagtgcaggtaaacgcggcgggttcaatactttccgcgatagagaaaattacgatcggggatactctagtctgctgaagcgagatttcggagccaagactcagaacggtgtgtactccgcagctaactataccaacggttccttcggatccaacttcgtctcagcaggtatccagacctccttccggacaggaaacccgacaggcacatatcaaaatggctatgattccacccagcagtacggctcgaacgtaccaaacatgcacaatggcatgaatcagcaggcctacgcctatcccgctacggcagcagctcctatgatcggctatccgatgcctactggatattcacagtag

SEQ ID NO: 146018 - DNA, 1812 bp, Artificial Sequence
  derived and/or modified sequence
atgagcggctacagcagtgaccgggaccggggccgggaccggggctttggagcccccaggtttggaggcagccgggccggccccctgagcggcaagaagtttggaaatcctggagagaagctggtgaagaagaagaacttctaccaggagcacccagacctggcccggaggacagcccaggaggtggagacctaccgccgcagcaaggagatcaccgtgcggggccacaactgccccaagcctgtgctgaacttctatgaggccaacttccctgccaacgtgatggatgtgattgcccggcagaacttcacagagcccacagccatccaggcccagggctggcctgtggccctgagcggcctggacatggtgggcgtggcccagacaggcagcggcaagaccctgagctacctgctgcctgccatcgtgcacatcaaccaccagcccttcctggagagaggagatggccccatctgcctggtgctggcccccacccgggagctggcccagcaggtgcagcaggtggccgctgagtactgccgggcctgccgcctgaagagcacctgcatctatggaggagcccccaagggcccccagatccgggacctggagcggggcgtggagatctgcatcgccaccccaggccgcctgattgacttcctggagtgtgggaagaccaacctgcggaggaccacctacctggtgctggatgaagctgacaggatgctggacatgggctttgagccccagatcaggaagatcgtggaccagatccggccagaccggcagaccctgatgtggagcgccacctggcccaaggaggtgcggcagctggccgaggacttcctgaaggactacatccacatcaacattggagccctggagctgagcgccaaccacaacatcctgcagatcgtggatgtgtgccatgatgtggagaaggatgagaagctgatccggctgatggaggagatcatgtctgagaaggagaacaagaccatcgtgtttgtggagaccaagagaagatgtgatgagctgaccaggaagatgagaagagatggctggccagccatgggcatccatggagacaagagccagcaggagcgggactgggtgctgaatgagttcaagcacggcaaggcccccatcctgattgccacagatgtggccagccggggcctggatgtggaggatgtgaagtttgtgatcaactatgactaccccaacagcagcgaggactacatccaccgcatcggccgcacagcccggagcaccaagacaggaacagcctacaccttcttcacccccaacaacatcaagcaggtgtctgacctgatctctgtgctgcgggaggccaaccaggccatcaaccccaagctgctgcagctggtggaggaccggggcagcggccgcagccggggccggggcggcatgaaggatgaccggcgggaccgctacagcgctgggaagaggggcggcttcaacaccttccgggacagagaaaattatgaccggggctacagcagcctgctgaagagggactttggagccaagacccagaatggagtgtacagcgctgccaactacaccaacggcagctttggcagcaactttgtgtctgctggcatccagaccagcttcagaactggaaaccccaccggcacctaccagaatggctatgacagcacccagcagtatggcagcaatgtgcccaacatgcacaacggcatgaaccagcaggcctatgcctacccagccacagctgctgcccccatgattggctaccccatgcccaccggctacagccagtag

SEQ ID NO: 146019 - DNA, 1812 bp, Artificial Sequence
  derived and/or modified sequence
atgagcggctacagcagcgaccgggaccggggccgggaccggggcttcggggcccctcgatttggcggctctagggcaggtcctctgtccggaaagaagttcggcaatccaggcgagaaactggtgaagaagaaaaacttctaccaagagcatccggacctggcccggcgcacagcccaggaggttgagacctaccgcagatcaaaggagatcacagttcgagggcacaactgtcctaagccagtactgaatttttatgaggcaaactttcctgccaatgtcatggatgtcattgctaggcagaactttacagagcccacagctatccaggcacagggctggcccgtggcccttagtgggctggacatggttggggttgcacaaacgggtagcggtaagactctctcctatcttctacccgccatcgtccacatcaatcaccagccttttctggaaagaggtgatgggccaatttgcctggtgttagctccaacgagagagctggctcagcaggtgcagcaggtagcggcggaatactgccgagcctgccggttaaagtcaacttgtatatacggaggagcccccaaaggacctcagatccgggacctggagagaggtgtggaaatctgcatcgcgacgcctgggcgcctgattgatttcctggaatgtggcaaaaccaatctaagacgtacaacttatctggtgctggatgaggccgaccggatgctcgacatgggatttgagccacagatccggaaaattgtggaccagattcgcccagatcgacagacactcatgtggagcgctacgtggcctaaggaggtgcgtcagctggccgaagactttcttaaagactacatacatatcaatatcggcgccttagagctgagcgccaaccacaatattcttcagatagtagacgtgtgccacgatgtggagaaggacgagaagctgatccgtctgatggaggaaatcatgtctgaaaaagaaaacaagacaattgtgttcgtcgagaccaaacgacgatgcgatgagctgacacgcaagatgagaagggacgggtggcccgctatgggaattcacggagataagtctcagcaagagagggattgggtattgaatgagttcaagcatggaaaggccccgatactaattgccactgatgtggcctctcggggtctggacgtggaggatgtgaagtttgttatcaattatgattacccaaatagctcagaggactacattcaccgaatcggaagaacagctcggtctacaaaaaccgggacagcatatacattttttacacctaataacatcaagcaggtgtcggatctcattagtgtcctcagggaggccaatcaagctattaatcctaagttactgcagctggtggaggaccgcggctccggaaggtcaagagggcgaggcggcatgaaagacgatagaagggaccgttatagcgctggaaaaagagggggtttcaacaccttccgcgaccgcgaaaactacgaccggggctattcgtccttgctgaaaagggattttggagccaagacccaaaacggggtgtatagcgctgcaaactatactaatgggtctttcggatctaatttcgtgtccgcaggcatacagaccagctttaggaccggaaatcccaccggcacatatcagaatgggtatgattccactcagcagtatgggtcgaacgtccctaacatgcataacgggatgaaccagcaagcttacgcgtatcccgcaacggcagccgctcctatgatcgggtatccaatgccaactggttatagtcaatag

SEQ ID NO: 146020 - DNA, 1812 bp, Artificial Sequence
  derived and/or modified sequence
atgtccggttactcgtccgacagggaccgaggcagggatcggggtttcggtgcacctcgctttgggggttcgcgcgctgggccactgtctggaaagaaattcgggaacccaggagagaagctcgtcaaaaaaaagaacttctaccaggaacatcctgatctggcaaggcggactgcacaagaagttgagacctaccggaggtccaaggaaatcaccgtgcgtggccataactgccccaaaccagtgttaaatttttacgaagctaatttccctgcgaacgtcatggacgtgattgctaggcagaatttcacagagccaaccgcgatccaggctcagggatggccagttgcgctcagtggcctggacatggttggggtggctcagactggctccggtaaaactttgtcttacctgttgcccgcaattgtacacattaaccaccaaccttttttggagaggggggacgggcctatatgtctcgtgctggccccaacaagagaactggcacaacaggtacagcaggtcgctgcggaatactgccgcgcttgcagactgaagtccacctgcatatatggcggagcacccaaagggcctcaaattcgcgacctggagagaggagttgaaatttgcatcgctaccccgggtaggctgatcgatttcctggaatgcggcaagaccaacctcaggagaacaacctacctggtcctcgacgaggcggaccgaatgttggatatgggattcgaacctcaaattaggaaaattgtggatcagatccggccagaccgacagacattgatgtggtctgccacttggcccaaagaggtacggcagttggcagaagactttcttaaggactacattcacattaacattggagcactggaactatctgccaatcacaacatcctccagattgtggacgtgtgccacgatgtggaaaaagatgaaaagctgatcagactgatggaggagataatgtctgaaaaagagaacaaaacaatcgttttcgtggagaccaagaggcggtgtgacgaactgactcggaaaatgcgtcgagacggttggcctgcgatgggaatacacggagataagtctcagcaggaacgtgattgggtgctgaatgaatttaaacacggaaaggctccaattttgatcgccactgatgtcgcttctcgtgggctagatgtggaggacgtgaaatttgtaataaactacgactacccaaattcatccgaggattacatccaccggattggtcgaacagcccgtagcaccaagacaggcactgcctacaccttcttcacccctaataacattaagcaagtatctgacctcatctccgtcctcagggaggctaaccaagccatcaaccctaagttactacaactcgtggaggaccggggatctggtagatcccgtgggagaggaggaatgaaggacgaccggagggaccgatattctgcaggtaagcggggagggtttaatacctttagagatcgtgaaaactacgaccgaggctatagttctcttctgaagagagacttcggtgcaaaaacccagaatggcgtctattcagcggctaattatacaaacggctccttcggtagcaatttcgtgtcagcgggtatccagacctcttttcggactggtaatcccactggcacttatcaaaatggctacgattcaacacagcaatatgggtcgaacgtaccaaacatgcacaacggcatgaaccaacaggcctatgcttacccagccaccgccgctgccccaatgattgggtatccaatgccaaccgggtactcccaatag

SEQ ID NO: 146021 - DNA, 1635 bp, Artificial Sequence
  derived and/or modified sequence
atgagcggatatagctccgaccgggaccggggccgggaccgcggtttcggcgcccctagattcggcggctcgcgcgccggccctctatccggcaaaaaattcggcaatcccggcgaaaagctggtgaaaaaaaaatggaacctggatgagctccccaaattcgaaaagaacttctatcaagaacatccagacctggctcgcaggacagcccaggaggtggagacttaccggtatttacttccagctattgtccatataaaccaccagcccttcctcgagcgcggggatggccccatctgcttggtgttagcgccaacaagggagctggcccaacaggttcaacaagtggcggctgaatattgccgggcctgtcgtctgaagtctacctgcatttacggtggggcgcccaaaggaccccagattcgtgatttagagaggggtgtggaaatctgcatcgccaccccagggcgccttattgacttccttgaatgtggcaaaacaaatctcagacgaaccacctacttagtgttggacgaagcagaccgcatgttggacatgggcttcgagccccagattcgtaagattgtagaccaaatccgccccgaccgtcagacacttatgtggagcgccacttggccaaaggaggtgaggcaactcgctgaagatttcttgaaagattacatccacattaatataggcgctcttgagctctcagcaaaccacaacatattgcaaatagtggatgtgtgtcacgacgtggaaaaggacgaaaagcttattagactgatggaggaaatcatgtctgaaaaagaaaacaagaccattgtgtttgtcgagactaagaggagatgtgacgaattgactcggaagatgagacgggatgggtggccagctatggggattcacggcgataagagtcagcaggaacgcgattgggtcttgaacgaatttaaacatgggaaggcccctattctgattgcaaccgacgtggcaagtcgaggcctggatgtagaggatgtgaaatttgtgatcaattatgattatcctaactcatctgaagattacatccatcgtatcggacggacagcacggagcactaagactgggacggcctacaccttttttacccccaataacattaagcaagtctccgatcttatctccgtgttgagagaggccaaccaggccatcaaccctaagttgctccagctggtagaggatagaggatcaggtcgctctcgcggcagaggcgggatgaaggacgatcgccgagaccggtattccgctggaaaacggggcgggttcaacacatttagggatagagagaattacgaccggggttattcatcacttctcaagcgggattttggagctaagacacagaacggtgtatatagcgcagccaactatacaaacgggagcttcggaagcaattttgtgtccgcaggcatccagacttcatttcgaaccggcaacccgactggcacatatcagaacggatacgactcgacacaacaatacgggtcaaatgttccgaacatgcacaacggcatgaaccagcaagcctacgcctatccagctacggccgccgccccgatgatcggatatcctatgcccacgggatactcccagtag

SEQ ID NO: 146022 - DNA, 1845 bp, Artificial Sequence
  derived and/or modified sequence
atgagtggctactcttcagaccgagatcggggcagagatcggggctttggcgccccacgctttggaggctctcgtgctggccctctttctggtaaaaagttcgggaatccaggcgagaagctcgtcaaaaaaaaatggaaccttgacgaactgcctaaatttgaaaagaatttttaccaagagcatccggatctggctaggcggaccgcccaggaagtcgaaacatacagacgcagcaaggaaatcacggtgcgtggccacaattgtcccaagcccgttctgaatttctacgaagcaaatttcccagccaacgtgatggacgtcatcgcacgccaaaactttaccgaacccaccgcaatccaggcccagggctggcctgtggcactctctggcttggatatggtcggcgtggcccagacaggctccggaaagactctgtcctaccttctgcccgccatcgtgcatattaatcaccaaccgttccttgagaggggagatggacctatatgtttggtgttggctccaaccagagagctggcccagcaggtccagcaagtggcagccgaatattgccgggcatgtcgactgaaatcaacttgcatctacggcggggccccaaaggggcctcagatccgtgatttggagagaggtgttgagatttgtatcgccacccccggacgtctgattgatttcctcgaatgcggtaagactaaccttcgcagaaccacataccttgtactggacgaagctgatcggatgctggatatgggtttcgaaccacagatccgcaagatagttgatcagatcaggcccgaccggcaaacccttatgtggtcagccacctggcctaaagaggtgaggcagcttgccgaagactttcttaaagattatatccacataaacatcggggctctggagctgagcgccaatcacaacatcttacagatcgtcgatgtatgccatgatgtagagaaagacgagaagcttattagacttatggaggaaattatgtctgagaaagagaataagaccatcgtattcgtcgagacgaagcggaggtgcgatgaactgactcgcaaaatgaggcgcgacggatggccagcaatgggcattcacggcgataagagccagcaggaaagggattgggtcctgaacgaatttaaacatggtaaagccccgattcttattgcaactgatgtcgcaagccgaggattggatgtggaggacgtgaaattcgtcataaattacgactatcctaacagcagcgaagactatattcacaggatcggccgaactgcaagatcgacgaaaaccgggacagcatacacattctttacacctaacaatatcaaacaggtctccgacctcattagcgtgctccgggaagccaatcaagccattaatcccaagcttctgcaacttgtggaggatcgcggatcaggcagaagcagggggagggggggcatgaaggatgaccgccgggaccgctattccgctggcaagagaggcgggttcaacacattccgggacagagagaattatgacagaggctattcctctctgctcaagcgggactttggcgccaagacgcagaacggagtgtattctgctgcaaattatactaacggctcttttggatctaactttgtctctgccggaatccaaactagtttcagaactgggaatcctaccgggacttaccaaaatggatacgactcaacacagcagtatggcagtaacgtgccaaatatgcataatggtatgaatcagcaagcctacgcctatcccgccacagcagccgcgccaatgatcggctatccaatgcctactggctactcccagtag

SEQ ID NO: 146023 - DNA, 1635 bp, Artificial Sequence
  derived and/or modified sequence
atgagcggctacagcagtgaccgggaccggggccgggaccggggctttggagcccccaggtttggaggcagccgggccggccccctgagcggcaagaagtttggaaatcctggagagaagctggtgaagaagaagtggaacctggatgagctgcccaagtttgagaagaacttctaccaggagcacccagacctggccaggagaacagcccaggaggtggagacctaccgctacctgctgcctgccatcgtgcacatcaaccaccagcccttcctggagagaggagatggccccatctgcctggtgctggcccccacccgggagctggcccagcaggtgcagcaggtggccgctgagtactgccgggcctgccgcctgaagagcacctgcatctacggcggggcccccaagggcccccagatccgggacctggagcggggcgtggagatctgcatcgccaccccaggccgcctgattgacttcctggagtgtgggaagaccaacctgcggaggaccacctacctggtgctggatgaggccgacaggatgctggacatgggctttgagccccagatcaggaagatcgtggaccagatccggccagaccggcagaccctgatgtggagcgccacctggcccaaggaggtgcggcagctggccgaggacttcctgaaggactacatccacatcaacatcggggccctggagctgagcgccaaccacaacatcctgcagatcgtggatgtgtgccatgatgtggagaaggatgagaagctgatccggctgatggaggagatcatgtctgagaaggagaacaagaccatcgtgtttgtggagaccaagaggcgctgtgatgagctgaccaggaagatgagaagagatggctggccagccatgggcatccacggggacaagagccagcaggagcgggactgggtgctgaatgagttcaagcacggcaaggcccccatcctgattgccacagatgtggccagccggggcctggatgtggaggatgtgaagtttgtgatcaactatgactaccccaacagcagcgaggactacatccacagaattggaagaacagcccggagcaccaagacaggaacagcctacaccttcttcacccccaacaacatcaagcaggtgtctgacctgatctctgtgctgcgggaggccaaccaggccatcaaccccaagctgctgcagctggtggaggaccggggcagcggccgcagccggggccggggcggcatgaaggatgacagaagagaccgctacagcgctgggaagagaggaggcttcaacaccttccgggaccgggagaactatgaccggggctacagcagcctgctgaagagggactttggagccaagacccagaatggagtgtacagcgctgccaactacaccaacggcagctttggcagcaactttgtgtctgctggcatccagaccagcttcagaacaggcaaccccaccggcacctaccagaatggctatgacagcacccagcagtatggcagcaatgtgcccaacatgcacaacggcatgaaccagcaggcctatgcctacccagccacagctgctgcccccatgattggctaccccatgcccaccggctacagccagtag

SEQ ID NO: 146024 - DNA, 1845 bp, Artificial Sequence
  derived and/or modified sequence
atgagcggctacagcagtgaccgggaccggggccgggaccggggctttggagcccccaggtttggaggcagccgggccggccccctgagcggcaagaagtttggaaatcctggagagaagctggtgaagaagaagtggaacctggatgagctgcccaagtttgagaagaacttctaccaggagcacccagacctggccaggagaacagcccaggaggtggagacctacagaagaagcaaggagatcaccgtgcggggccacaactgccccaagcctgtgctgaacttctatgaggccaacttccctgccaacgtgatggatgtgattgcccggcagaacttcacagagcccacagccatccaggcccagggctggcctgtggccctgagcggcctggacatggtgggcgtggcccagacaggcagcggcaagaccctgagctacctgctgcctgccatcgtgcacatcaaccaccagcccttcctggagagaggagatggccccatctgcctggtgctggcccccacccgggagctggcccagcaggtgcagcaggtggccgctgagtactgccgggcctgccgcctgaagagcacctgcatctacggcggggcccccaagggcccccagatccgggacctggagcggggcgtggagatctgcatcgccaccccaggccgcctgattgacttcctggagtgtgggaagaccaacctgcggaggaccacctacctggtgctggatgaggccgacaggatgctggacatgggctttgagccccagatcaggaagatcgtggaccagatccggccagaccggcagaccctgatgtggagcgccacctggcccaaggaggtgcggcagctggccgaggacttcctgaaggactacatccacatcaacatcggggccctggagctgagcgccaaccacaacatcctgcagatcgtggatgtgtgccatgatgtggagaaggatgagaagctgatccggctgatggaggagatcatgtctgagaaggagaacaagaccatcgtgtttgtggagaccaagaggcgctgtgatgagctgaccaggaagatgagaagagatggctggccagccatgggcatccacggggacaagagccagcaggagcgggactgggtgctgaatgagttcaagcacggcaaggcccccatcctgattgccacagatgtggccagccggggcctggatgtggaggatgtgaagtttgtgatcaactatgactaccccaacagcagcgaggactacatccacagaattggaagaacagcccggagcaccaagacaggaacagcctacaccttcttcacccccaacaacatcaagcaggtgtctgacctgatctctgtgctgcgggaggccaaccaggccatcaaccccaagctgctgcagctggtggaggaccggggcagcggccgcagccggggccggggcggcatgaaggatgacagaagagaccgctacagcgctgggaagagaggaggcttcaacaccttccgggaccgggagaactatgaccggggctacagcagcctgctgaagagggactttggagccaagacccagaatggagtgtacagcgctgccaactacaccaacggcagctttggcagcaactttgtgtctgctggcatccagaccagcttcagaacaggcaaccccaccggcacctaccagaatggctatgacagcacccagcagtatggcagcaatgtgcccaacatgcacaacggcatgaaccagcaggcctatgcctacccagccacagctgctgcccccatgattggctaccccatgcccaccggctacagccagtag

SEQ ID NO: 146025 - DNA, 1635 bp, Artificial Sequence
  derived and/or modified sequence
atgagcggctacagcagcgaccgggaccggggccgggaccggggctttggagcacccagatttggagggtcccgggcaggtccactttctggtaagaagttcggcaatcctggagagaaactagtcaaaaagaaatggaacttagatgaacttcctaaatttgaaaagaatttttatcaggaacatcctgacctggcaagaagaactgcccaggaggtggagacgtacaggtatctgcttccagcaatagtgcacatcaaccaccagcccttcctggagagaggtgatgggcctatttgtctggtcttagcccccactcgggaactggcgcagcaggtgcaacaagtggcagcagagtattgccgagcctgtcgcctgaagtccacctgcatatacggcggagccccgaagggcccccagatccgggatcttgagcgaggggtggagatctgcattgcgacccctggccggctcattgacttcctcgagtgcgggaaaaccaacctgcgaagaacaacgtacctagtcctggatgaagctgacagaatgttggatatgggcttcgagcctcagatccggaagatcgtcgatcagattaggcccgatcgacagacactaatgtggagtgcgacttggccgaaggaggtgcgacagcttgctgaggactttctgaaggattatattcacattaatatcggggccctagagttatctgcaaatcacaatatccttcaaattgtggacgtgtgccatgacgtagagaaggacgagaaactcattaggttaatggaagaaatcatgtcagaaaaggaaaacaaaacgatcgtatttgtggagaccaagagacgctgtgatgaattgacaagaaagatgaggcgtgatggctggcctgctatggggattcatggggataagagtcagcaggagcgagattgggtgctgaacgaatttaaacacggaaaggcaccgatcctgattgccactgatgtcgcttcaaggggacttgacgtcgaagatgttaaattcgttattaactatgattatcctaattcaagcgaggactacatccacagaattggccggacagctagatctacaaaaacaggaacagcctatacctttttcactcctaataatattaaacaggtgagcgatctaattagcgtcctgagggaagccaatcaggccatcaaccccaaactcctgcagctagttgaggaccggggatctgggaggtctcgaggcagggggggaatgaaggacgacaggagggatcgatactccgcaggtaaaaggggcgggtttaataccttccgggatagagagaattatgatcgcgggtactcttccctgctgaagcgcgacttcggcgcaaagacacagaatggtgtctactctgctgcgaactatacaaacgggagctttggctccaacttcgtttccgcgggcatccagacttcttttagaacagggaacccaacagggacgtatcagaacggatatgactctacacaacaatacgggtccaacgttcctaatatgcacaacggtatgaaccagcaggcttacgcataccccgccactgcagccgcacccatgattggctacccaatgcccactggttattcacagtag

SEQ ID NO: 146026 - DNA, 1845 bp, Artificial Sequence
  derived and/or modified sequence
atgagcggctacagcagcgaccgggaccggggccgggaccggggctttggcgctcctagattcggtggctcccgggccggacccctcagtggcaaaaagttcggcaatcctggggaaaagcttgtcaagaaaaaatggaacctggacgagctgcccaaattcgagaagaacttctaccaggaacacccagatctggctcggcggaccgcccaagaggtggagacatatagacgctctaaggaaatcacagtgagggggcataattgcccaaagcccgtgctgaacttttacgaagcaaatttccccgccaatgtgatggatgtgattgcacggcagaatttcacagagcccaccgccattcaggcacaggggtggcctgtggctttgtcagggctcgatatggttggtgtggctcagactggatcaggaaaaacattgtcgtacctgttacccgcaattgtccatataaaccaccagccctttctcgagagaggagacggcccgatctgtctggtgctcgcccccactagggagctggcgcagcaggtccaacaggtcgccgcagagtattgccgagcgtgtaggctcaaatccacgtgcatctatgggggcgcccctaagggccctcagattcgggacctagagaggggcgtggagatctgcatagccaccccgggcagacttatcgattttctcgagtgcggaaagaccaatctccgcaggaccacttatctggttcttgatgaggctgataggatgctggacatgggctttgagccacagatccgcaaaatcgtcgaccaaatccgacctgaccgccaaaccttgatgtggtcagcaacctggccgaaggaggtccgccagttggccgaggatttcctgaaggattacatccacatcaatatcggggccctggaactcagcgctaaccacaacatcctgcagattgtggatgtctgccatgacgtcgaaaaggatgagaaactcatcagacttatggaggagatcatgagtgagaaagagaacaaaacaatcgtcttcgtggaaactaaacgacgctgcgacgaactgaccaggaagatgcgccgagatggatggcccgccatggggatccacggcgataagtctcagcaagaacgcgactgggtgctgaacgagttcaagcacggcaaggctccaatcttgatcgctaccgatgtggcgtctagagggctggatgtggaggacgtgaaatttgtcataaactacgattacccaaatagctccgaagactacattcaccgtatcggcagaaccgcacgctcgactaagaccggaaccgcttacacttttttcactccaaataatatcaaacaggttagtgacctgataagcgtactccgcgaagccaaccaggccataaatcccaagttactgcagctcgtagaggaccggggaagcggcagaagcagaggcagggggggcatgaaggacgaccggcgagaccgctactcagccggtaagcggggtggattcaacactttccgtgatcgcgaaaactatgatcggggatacagctccctcctcaaacgagacttcggtgccaagacacaaaacggagtctattcagccgctaattacacgaatggctcgttcgggagcaacttcgtgtcagcaggcatacaaacatccttcaggaccggaaaccccactgggacctaccagaatggctacgattcaacacagcagtatggcagcaatgtccccaacatgcataatggtatgaaccagcaagcatacgcgtaccccgctaccgccgctgccccaatgattgggtatcctatgcccacagggtatagccaatag

SEQ ID NO: 146027 - DNA, 1635 bp, Artificial Sequence
  derived and/or modified sequence
atgtctgggtactcctccgaccgcgaccggggaagggaccgtggctttggtgcaccaagatttggtggatctagagctggtcccctgtcaggcaagaaattcggcaaccccggagaaaagcttgtgaaaaagaagtggaatcttgatgaattgcccaaatttgaaaagaatttttaccaagaacaccctgacctggctaggcgtacagcccaggaggtagaaacataccggtacctgctgcccgcaatcgtgcacatcaaccaccagccatttctggagcgaggagatggtccaatatgtttggttctcgcccctaccagagagctcgcacaacaagtgcagcaagtcgccgcagagtattgcagggcatgccggctgaaaagcacgtgtatctacggaggagctccaaaaggtcctcagatcagagatctagagcgtggagtggaaatttgcatcgcaacacctggtcggctgattgatttcttagaatgcggcaagactaacttgaggaggactacatacctggtgctagatgaagccgaccggatgctcgatatgggattcgaaccgcaaatccgtaagatcgttgaccagattcggccagatcggcaaacgttgatgtggtctgccacttggccaaaagaagtccgccagttggccgaggacttcctaaaggactacatccacatcaacataggggctctggagcttagcgcaaatcacaatattctccaaatagtcgatgtctgtcatgatgtcgagaaagacgagaaattaatccgcctgatggaagagattatgagcgaaaaggagaataagactatcgtctttgtggaaacgaagaggcgctgtgatgaactgacgcgcaagatgagacgtgatggttggcccgcaatggggattcacggggacaagtcgcaacaagagagagattgggtcctgaatgagtttaagcacggaaaggcgcctattctcatcgcaaccgatgtcgccagccggggattggacgtggaagatgtgaaatttgtcatcaattacgattatcctaacagcagcgaggactatatccaccggatcgggagaactgcacggtccaccaagaccggcacagcctacactttctttactccaaacaatatcaagcaggtcagtgatctcatctcagtcctgcgcgaggccaaccaggcgattaacccaaaactcttgcagttggtcgaggaccgcggatccggtcggagtcgcggacgcggagggatgaaagatgacagacgtgatagatacagtgctggaaagcgtggaggctttaatacctttcgtgacagggagaactatgatcgcggttacagcagcttactgaagagagacttcggagcgaaaactcagaacggcgtctacagtgccgcaaattacacaaatgggtccttcggaagtaacttcgtgtccgccggaatccagacttcgttccgcacaggaaacccgactggcacataccagaacggctatgacagcacccagcagtacgggtcgaacgtgcctaacatgcataatggaatgaaccagcaggcatacgcgtacccggcaactgctgcagcacctatgattggatatccaatgcccactggttacagccagtag

SEQ ID NO: 146028 - DNA, 1845 bp, Artificial Sequence
  derived and/or modified sequence
atgtccggctactccagtgatagagaccgaggaagggaccggggattcggggcacctagatttggaggatctcgggcaggaccgctgagcgggaagaaatttgggaacccgggtgaaaagctggtcaaaaagaagtggaatctggatgaacttcctaagttcgaaaagaacttctatcaagagcaccctgacctggctcggcgaacagcacaggaagtagagacttaccgacgtagcaaagagattacagttcgaggtcacaattgccctaaacctgtcctgaatttctatgaggctaattttcctgctaacgttatggatgtgatagcaagacaaaactttaccgagcccacggcaattcaggcacaaggatggcctgtggccctctctggccttgatatggtcggggttgcgcagactggatcgggcaagaccttgagttaccttctgcccgcaatcgtccatataaatcaccagcctttcctcgagcgaggagatggtcctatctgtctggtcctggcgccaactcgggaactggcccaacaagtgcagcaagtcgccgctgaatactgtcgcgcatgtagattaaagtccacatgcatctatgggggagcccctaagggtcctcagattagggacctggagaggggcgtagagatctgtattgctacgcccggaaggctgatcgatttcctcgagtgcggcaaaactaaccttagaaggacaacatatctcgtgctggatgaggcagataggatgctggacatgggatttgagccgcagattcgcaaaattgtggaccagatcaggcccgataggcagacactcatgtggagtgccacttggcctaaagaggttcggcaactcgccgaggacttccttaaagactacatccacattaatattggagctctggagctgagcgcgaatcataacatcctgcagattgtggacgtgtgccacgacgttgaaaaagatgaaaagttgatccggctgatggaggagatcatgagcgagaaggagaataagaccatcgtttttgtggagacaaaaagacgctgcgacgaactaaccagaaaaatgaggcgggacgggtggcccgctatgggtatacacggggataaaagtcagcaggaacgggactgggtgctaaatgagttcaagcacggtaaggcccctatcctaatagcgacagatgtggcttcccgcggactcgacgtcgaggatgtgaaattcgtcattaactacgactatcccaatagcagcgaagattacattcacagaattgggcgtactgcgaggtccaccaagaccgggactgcgtatactttttttaccccgaacaatatcaaacaagtgtctgaccttatcagcgttctcagagaagcaaatcaggccattaatccaaagctactgcagcttgttgaagataggggctcaggacgcagccggggacgcggtggtatgaaagacgaccggagagacagatattctgctggtaagcggggaggttttaacaccttccgggaccgggagaattacgatcgcggatactcttctctattgaaacgcgacttcggcgctaaaacacagaacggcgtgtattctgccgcaaattataccaacgggtcatttggctcgaattttgtttccgccggtattcagacttcattccgaacaggcaaccctacaggtacctaccagaacggctacgacagcacacaacagtacgggtccaacgtgcctaatatgcataacgggatgaaccagcaagcgtacgcttatccagctaccgccgctgcacccatgatcggttatccaatgcccacggggtatagtcagtag

SEQ ID NO: 146029 - DNA, 2114 bp, Artificial Sequence
  derived and/or modified sequence
acctcattcatttctaccggtctctagtagtgcagcttcggctggtgtcatcggtgtccttcctccgctgccgcccccgcaaggcttcgccgtcatcgaggccatttccagcgacttgtcgcacgcttttctatatacttcgttccccgccaaccgcaaccattgacgccatgtcgggttattcgagtgaccgagaccgcggccgggaccgagggtttggtgcacctcgatttggaggaagtagggcagggcccttatctggaaagaagtttggaaaccctggggagaaattagttaaaaagaagaatttttatcaagagcaccctgatttggctaggcgcacagcacaagaggtggaaacatacagaagaagcaaggaaattacagttagaggtcacaactgcccgaagccagttctaaatttttatgaagccaatttccctgcaaatgtcatggatgttattgcaagacagaatttcactgaacccactgctattcaagctcagggatggccagttgctctaagtggattggatatggttggagtggcacagactggatctgggaaaacattgtcttatttgcttcctgccattgtccacatcaatcatcagccattcctagagagaggcgatgggcctatttgtttggtgctggcaccaactcgggaactggcccaacaggtgcagcaagtagctgctgaatattgtagagcatgtcgcttgaagtctacttgtatctacggtggtgctcctaagggaccacaaatacgtgatttggagagaggtgtggaaatctgtattgcaacacctggaagactgattgactttttagagtgtggaaaaaccaatctgagaagaacaacctaccttgtccttgatgaagcagatagaatgcttgatatgggctttgaaccccaaataaggaagattgtggatcaaataagacctgataggcaaactctaatgtggagtgcgacttggccaaaagaagtaagacagcttgctgaagatttcctgaaagactatattcatataaacattggtgcacttgaactgagtgcaaaccacaacattcttcagattgtggatgtgtgtcatgacgtagaaaaggatgaaaaacttattcgtctaatggaagagatcatgagtgagaaggagaataaaaccattgtttttgtggaaaccaaaagaagatgtgatgagcttaccagaaaaatgaggagagatgggtggcctgccatgggtatccatggtgacaagagtcaacaagagcgtgactgggttctaaatgaattcaaacatggaaaagctcctattctgattgctacagatgtggcctccagagggctagatgtggaagatgtgaaatttgtcatcaattatgactaccctaactcctcagaggattatattcatcgaattggaagaactgctcgcagtaccaaaacaggcacagcatacactttctttacacctaataacataaagcaagtgagcgaccttatctctgtgcttcgtgaagctaatcaagcaattaatcccaagttgcttcagttggtcgaagacagaggttcaggtcgttccaggggtagaggaggcatgaaggatgaccgtcgggacagatactctgcgggcaaaaggggtggatttaatacctttagagacagggaaaattatgacagaggttactctagcctgcttaaaagagattttggggcaaaaactcagaatggtgtttacagtgctgcaaattacaccaatgggagctttggaagtaattttgtgtctgctggtatacagaccagttttaggactggtaatccaacagggacttaccagaatggttatgatagcactcagcaatacggaagtaatgttccaaatatgcacaatggtatgaaccaacaggcatatgcatatcctgctactgcagctgcacctatgattggttatccaatgccaacaggatattcccaataagactttagaagtatatgtaaatgtctgtttttcataattgctctttatattgtgtgttatctgacaagatagttatttaagaaacatgggaattgcagaaatgactgcagtgcagcagtaattatggtgcac

SEQ ID NO: 146030 - DNA, 1635 bp, Artificial Sequence
  derived and/or modified sequence
atgagcggctacagcagcgacagagacagaggcagagacagaggcttcggcgcccccagattcggcggcagcagagccggccccctgagcggcaagaagttcggcaaccccggcgagaagctggtgaagaagaagtggaacctggacgagctgcccaagttcgagaagaacttctaccaggagcaccccgacctggccagaagaaccgcccaggaggtggagacctacagatacctgctgcccgccatcgtgcacatcaaccaccagcccttcctggagagaggcgacggccccatctgcctggtgctggcccccaccagagagctggcccagcaggtgcagcaggtggccgccgagtactgcagagcctgcagactgaagagcacctgcatctacggcggcgcccccaagggcccccagatcagagacctggagagaggcgtggagatctgcatcgccacccccggcagactgatcgacttcctggagtgcggcaagaccaacctgagaagaaccacctacctggtgctggacgaggccgacagaatgctggacatgggcttcgagccccagatcagaaagatcgtggaccagatcagacccgacagacagaccctgatgtggagcgccacctggcccaaggaggtgagacagctggccgaggacttcctgaaggactacatccacatcaacatcggcgccctggagctgagcgccaaccacaacatcctgcagatcgtggacgtgtgccacgacgtggagaaggacgagaagctgatcagactgatggaggagatcatgagcgagaaggagaacaagaccatcgtgttcgtggagaccaagagaagatgcgacgagctgaccagaaagatgagaagagacggctggcccgccatgggcatccacggcgacaagagccagcaggagagagactgggtgctgaacgagttcaagcacggcaaggcccccatcctgatcgccaccgacgtggccagcagaggcctggacgtggaggacgtgaagttcgtgatcaactacgactaccccaacagcagcgaggactacatccacagaatcggcagaaccgccagaagcaccaagaccggcaccgcctacaccttcttcacccccaacaacatcaagcaggtgagcgacctgatcagcgtgctgagagaggccaaccaggccatcaaccccaagctgctgcagctggtggaggacagaggcagcggcagaagcagaggcagaggcggcatgaaggacgacagaagagacagatacagcgccggcaagagaggcggcttcaacaccttcagagacagagagaactacgacagaggctacagcagcctgctgaagagagacttcggcgccaagacccagaacggcgtgtacagcgccgccaactacaccaacggcagcttcggcagcaacttcgtgagcgccggcatccagaccagcttcagaaccggcaaccccaccggcacctaccagaacggctacgacagcacccagcagtacggcagcaacgtgcccaacatgcacaacggcatgaaccagcaggcctacgcctaccccgccaccgccgccgcccccatgatcggctaccccatgcccaccggctacagccagtag

SEQ ID NO: 146031 - DNA, 1845 bp, Artificial Sequence
  derived and/or modified sequence
atgagcggctacagcagcgacagagacagaggcagagacagaggcttcggcgcccccagattcggcggcagcagagccggccccctgagcggcaagaagttcggcaaccccggcgagaagctggtgaagaagaagtggaacctggacgagctgcccaagttcgagaagaacttctaccaggagcaccccgacctggccagaagaaccgcccaggaggtggagacctacagaagaagcaaggagatcaccgtgagaggccacaactgccccaagcccgtgctgaacttctacgaggccaacttccccgccaacgtgatggacgtgatcgccagacagaacttcaccgagcccaccgccatccaggcccagggctggcccgtggccctgagcggcctggacatggtgggcgtggcccagaccggcagcggcaagaccctgagctacctgctgcccgccatcgtgcacatcaaccaccagcccttcctggagagaggcgacggccccatctgcctggtgctggcccccaccagagagctggcccagcaggtgcagcaggtggccgccgagtactgcagagcctgcagactgaagagcacctgcatctacggcggcgcccccaagggcccccagatcagagacctggagagaggcgtggagatctgcatcgccacccccggcagactgatcgacttcctggagtgcggcaagaccaacctgagaagaaccacctacctggtgctggacgaggccgacagaatgctggacatgggcttcgagccccagatcagaaagatcgtggaccagatcagacccgacagacagaccctgatgtggagcgccacctggcccaaggaggtgagacagctggccgaggacttcctgaaggactacatccacatcaacatcggcgccctggagctgagcgccaaccacaacatcctgcagatcgtggacgtgtgccacgacgtggagaaggacgagaagctgatcagactgatggaggagatcatgagcgagaaggagaacaagaccatcgtgttcgtggagaccaagagaagatgcgacgagctgaccagaaagatgagaagagacggctggcccgccatgggcatccacggcgacaagagccagcaggagagagactgggtgctgaacgagttcaagcacggcaaggcccccatcctgatcgccaccgacgtggccagcagaggcctggacgtggaggacgtgaagttcgtgatcaactacgactaccccaacagcagcgaggactacatccacagaatcggcagaaccgccagaagcaccaagaccggcaccgcctacaccttcttcacccccaacaacatcaagcaggtgagcgacctgatcagcgtgctgagagaggccaaccaggccatcaaccccaagctgctgcagctggtggaggacagaggcagcggcagaagcagaggcagaggcggcatgaaggacgacagaagagacagatacagcgccggcaagagaggcggcttcaacaccttcagagacagagagaactacgacagaggctacagcagcctgctgaagagagacttcggcgccaagacccagaacggcgtgtacagcgccgccaactacaccaacggcagcttcggcagcaacttcgtgagcgccggcatccagaccagcttcagaaccggcaaccccaccggcacctaccagaacggctacgacagcacccagcagtacggcagcaacgtgcccaacatgcacaacggcatgaaccagcaggcctacgcctaccccgccaccgccgccgcccccatgatcggctaccccatgcccaccggctacagccagtag

SEQ ID NO: 146032 - DNA, 2105 bp, Artificial Sequence
  derived and/or modified sequence
acctcattcatttctaccggtctctagtagtgcagcttcggctggtgtcatcggtgtccttcctccgctgccgcccccgcaaggcttcgccgtcatcgaggccatttccagcgacttgtcgcacgcttttctatatacttcgttccccgccaaccgcaaccattgacgccatgtcgggttattcgagtgaccgagaccgcggccgggaccgagggtttggtgcacctcgatttggaggaagtagggcagggcccttatctggaaagaagtttggaaaccctggggagaaattagttaaaaagaagtggaatcttgatgagctgcctaaatttgagaagaatttttatcaagagcaccctgatttggctaggcgcacagcacaagaggtggaaacatacagatatttgcttcctgccattgtccacatcaatcatcagccattcctagagagaggcgatgggcctatttgtttggtgctggcaccaactcgggaactggcccaacaggtgcagcaagtagctgctgaatattgtagagcatgtcgcttgaagtctacttgtatctacggtggtgctcctaagggaccacaaatacgtgatttggagagaggtgtggaaatctgtattgcaacacctggaagactgattgactttttagagtgtggaaaaaccaatctgagaagaacaacctaccttgtccttgatgaagcagatagaatgcttgatatgggctttgaaccccaaataaggaagattgtggatcaaataagacctgataggcaaactctaatgtggagtgcgacttggccaaaagaagtaagacagcttgctgaagatttcctgaaagactatattcatataaacattggtgcacttgaactgagtgcaaaccacaacattcttcagattgtggatgtgtgtcatgacgtagaaaaggatgaaaaacttattcgtctaatggaagagatcatgagtgagaaggagaataaaaccattgtttttgtggaaaccaaaagaagatgtgatgagcttaccagaaaaatgaggagagatgggtggcctgccatgggtatccatggtgacaagagtcaacaagagcgtgactgggttctaaatgaattcaaacatggaaaagctcctattctgattgctacagatgtggcctccagagggctagatgtggaagatgtgaaatttgtcatcaattatgactaccctaactcctcagaggattatattcatcgaattggaagaactgctcgcagtaccaaaacaggcacagcatacactttctttacacctaataacataaagcaagtgagcgaccttatctctgtgcttcgtgaagctaatcaagcaattaatcccaagttgcttcagttggtcgaagacagaggttcaggtcgttccaggggtagaggaggcatgaaggatgaccgtcgggacagatactctgcgggcaaaaggggtggatttaatacctttagagacagggaaaattatgacagaggttactctagcctgcttaaaagagattttggggcaaaaactcagaatggtgtttacagtgctgcaaattacaccaatgggagctttggaagtaattttgtgtctgctggtatacagaccagttttaggactggtaatccaacagggacttaccagaatggttatgatagcactcagcaatacggaagtaatgttccaaatatgcacaatggtatgaaccaacaggcatatgcatatcctgctactgcagctgcacctatgattggttatccaatgccaacaggatattcccaataagactttagaagtatatgtaaatgtctgtttttcataattgctctttatattgtgtgttatctgacaagatagttatttaagaaacatgggaattgcagaaatgactgcagtgcagcagtaattatggtgcactttttcgctatttaagttggatatttctctacattcctgaaacaatttttaggttttttttgtactagaaaatgcaggcagtgttttcacaaaagtaaatgtacagtgatttgaaatacaataaatgaaggcaatgcatggccttccaataaaaaatatttgaagact

SEQ ID NO: 146033 - DNA, 3759 bp, Artificial Sequence
  derived and/or modified sequence
atagagcggctcccagcgttccctgcggcgtaggaggcggtccagactataaaagcggctgccggaaagcggccggcacctcattcatttctaccggtctctagtagtgcagcttcggctggtgtcatcggtgtccttcctccgctgccgcccccgcaaggcttcgccgtcatcgaggccatttccagcgacttgtcgcacgcttttctatatacttcgttccccgccaaccgcaaccattgacgccatgtcgggttattcgagtgaccgagaccgcggccgggaccgagggtttggtgcacctcgatttggaggaagtagggcagggcccttatctggaaagaagtttggaaaccctggggagaaattagttaaaaagaagtggaatcttgatgagctgcctaaatttgagaagaatttttatcaagagcaccctgatttggctaggcgcacagcacaagaggtggaaacatacagaagaagcaaggaaattacagttagaggtcacaactgcccgaagccagttctaaatttttatgaagccaatttccctgcaaatgtcatggatgttattgcaagacagaatttcactgaacccactgctattcaagctcagggatggccagttgctctaagtggattggatatggttggagtggcacagactggatctgggaaaacattgtcttatttgcttcctgccattgtccacatcaatcatcagccattcctagagagaggcgatgggcctatttgtttggtgctggcaccaactcgggaactggcccaacaggtgcagcaagtagctgctgaatattgtagagcatgtcgcttgaagtctacttgtatctacggtggtgctcctaagggaccacaaatacgtgatttggagagaggtgtggaaatctgtattgcaacacctggaagactgattgactttttagagtgtggaaaaaccaatctgagaagaacaacctaccttgtccttgatgaagcagatagaatgcttgatatgggctttgaaccccaaataaggaagattgtggatcaaataagacctgataggcaaactctaatgtggagtgcgacttggccaaaagaagtaagacagcttgctgaagatttcctgaaagactatattcatataaacattggtgcacttgaactgagtgcaaaccacaacattcttcagattgtggatgtgtgtcatgacgtagaaaaggatgaaaaacttattcgtctaatggaagagatcatgagtgagaaggagaataaaaccattgtttttgtggaaaccaaaagaagatgtgatgagcttaccagaaaaatgaggagagatgggtggcctgccatgggtatccatggtgacaagagtcaacaagagcgtgactgggttctaaatgaattcaaacatggaaaagctcctattctgattgctacagatgtggcctccagagggctagatgtggaagatgtgaaatttgtcatcaattatgactaccctaactcctcagaggattatattcatcgaattggaagaactgctcgcagtaccaaaacaggcacagcatacactttctttacacctaataacataaagcaagtgagcgaccttatctctgtgcttcgtgaagctaatcaagcaattaatcccaagttgcttcagttggtcgaagacagaggttcaggtcgttccaggggtagaggaggcatgaaggatgaccgtcgggacagatactctgcgggcaaaaggggtggatttaatacctttagagacagggaaaattatgacagaggttactctagcctgcttaaaagagattttggggcaaaaactcagaatggtgtttacagtgctgcaaattacaccaatgggagctttggaagtaattttgtgtctgctggtatacagaccagttttaggactggtaatccaacagggacttaccagaatggttatgatagcactcagcaatacggaagtaatgttccaaatatgcacaatggtatgaaccaacaggcatatgcatatcctgctactgcagctgcacctatgattggttatccaatgccaacaggatattcccaataagactttagaagtatatgtaaatgtctgtttttcataattgctctttatattgtgtgttatctgacaagatagttatttaagaaacatgggaattgcagaaatgactgcagtgcagcagtaattatggtgcactttttcgctatttaagttggatatttctctacattcctgaaacaatttttaggttttttttgtactagaaaatgcaggcagtgttttcacaaaagtaaatgtacagtgatttgaaatacaataaatgaaggcaatgcatggccttccaataaaaaatatttgaagactgaattaagtggaaattgtactttattttatataatgtcatgtaaaactttgcttaagatggtctggttttttttttgtttttgtttggttttttttttccatgaaaacaaatgactgttcctttttatttaatttgggaggcagggggaatcagaaggcccttctttataatgagctattcatattgcaggagtcagaatgaattgatacaggtgaatttttagttacaggctaaattgcataaaagctttgtcagcttccagcatcaggggagtcatttaatagcctttttccttatttgctagtatggttaaatgagaaaatagtaaaatagatacaaagtcatctatatagtgtgagaacgtgggtgactttttcaaagtttataatttaaaaagctccaaataactggctttttcaagagacttatactcatgctcttggctatactgtgaattactgaaatgttgaacaaacctgtgaaagacatacattagccctttaagatggccaggagctaagcttgagtctcctttactgaatttcgttcttagtgcaggttacttgtagattctagtcttcacaggctccctggggctcttaactagtcacactgggagtcatgaatgtctttccaataattcagggaattctagagatcctcaaactgtaaggtctattcatactcaacacaaggaaaaaacctcattaaaattaatgactaatcaggaggcaacgtaaccaaaagcacagtgaatgaaagttttcatggtaggttcaacatgggtttattgctagaaagatccaggggatagctttaggtttaacttcggctcaccaacgtaactttctaatcatttatttcagtaatagctagaagtgggtctgaatgttttcccagagtctgatacgtgtttttttttgccagaagagaggtcttcaggagacttcatttaaattctgattattaaactgaggctttaattgatgttaatgccttatgtcaaatgtaaagttagaatttgctagggctgggatagggagtgatatttctaggacttagacattgaaaactaattcagcctgtagtaacctggatggttttcaatggcatggttagtcaaattcatggttttaaacttagaagcagctttcgggggagagggtaggttggagcatttattacatattttactgtttaatgtcttaaccgtgggccttttaatttgtaaacactgaaatgattgttgggctgtggaaaacatttacctatttaccttggaagttttaaaagacagtccactttttagcatgtgtgttgtgtccagcctgtggtcgtcttaactaataaatgtgatttttctccc

SEQ ID NO: 146034 - protein, 483 aa, Artificial Sequence
  derived and/or modified sequence
MSTARTENPVIMGLSSQNGQLRGPVKPTGGPGGGGTQTQQQMNQLKNTNTINNGTQQQAQSMTTTIKPGDDWKKTLKLPPKDLRIKTSDVTSTKGNEFEDYCLKRELLMGIFEMGWEKPSPIQEESIPIALSGRDILARAKNGTGKSGAYLIPLLERLDLKKDNIQAMVIVPTRELALQVSQICIQVSKHMGGAKVMATTGGTNLRDDIMRLDDTVHVVIATPGRILDLIKKGVAKVDHVQMIVLDEADKLLSQDFVQIMEDIILTLPKNRQILLYSATFPLSVQKFMNSHLQKPYEINLMEELTLKGVTQYYAYVTERQKVHCLNTLFSRLQINQSIIFCNSSQRVELLAKKISQLGYSCFYIHAKMRQEHRNRVFHDFRNGLCRNLVCTDLFTRGIDIQAVNVVINFDFPKLAETYLHRIGRSGRFGHLGLAINLITYDDRFNLKSIEEQLGTEIKPIPSNIDKSLYVAEYHSEPVEDEKP

SEQ ID NO: 146035 - protein, 187 aa, Artificial Sequence [sequence omitted]

SEQ ID NO: 146036 - DNA, 1452 bp, Artificial Sequence
  derived and/or modified sequence
atgagcaccgccagaaccgagaaccccgtgatcatgggcctgagcagccagaacggccagctgagaggccccgtgaagcccaccggcggccccggcggcggcggcacccagacccagcagcagatgaaccagctgaagaacaccaacaccatcaacaacggcacccagcagcaggcccagagcatgaccaccaccatcaagcccggcgacgactggaagaagaccctgaagctgccccccaaggacctgagaatcaagaccagcgacgtgaccagcaccaagggcaacgagttcgaggactactgcctgaagagagagctgctgatgggcatcttcgagatgggctgggagaagcccagccccatccaggaggagagcatccccatcgccctgagcggcagagacatcctggccagagccaagaacggcaccggcaagagcggcgcctacctgatccccctgctggagagactggacctgaagaaggacaacatccaggccatggtgatcgtgcccaccagagagctggccctgcaggtgagccagatctgcatccaggtgagcaagcacatgggcggcgccaaggtgatggccaccaccggcggcaccaacctgagagacgacatcatgagactggacgacaccgtgcacgtggtgatcgccacccccggcagaatcctggacctgatcaagaagggcgtggccaaggtggaccacgtgcagatgatcgtgctggacgaggccgacaagctgctgagccaggacttcgtgcagatcatggaggacatcatcctgaccctgcccaagaacagacagatcctgctgtacagcgccaccttccccctgagcgtgcagaagttcatgaacagccacctgcagaagccctacgagatcaacctgatggaggagctgaccctgaagggcgtgacccagtactacgcctacgtgaccgagagacagaaggtgcactgcctgaacaccctgttcagcagactgcagatcaaccagagcatcatcttctgcaacagcagccagagagtggagctgctggccaagaagatcagccagctgggctacagctgcttctacatccacgccaagatgagacaggagcacagaaacagagtgttccacgacttcagaaacggcctgtgcagaaacctggtgtgcaccgacctgttcaccagaggcatcgacatccaggccgtgaacgtggtgatcaacttcgacttccccaagctggccgagacctacctgcacagaatcggcagaagcggcagattcggccacctgggcctggccatcaacctgatcacctacgacgacagattcaacctgaagagcatcgaggagcagctgggcaccgagatcaagcccatccccagcaacatcgacaagagcctgtacgtggccgagtaccacagcgagcccgtggaggacgagaagccctag

SEQ ID NO: 146037 - DNA, 4538 bp, Artificial Sequence
  derived and/or modified sequence
gcgacttcggcggcgccacgagagcgggcagcggaggagattgacgtgagtgaattcagatataactcaagcttgttagagggctttttaaaaataaaaagttgattccgtgcaagagagcaagttactgctgcttaccgttcagagacttacaggtgcttgcctgcattgcaataaaggactcatttattgagcaagacttatatttatctcttcattttggagagcctaataaactgttattacagtttctctactgactttcaaaagttttgaagtttgaaagacctttgcaattaaaacagcatgagcacggccagaacagagaaccctgttataatgggtctgtccagtcaaaatggtcagctgagaggccctgtgaaacccactggtggccctggaggagggggcacacagacacagcaacagatgaaccagctgaaaaacaccaacacaatcaataatggcactcagcagcaagcacagagtatgaccaccactattaaacctggtgatgactggaaaaagactttaaaactccctccaaaggatctaagaatcaaaacttcggatgtgacctccacaaaaggaaatgagtttgaagattactgtttgaaacgggagttactgatgggaatttttgaaatgggctgggaaaagccatctcctattcaggaggagagcattcccattgctttatctggtagggatatcttagctagagcaaaaaatggaacaggcaagagcggtgcctacctcattcccttacttgaacggctagacctgaagaaggacaatatacaagcaatggtgattgttcccactagagaacttgctctacaggtcagtcaaatttgcatccaggtcagcaaacacatgggaggggccaaagtgatggcaaccacaggaggaaccaatttacgagatgacataatgaggcttgatgatacagtgcacgtggtgattgctacccctgggagaatcctggatcttattaagaaaggagtagcaaaggttgatcatgtccagatgatagtattggatgaggcagataagttgctgtcacaggattttgtgcagataatggaggatattattctcacgctacctaaaaacaggcagattttactatattccgctactttccctcttagtgtacagaagttcatgaattcccatttgcagaaaccctatgagattaacctgatggaggaactaactctgaagggagtaacccagtactacgcatatgtaactgagcgccaaaaagtacactgcctcaacacacttttctccaggcttcagataaaccagtcgatcattttctgtaactcctctcagcgagttgaattgctagccaagaagatttctcaactgggttattcttgcttctatattcatgctaaaatgaggcaggaacatcgaaatcgtgtatttcatgatttccgaaatggcttatgccgcaatcttgtttgcactgatctgtttacccgaggtattgatatacaagctgtgaatgtggtaataaactttgatttcccaaagctggcagagacctatctccatcgtattggaagatcaggtcgctttggtcatcttggcttagccatcaacttgatcacatatgatgatcgcttcaacctgaaaagtattgaggagcagctgggaacagaaattaaacctattccgagcaacattgataagagcctgtatgtggcagaataccacagcgagcctgtagaagatgagaaaccttaacaagcatgctttgacaaattacaaaaggctcgtttggatctgtgacacatcgttttggggggaatgctcctctctttgtgggtttttcatcttttattttggaactatgaagacttaaaagagctcagacattttctttttttaactggtgaagagaaaaaggctgaaaagaaggaatataccttttttgttccacttgtttgcactgtgtgctgactgaacattagttgcactaactgctggtttttaaaaaatgttttctggggaaaggggacaaggaaggaaaagaaagaagagaaggggagaaaccctaaaaagagaagaatcttaatgaacacacaagcttgtcaatgatttcaaaattctccaacagctgactctcgtgcatttcaacttctccctgattcctcatccgttttttaagcctgaagagcttattacttatttgtgcgaagtgccttatgctatgagaccattcagaatatcatcttttagacacagcccgaggaatcaacaatagtaactctttctttccgtttttttttctttttcttttaaaaaatgtcttcttattttggtttcaggttgaagtctcttccctttctacccagtactcgagcccagggctagaagttgaaactcactagtaatgttaaacaccattttttttttctttttggggaggagttgatatgcaactgcagttcatccgcactgtaaatacatgtatttaaaaaaacaatcccaagtaaaaatttcttctgggctgagtagataaaaaacatcatcgctcccaaaggaaagagcagtctatcattgcaggagccatatgacaagcctttgtgctctatagcagacactaaagactgggttacatatgcctccagtagtagtatggcacttgatgtgtagacatgtcagagcttggccctctttcctctgtggcaaagcgtgtcccatagaaaattgggtgtgtatacttgtataactttgtaaataagttttttttctgggttcatatatatatatatatatacatatatatatatttttttttggatgaaggttgctgggattaaggggattagagtgattatgggagcagctaaagatgagaggggctcagttttacgcaacactaaattctagaaagtactttggcctcgtgctgtagagagcagatttctatggtaccctgtgttagtaaaggggcccagaaatctgggatgtactgtttgctgccacactgtctcatctagtacctttggagtaggtttaccagagagagcaaggaagcttcaaaacattgataattcaacatttattttgagaagctctgattttgcttcttccccctttctaaaagtttgaggaatatttcaagctctgcaacagggggcaaagattaatctaccttgcagtgtaggaattctattgagtggcagtgtcattgagcagtatatatataaagcacagatttgcatttcagaatattagccagtaccagctttggtaatgttagcagttctggagcttaattttctgtggatcatttcctgtagtgtgtaaatgtgttgccctctgcccgctttgatacataaacttttgcaggaatgggcaacctgagagctgttaactttcatgctacagaaagctgcttgccattctcttgcattgtgacaagaattgttacctgtcattttgcactgtaaattgctggcagatgctttacagtcaatagtgttgctttaaattgtgcccctcccaacatgcttgatgtttggcctgatctccaggcaaaaggagtgagatgaatcaaaaccagtgaacttttttttttaatgtttttaattcccttttaacccagtgtactaggtcaatcaggaggcatctggaaagggggggaaaaaagcaaaaaacaaaattaaaaaaaattgatttccatattttatttttcaaaaccctaaaatattacaaaataagtcccgcatatactttaatgttttaactcttttggacaaaggaatcaattacttgaagttgcttttttgactctgcctacttctgagcaaactatttgcgactcacccacaattgccttggagatcaaaatcctacagatgcctcctgatgggacatagccctaactccttaacaactgtagcaagaactgcacggtacaaacccaaaaaagaacaagctcatctatttggaacccaagcctcatattttctgtccagtcaatgttggttactaaatagaaaacctaattaaggaagtaacttttttccagggaggggtgggagagggaatttaaaaggtgtcaacttttgaccaaaaaaattgtgcccttgtaccgatgcagctctctttctcccccacctcttgcgagataagagggatcattcatgtagaagaaaagagtataaatgcaattctgtatctcgctagagaacgtgtgggtgactaaacaaaaagtgcagtctccttcaccaactttagactgcgtggtgccacatgcctgtgggtccctcttaaagcacagacttaaaatggaaagtattactgaagtatagcctctaatgaggagtggcacttaaactatctgggacaccactactggacacggtcttgtagaggcagctgtccagttttggtgcttgactcttgaataggaattgttaaatggaaagatgctctgaggactaggtcaaagcctggtctttttttttttttttttttttttctttcttttttgggccctcataataagcattgtt

SEQ ID NO: 146038 - DNA, 1452 bp, Artificial Sequence
  derived and/or modified sequence
atgtccaccgcccggacagaaaatccagtcattatgggcctgtcatctcaaaatgggcagcttcggggtcctgttaaacccacaggaggacccggtggaggcgggacgcagactcaacaacagatgaatcagttgaaaaacaccaatacgataaataatggaacacagcagcaggcacaaagtatgactactacaatcaaacctggtgacgactggaagaaaaccttgaagctccctcccaaagacctccgaatcaagacttcagacgtgacctcaacaaagggaaacgaatttgaggactactgcttgaagcgcgagctattgatggggatcttcgaaatgggatgggagaagcctagccccattcaggaggagagcattcctattgctctgagcggcagagatatcctggctagagcgaagaatggaaccggcaaaagcggcgcatacctaatccctcttctggagcggctagatttaaagaaggacaacatacaggcaatggtgatcgtgcctaccagagagttagccctccaagtgagccagatttgtatccaggtttcaaaacacatgggcggagctaaagtgatggctactaccggcggtacaaacctgagagacgacatcatgcggctcgacgacacagtacacgtggtgattgccacaccaggtcggatcctcgacctgattaagaagggggtcgcgaaggtggatcacgtgcaaatgattgtgttggacgaagctgacaagcttctgagccaggattttgtgcagatcatggaagatatcattttaacattgcccaagaacagacaaatcctgctttattcagctacgttcccactgagcgtacagaagtttatgaattcgcatctgcagaagccctacgaaataaacctcatggaagagttaaccttaaaaggcgtaacgcagtactacgcctatgtaaccgagcgccagaaggtccattgcctaaatactctgttcagcaggctccaaataaatcagtctataatcttttgtaactcatcccaacgcgttgagcttcttgccaagaagatcagtcagctgggctactcttgtttctatatacacgctaaaatgcggcaagagcacaggaaccgggtgtttcacgatttcagaaatggcctctgcagaaacttggtatgcaccgatttatttacaaggggcatcgatattcaggctgtgaacgtggttatcaactttgatttccccaagctggctgaaacgtacctgcacagaataggccgcagcggccgatttggccacttgggactagccatcaatctgatcacttatgacgaccgcttcaatctgaaaagcattgaagaacagctcgggaccgaaattaagccaattccgtcaaatattgacaagtctctatatgtggccgaataccacagtgagcccgttgaagacgaaaaaccatag

SEQ ID NO: 146039 - DNA, 1452 bp, Artificial Sequence
  derived and/or modified sequence
atgagcacagccaggacagaaaatcctgtgatcatgggcctgagcagccagaatggccagctgcggggccctgtgaagcccaccggcggccctgggggcggcggcacccagacccagcagcagatgaaccagctgaagaacaccaacaccatcaacaacggcacccagcagcaggcccagagcatgaccaccaccatcaagccaggagatgactggaagaagaccctgaagctgccccccaaggacctgcgcatcaagaccagtgatgtgaccagcaccaagggaaatgaatttgaggactactgcctgaagcgggagctgctgatgggcatctttgagatgggctgggagaagcccagccccatccaggaggagagcatccccatcgccctgagcggccgggacatcctggcccgggccaagaatggcaccgggaagagcggggcctacctgatccccctgctggagcggctggacctgaagaaggacaacatccaggccatggtgattgtgcccacccgggagctggccctgcaggtgtcccagatctgcatccaggtgtccaagcacatgggcggggccaaggtgatggccaccaccggcggcaccaacctgagagatgacatcatgaggctggatgacacagtgcacgtggtgattgccaccccaggccgcatcctggacctgatcaagaagggcgtggccaaggtggaccacgtgcagatgattgtgctggatgaggccgacaagctgctgagccaggactttgtgcagatcatggaggacatcatcctgaccctgcccaagaaccggcagatcctgctgtacagcgccaccttccccctgtctgtgcagaagttcatgaacagccacctgcagaagccctatgagatcaacctgatggaggagctgaccctgaagggcgtgacccagtactatgcctacgtgacagagcggcagaaggtgcactgcctgaacaccctcttcagccggctgcagatcaaccagagcatcatcttctgcaacagcagccagagggtggagctgctggccaagaagatcagccagctgggctacagctgcttctacatccacgccaagatgaggcaggagcacaggaacagagtcttccatgacttcagaaatggcctgtgcaggaacctggtgtgcacagacctcttcacccggggcatcgacatccaggccgtgaatgtggtgatcaactttgacttccccaagctggccgagacctacctgcaccgcatcggccgcagcggccgcttcggccacctgggcctggccatcaacctgatcacctatgatgaccgcttcaacctgaagagcattgaggagcagctgggcacagagatcaagcccatccccagcaacatcgacaagagcctgtatgtggccgagtaccacagcgagcctgtggaggatgagaagccctag

SEQ ID NO: 146040 - DNA, 1452 bp, Artificial Sequence
  derived and/or modified sequence
atgagcaccgcccggaccgagaaccccgtgatcatgggcctgagctcccagaacggccagctgagaggccctgtgaaacctaccgggggcccaggtggaggcgggacccagactcagcagcagatgaaccagctgaagaatacgaacacgatcaacaatgggacccagcagcaggctcagtctatgaccacaactatcaaacccggagatgattggaagaagacactgaaactaccgcctaaagatctgagaataaaaacctccgatgtgactagtactaaagggaatgagtttgaagactactgcctgaagcgggaactgttaatgggaatctttgagatgggctgggagaaacctagcccaatccaagaggagtctattcctatcgctctgtctggtcgagatattttagcccgcgccaaaaatggcacgggaaaaagtggggcttacctgattccacttctcgagaggctggatctgaagaaagacaatattcaggcaatggtgatagttccgactcgggaactagctttgcaagtctctcagatatgtattcaagtgtccaagcacatgggcggtgctaaggtcatggccacaacggggggtacgaacctgagagatgatattatgaggctggatgatactgtccacgtggtgatagccactccagggcggatcctcgatctcatcaaaaaaggtgtggcaaaagtagatcacgtacagatgatcgtgcttgatgaagctgacaagctgttgtctcaagactttgtgcaaattatggaggacattatcctgaccctacctaagaatcgccaaatcctcctttattcagccacattccccctgtccgttcagaagtttatgaactcccatctccaaaagccctacgagattaacctaatggaagaactaactctcaaaggggtcactcagtactacgcttatgtcaccgaacgtcagaaagtgcattgcttgaacactctgttttcacgactacagatcaaccaatctatcatattttgtaactcgtctcagcgggtggagctgctggcaaagaagatctcccagcttggttactcttgtttctacatccacgccaaaatgcggcaggaacaccggaaccgggtcttccatgatttccgtaatggcttgtgtcgtaatctggtttgcaccgatctctttacgagggggattgatatccaggcagtcaatgtggttatcaatttcgatttccctaagctggccgagacctatttgcatcgtataggaaggagcggtcggtttggacacctcggactcgctattaacctgatcacctacgacgatagattcaacttgaagtccattgaggagcagctgggtacggagatcaaacccattccgagtaatattgataaatctttatatgtggcagaatatcactcagagcctgtggaggatgaaaaaccctag

SEQ ID NO: 146041 - DNA, 1452 bp, Artificial Sequence
  derived and/or modified sequence
atgagcaccgccagaactgaaaacccagtcattatggggctgtcctctcagaacggacagcttagagggccagtcaaacccacggggggaccgggaggagggggaactcagactcagcagcagatgaaccaactgaagaacacaaatacaatcaataatggcactcagcagcaggcacagtcaatgacgacaacgatcaaacccggagatgattggaagaagacactcaaactccccccaaaggatcttcggatcaagacttcggatgtgacctccaccaagggcaatgaattcgaggactattgtttgaaaagggagctcctgatgggcatatttgagatggggtgggagaagccaagtcctatccaagaggaatccattccaattgcgctcagtggcagagacattcttgctcgcgctaaaaacggaacagggaaaagcggtgcctatttaatcccactgctagagaggcttgatttaaaaaaggacaacattcaggccatggtgattgtgcctacccgcgagctcgccctccaggtgtcacagatttgtattcaagtctccaagcacatggggggagccaaagtgatggccacaacgggcggaacgaacctgcgagacgacatcatgagactggacgataccgtccatgtcgtaatcgccactcccggtagaattctggaccttatcaagaaaggagtggctaaggttgaccatgtccaaatgattgtcttggacgaggccgataagctgctgagtcaggacttcgtccagatcatggaggatatcatcctgaccctgcccaaaaaccggcaaatactgctgtactcggctacttttccactttccgttcagaaattcatgaactcacacctgcagaaaccatatgagataaacctcatggaggaactgactctcaagggcgtgacacagtactacgcttacgttacagaacggcagaaggtgcactgcctgaacacccttttcagccgtctgcagatcaaccagtcaataatcttttgcaattcaagccaaagggtagagttactcgccaaaaagatctcccagctgggctattcctgtttttatattcatgctaaaatgaggcaggaacaccgtaacagagtgttccacgactttaggaacggactgtgtaggaatctggtgtgcaccgatctgttcacgcggggaatcgacatccaggccgtcaatgtggtgataaacttcgactttccgaaactggccgagacctacctgcatcgcatcgggagaagcggaagatttggacatctcgggttagcaatcaacctgattacctatgatgaccgcttcaatctgaagtccatcgaggaacagctgggaacggaaataaaaccaattccgtcgaacattgacaagagtttatacgtggccgagtatcacagcgagcctgttgaggacgaaaaaccctag

SEQ ID NO: 146042 - DNA, 1452 bp, Artificial Sequence
  derived and/or modified sequence
atgtccactgctaggacggaaaaccctgtgataatgggcctgtctagccagaatggccagcttcggggaccggtgaagcccactggcggacccgggggcggaggcacccaaactcaacagcaaatgaatcaactgaagaatactaacacaattaataacggaacccaacaacaggcccaatcaatgacaacaacaattaaacctggggatgattggaaaaagacactcaagctccctcctaaggacctgagaattaagacaagcgatgttacgtccacaaagggcaacgaatttgaggactactgcctgaagagggagctgttaatggggatctttgagatgggatgggagaaaccatcccccatccaggaagagtctattcccatcgccttgtctggtcgcgatattctggcccgggcgaagaacggcaccggcaaatctggcgcttatctgatccccctccttgagagactggatctcaaaaaggacaacatccaagccatggtcatcgtgccaaccagggagctagcactccaagtgtcacagatatgtatccaggtgtcgaaacacatgggtggggcaaaggtcatggctaccactggcgggactaaccttcgcgacgacatcatgcgacttgatgacacagtccacgtggtcatcgccactccagggcgaatcttggatctcataaagaagggagtagcaaaagttgaccacgtccagatgattgtgctggacgaggcagataagctgctttcccaggacttcgtccagatcatggaagatatcatcctcacattgccgaaaaaccgccagatcttactgtattccgccacctttcctttgagtgtgcaaaaatttatgaattctcacttgcagaagccctacgagataaacctaatggaagagcttacactgaagggggtgactcagtattacgcctatgttactgaacggcaaaaagtgcattgcctgaataccctgttctctagattgcagatcaatcagagcatcattttctgtaatagtagtcagagggttgaactgctggccaaaaagatttcgcaactgggatactcttgtttctatatacacgctaagatgagacaagagcacagaaatagagtgtttcacgactttcgtaatggcctctgcaggaacctggtgtgcaccgacctcttcaccaggggcattgatatccaggcggtgaacgtagtcattaattttgacttccccaagctcgcggagacctatctccacaggataggaagatccggtcggtttgggcatctcggccttgccataaatctgattacatatgacgacagattcaacctgaagagtattgaggaacagctgggcaccgagattaagcccataccatccaacatcgacaaatccctgtatgtcgctgagtaccacagcgagcctgtggaggatgaaaaaccctag

SEQ ID NO: 146043 - DNA, 1452 bp, Artificial Sequence
  derived and/or modified sequence
atgagtactgccaggacggagaatcctgtgatcatgggcctgtctagtcagaatgggcagctcagagggccggtgaagcctaccggcggccccggcggtgggggaactcagacacaacagcagatgaatcagttgaagaacacgaacaccataaataacggaacacagcaacaggcccaaagtatgacgactactatcaagccaggggacgactggaagaaaacgcttaaactacctccaaaagacttacggattaaaacatccgatgttacctcgaccaagggcaatgaattcgaggactattgtctgaaaagagagctgcttatgggaattttcgagatgggctgggagaagccgagtcctattcaggaagagtctatccccatagccctcagtggccgcgacatactcgcccgggctaagaacgggacaggaaaaagcggagcatacctcatccctctgctggagcggctggatctgaagaaggacaacatccaggccatggtgattgtgccaacccgagaacttgcgctgcaggttagccagatctgtatccaggtctctaagcacatgggcggagcaaaggtcatggcaactaccggcgggaccaacttacgagacgatataatgcgactcgatgacaccgtgcatgttgtgattgccacccccggcagaatcctggatttaatcaagaaaggtgtagccaaagtggatcatgtccagatgatcgtccttgatgaggcggacaaattgctaagtcaggatttcgtgcagatcatggaagatattatactgacgctgcccaaaaatagacagatcctgctatatagtgctacctttccattgtctgtgcagaaattcatgaattctcacctacaaaaaccctacgagattaacctcatggaggaactcactctgaaaggagtcacccaatattacgcctatgtgaccgagagacaaaaagtgcattgcctgaacacactgttttcgcggttacagatcaaccaatctattatcttctgcaacagctcccagcgcgtggagctcctggccaagaaaatctctcagctcggttattcctgtttttacatccacgcaaagatgagacaagagcatcgaaatagagtgttccacgacttccggaacgggctttgcagaaacctcgtttgcactgacctttttacaaggggaatcgacattcaggcagtgaacgtggtcatcaatttcgattttcctaagcttgctgagacctatctccaccggattggcagaagcggccgcttcggtcacctcggtttagccatcaacctcatcacgtatgatgatcgtttcaatttaaagagcattgaagagcagttggggacagaaattaaacccatcccgtccaacatcgacaaaagtttatacgtggcggaataccattctgagcccgtggaggacgagaagccctag

SEQ ID NO: 146044 - DNA, 1452 bp, Artificial Sequence
  derived and/or modified sequence
atgagcactgccagaaccgaaaatcccgtcattatgggcttgagcagccaaaatggacaattgcgcgggccggtcaaaccaacaggcggaccaggcggcggcggcacacaaacacagcagcagatgaatcagctcaaaaacacaaacacaattaacaatggaacccagcagcaggctcagtcaatgacgacaacaatcaaacccggggatgactggaaaaagaccttaaaactgcccccgaaggacctccgaattaagactagtgacgttacaagtaccaagggaaacgagtttgaggattattgcctcaaacgtgaacttctaatgggcattttcgagatggggtgggaaaaaccatctcccatacaagaggaatctattcccatagcactgtccggccgcgatatcctggctcgagcaaaaaatggcaccgggaaatcgggcgcctacttgatcccgcttctggaacgactagacctgaagaaggacaacatccaggcaatggtaattgtccctaccagagaattggcgctccaagtttcccagatatgtattcaggtatcaaagcatatgggaggtgccaaggtgatggctacgaccggcggtactaacctgcgggatgatatcatgcgtttggatgataccgttcatgtggtgatcgccacccctggccgcattctggatcttatcaagaagggggtcgctaaggtggatcatgtacaaatgatcgtgctcgacgaggcagataagctcctgtctcaggacttcgtccagatcatggaagatattattctgaccctacccaaaaacaggcagatcttgctctacagcgccaccttcccactatcagttcagaaattcatgaactctcatctgcagaagccctacgaaatcaacctcatggaggagttgaccttgaagggggtgacccagtactacgcatacgttaccgagaggcaaaaagtccattgcctaaatacactgttcagccgcttgcaaattaaccagagcatcatcttctgcaactccagtcagcgagtggagctgctcgccaaaaagatctcacaattgggctattcgtgcttctatattcacgcgaagatgcgccaggagcataggaacagggtgttccacgacttccggaacggactgtgtagaaatttagtttgtacagacctctttaccagaggcatcgacatccaggctgtgaacgtggtgatcaacttcgacttccccaagcttgcagagacatatctgcaccggatcggtcggtcagggaggttcggtcacctggggctggccatcaatctgattacctacgacgatcggttcaacttgaagtcgatcgaggagcagctggggactgagatcaagccaatcccctccaatattgacaagtccctctatgtggctgagtaccatagcgagccagtggaggacgagaagccttag

SEQ ID NO: 146045 - DNA, 1452 bp, Artificial Sequence
  derived and/or modified sequence
atgagcaccgcccggaccgagaaccccgtgatcatgggcctgagctcacagaatggccaactgagggggcctgttaagcccactggagggcccggtgggggcggcacacagacccagcagcaaatgaaccaattaaagaatacaaatactattaataacggaacccagcagcaggcacagtcaatgaccaccactatcaagcccggcgacgactggaaaaagaccctgaaactccccccaaaagacctgaggatcaaaacttcagatgtgacttccaccaaaggcaacgagttcgaggattactgtcttaaaagagaactccttatgggaatattcgagatgggctgggaaaaaccttctcccatccaagaggaaagcattcccatcgcactatccggccgggatatcctggcacgagccaaaaatggaaccggcaagagcggagcctacctgattcccctgctggaacgactggacttaaagaaggacaacatccaggcgatggttattgtaccaactagagagctagcactccaggtgtcccaaatttgcatccaggtgagtaaacatatggggggcgccaaggttatggccacaacaggagggaccaatctgcgggacgacattatgcgtcttgacgacactgtccacgttgtgatcgcgacacccggacgtatcctcgacctgatcaaaaaaggtgtagccaaagtcgaccatgttcagatgattgtgctagatgaggcggacaagctgctgagccaggattttgttcaaattatggaggatatcatacttacactgcccaaaaataggcagattctactgtactcagccacattccctcttagtgtacaaaagtttatgaacagccacctgcaaaagccctacgagattaacttgatggaagagctgactttgaaaggcgttactcagtattacgcctatgtgaccgagagacagaaggttcattgcctgaataccctcttcagtcggctgcagatcaaccagtccattatattttgcaactcatctcagagagtagaactgctggcaaagaaaatttcccagctaggttattcatgcttttatatacatgccaaaatgcgacaagagcatcgcaaccgcgtgttccacgatttccgtaatgggctgtgccggaacctggtctgtacggacctcttcaccagggggatagacatccaggccgtgaacgtggtgataaactttgactttcccaaactggcagaaacttatttgcacaggatcggccggtctggcaggttcggacacctgggcctggccattaatctgatcacttacgacgataggttcaacttgaagtcaattgaggaacaactggggaccgaaataaagcccatcccatctaatattgataagtctctctacgttgcagaataccactctgaaccagtggaggacgagaagccatag

SEQ ID NO: 146046 - DNA, 1452 bp, Artificial Sequence
  derived and/or modified sequence
atgagcaccgcccggaccgagaaccccgtgatcatgggcctgagcagccaaaacgggcagctgcgagggcccgtgaagcccaccggtgggcctgggggcggcggcacccagacccaacagcaaatgaaccagttgaagaataccaacactataaataatggaacccagcagcaagcccaaagcatgaccaccacaatcaaaccgggtgacgactggaaaaagacactgaagctgccaccaaaagacctgcggataaaaacgagtgatgtgacaagcactaaagggaacgagttcgaggactactgtctcaagcgcgagctgctgatgggcatttttgaaatgggatgggaaaagccttcccccattcaggaagaaagtatcccaatcgccttgtccggcagggatattttggcgcgagccaaaaatgggacaggaaaaagcggggcctatctgattccactattagaacggctggatttgaagaaggacaatatccaagccatggtaatcgtcccgactagagaactggctctgcaagtgtcccaaatctgcatacaggtgagcaaacacatgggcggggcgaaggtgatggccaccacgggcggcaccaatctcagagacgacatcatgagactggatgacaccgtacacgtggtgatagccaccccagggcgcattctcgatctgataaaaaagggcgttgccaaagtcgatcacgtgcagatgattgtcctagacgaggctgacaaactgctctctcaagattttgtgcagataatggaggacatcatcctgactctcccgaagaaccgtcagatactcctgtatagcgcgacgtttccgctgagcgtgcaaaagttcatgaattctcatctccagaagccttatgaaatcaatttaatggaggaacttaccctgaaaggcgtgacacaatactatgcctacgttaccgagaggcaaaaggttcattgcttaaatactctcttctctcggttacagatcaatcagtctattatcttttgcaacagctctcaacgtgttgaactattagccaagaaaatcagtcagctcggatactcctgcttttacattcacgctaaaatgagacaggaacatcgcaatagagtctttcacgatttccgcaacggactgtgtcggaacctggtttgcaccgatctgtttacccggggaatagacattcaggcggttaacgtggtgattaactttgacttccctaagcttgcagagacctacctgcacagaatcggccggtcaggccgctttggccacctcggcctcgccatcaacctcataacttatgacgaccggttcaatctcaagagtatcgaagaacaattagggactgagattaaaccaatcccgtctaatattgataaatccttgtatgtggcagaataccacagcgaacctgtggaagacgaaaaaccctag

SEQ ID NO: 146047 - DNA, 1452 bp, Artificial Sequence
  derived and/or modified sequence
atgagcaccgcccggaccgagaaccccgtgatcatgggcctgagcagtcagaacggacagctgagaggaccagtcaagcctaccggtgggccgggaggtgggggcacacagacccagcagcaaatgaatcagctgaaaaacacgaatacaataaacaatggaacacagcaacaagcccagtcaatgaccaccacaattaagcctggtgacgattggaagaagaccttgaaacttccccccaaggacttgcgtattaagaccagtgatgtaacttccacaaaaggcaacgagttcgaggactactgtctgaagagggagctcttgatgggcatatttgagatggggtgggaaaaaccgtcccccatccaggaagaaagtatcccgattgccctcagcggaagggacatcctggctcgtgctaaaaatgggactggaaaaagtggcgcctatctcatcccactgttggagaggctggatctcaagaaggacaatattcaagcaatggtgatcgtgccaaccagagagcttgctctccaggtgtctcagatctgtattcaagtaagtaaacacatgggaggcgctaaggtgatggccacgaccggcggaacaaaccttcgcgatgatataatgcgtcttgacgacaccgtgcatgtggtgattgccaccccaggtcgaatcctagacctgatcaagaaaggtgtggccaaagtagatcacgtgcaaatgattgtcttggatgaggcagacaaactgttaagtcaagacttcgttcagataatggaagatattattctgactctccccaagaatcgacaaattctgctatacagcgcaaccttccccctgtcagtgcaaaaattcatgaattcccatcttcagaagccctatgagatcaacttgatggaggaactcactctcaagggagtgactcagtactacgcttacgtaaccgaacgccagaaggtgcattgcctgaacactttattttcccggttgcagattaaccaatctattattttctgtaacagcagccagcgggttgagttgctggcaaagaagattagtcagctcggctacagctgtttttatatacacgctaaaatgcgccaagagcacagaaatcgggtatttcacgacttccggaacggcctttgtagaaatctggtgtgtaccgatcttttcacccgggggattgatattcaggccgtaaatgtggtcattaatttcgatttcccaaaactcgcggagacatacctgcatcggatcggtcgttccggccggttcggtcatttaggccttgcaataaacctgattacttatgatgataggtttaatctgaagtcaattgaggaacaacttgggacagaaattaagcctatcccttctaacatagataaatctctgtatgtcgcagagtaccatagcgagcctgttgaggatgaaaagccctag

SEQ ID NO: 146048 - DNA, 1452 bp, Artificial Sequence
  derived and/or modified sequence
atgagcacggcacgcaccgagaacccagtcatcatgggactgtcatcccagaacggccaactgagaggacctgtgaagccaaccggcggtcctggcggtggcggtactcaaacccaacaacagatgaatcagcttaagaacacaaataccatcaacaacggcacccaacagcaggcccagtctatgacgaccactattaaacctggcgatgattggaaaaaaactttaaagcttcctccgaaggacctgagaataaagacgtcagatgtgacctcaaccaaggggaacgagttcgaggactattgcctgaaaagagagctcctgatgggcatctttgagatgggctgggagaaaccaagccccatccaagaggagagcatccccattgctctgtcaggacgggacattctggccagagccaagaacggaacggggaaaagtggcgcatacttgatcccattgctggagcggttagacctgaagaaagataacatccaagccatggtgattgtgccaaccagggaactggcactgcaagtctcccagatctgtatccaggtgtcgaagcatatgggcggagcgaaggtcatggccaccactggcggaactaacttgcgtgatgacatcatgaggctcgacgacaccgttcacgtggtgattgccactcccggaagaatcctggacttgattaagaagggagtggctaaagttgatcatgtgcaaatgatcgtgctcgatgaagccgataaactcctttcgcaagatttcgtgcagattatggaggatattatcctgactctgccaaaaaaccggcagatcttgttgtatagcgccacttttcctctgtcagttcaaaaattcatgaacagccatctacagaaaccatacgagatcaatctgatggaagagctgacgctcaaaggggtgactcagtactacgcgtacgtgacagagaggcagaaggtgcactgtctcaatacgctattttctagactgcagatcaatcagagcatcatattctgcaactcctctcagagagtggagctcctcgcgaaaaaaatttctcaactgggctacagttgcttctacatccatgctaagatgagacaggagcaccgcaaccgagtttttcatgacttccgcaacggcctttgcagaaacctggtgtgtactgatttatttacccgaggaatcgatatccaagcggtcaacgttgtcattaacttcgatttccctaaactggcggagacctatctgcaccgaataggcagaagtgggagatttggacatctaggactggctatcaatctaataacatacgatgaccgattcaatttaaagtcgatcgaggagcaactgggcacagagattaagcccattccctccaacatagataaatctctgtacgtcgctgagtatcactccgagcctgttgaagacgagaagccgtag

SEQ ID NO: 146049 - DNA, 1452 bp, Artificial Sequence
  derived and/or modified sequence
atgtctaccgcccgaacggaaaaccctgttattatggggctgtcatctcagaacggccaactgaggggacctgtgaaaccaactggaggtccaggaggcggtggaacccagacacagcagcagatgaaccagctaaagaacaccaacaccattaacaacgggactcagcaacaggctcaatctatgaccaccacgattaaacctggggatgactggaaaaaaaccctgaaactgccgccaaaagatcttagaatcaagacatccgacgtaacctcgacaaagggaaatgaattcgaagactactgcctcaaaagagagttactcatgggaatttttgaaatggggtgggaaaagccttcaccaatccaggaagagagcatcccaatcgccttgagcggaagagacatcctggctagagccaaaaacggcactggaaaatccggcgcatatctgattccgctattagagaggctagatctgaagaaggacaatatccaggccatggtcatagttcctacccgggaattggcgctgcaggtatctcaaatatgtatccaggttagtaaacacatgggtggagcgaaggtgatggccacaactggtggtactaatctgagagacgacatcatgagactggacgacacagtgcatgtggtgatcgccaccccaggacgtattctagatttgatcaaaaagggagtggcaaaggtggatcacgtgcagatgatcgttctggacgaggcggacaagctgctctcacaggactttgttcagattatggaagatattattttaaccctcccaaagaatcggcagattctcttgtactctgctacgttcccccttagcgttcagaagttcatgaactctcacctccagaagccttacgagataaacctgatggaggagctgactttgaagggagttacccagtattatgcgtatgttactgaacggcagaaggtgcattgcctgaacaccctgttttcacggttgcagattaaccagtcgataatcttttgtaattcttctcaaagagtggagctcctcgccaagaaaatctcccagctcgggtactcctgtttctacatccacgcgaagatgaggcaggagcaccgcaaccgcgtcttccatgacttcagaaatgggttatgcagaaacttagtctgcactgacctgttcacaaggggcatagatatacaggccgtcaacgtcgtcatcaacttcgattttcctaaattagctgagacctacctccaccgaatcggcaggagcggacgcttcggtcacctggggctggcaataaacctgatcacctacgatgatcgcttcaatctgaagagtattgaagagcaactaggcaccgaaatcaagccaatcccatcaaatattgataaaagtctgtacgttgccgagtatcacagcgaaccagtggaagatgagaaaccatag

SEQ ID NO: 146050 - DNA, 1452 bp, Artificial Sequence
  derived and/or modified sequence
atgtctacagcacggactgagaatccagtgataatgggcctatccagccagaacggccagctccggggacccgttaaaccaaccggtggcccaggcggaggagggacacagactcaacagcaaatgaatcagttaaagaataccaacaccattaataatgggacccagcagcaagcgcagtcaatgaccactacaattaagcctggtgacgattggaaaaagacgctgaaactcccgccaaaagatcttaggataaagactagtgacgtgaccagcaccaagggcaatgaattcgaggactattgcctgaagagagagctactaatgggcatatttgagatgggatgggagaagccctccccaattcaggaggaatctatccccatagccctctcaggtcgagacatcttagccagagccaagaatggtactggtaagagtggtgcctatctgattcccctactggagaggctggacctcaaaaaggacaatatccaggcgatggtcattgtccctacccgcgaactggctctccaggtctctcagatctgtatccaggtcagcaagcacatgggaggcgctaaggtgatggccacaaccggcggtaccaacttgcgcgacgatatcatgcgcctcgacgatacggttcacgtggttattgcaacccctgggaggattctggacttaattaagaagggggttgccaaggtggaccatgtccaaatgattgtgctggatgaagcggataagcttctgagtcaggatttcgtgcaaatcatggaggacatcatcttaactttgccaaagaacagacagattttgctatattccgccacattcccgctgtctgtccaaaaattcatgaatagccatttgcagaagccctacgaaataaatctgatggaagaattgaccttgaagggggtgacgcaatactatgcgtacgtgactgaacggcagaaagtgcattgcctgaataccctattttctcggctgcagataaaccaatctatcattttctgcaatagttcccagcgcgttgagctccttgcaaaaaagatctcacagctaggatacagttgtttctatatccacgcaaagatgcgccaagaacacagaaaccgagtgtttcatgactttcggaatggactgtgcaggaacttggtttgcaccgatctcttcacccgtggcattgacatccaggcagttaatgtcgttataaactttgacttccctaagctggcagagacctacctgcacagaatcggtagatccggacggttcgggcaccttggcttagccattaatctcataacatatgatgataggttcaatctgaagagcatcgaggagcagctagggacagagattaaaccgatcccgagcaacatcgataaatccctctatgttgctgagtaccatagtgagccagtggaggacgaaaaaccttag

SEQ ID NO: 146051 - DNA, 1813 bp, Artificial Sequence
  derived and/or modified sequence
attttgggagcttcgagtcaacaataaaggaccgagggtgccgagcgggagtggcctcgttggtaggacacgggcccgagtcgcgaggcttgggattgacgtgagtgaattcagatataactcaagcttgttagagggctttttaaaaataaaaagttgattccgtgcaagagagcaagttactgctgcttaccgttcagagacttacaggtgcttgcctgcattgcaataaaggactcatttattgagcaagacttatatttatctcttcattttggagagcctaataaactgttattacagtttctctactgactttcaaaagttttgaagtttgaaagacctttgcaattaaaacagcatgagcacggccagaacagagaaccctgttataatgggtctgtccagtcaaaatggtcagctgagaggccctgtgaaacccactggtggccctggaggagggggcacacagacacagcaacagatgaaccagctgaaaaacaccaacacaatcaataatggcactcagcagcaagcacagagtatgaccaccactattaaacctggtgatgactggaaaaagactttaaaactccctccaaaggatctaagaatcaaaacttcggatgtgacctccacaaaaggaaatgagtttgaagattactgtttgaaacgggagttactgatgggaatttttgaaatgggctgggaaaagccatctcctattcaggaggagagcattcccattgctttatctggtagggatatcttagctagagcaaaaaatggaacaggcaagagcggtgcctacctcattcccttacttgaacggctagacctgaagaaggacaatatacaagcaatggtgattgttcccactagagaacttgctctacaggtcagtcaaatttgcatccaggtcagcaaacacatgggaggggccaaagtgatggcaaccacaggaggaaccaatttacgagatgacataatgaggcttgatgatacagtgcacgtggtgattgctacccctgggagaatcctggatcttattaagaaaggagtagcaaaggttgatcatgtccagatgatagtattggatgaggcagataagttgctgtcacaggattttgtgcagataatggaggatattattctcacgctacctaaaaacaggcagattttactatattccgctactttccctcttagtgtacagaagttcatgaattcccatttgcagaaaccctatgagattaacctgatggaggaactaactctgaagggagtaacccagtactacgcatatgtaactgagcgccaaaaagtacactgcctcaacacacttttctccaggcttcagataaaccagtcgatcattttctgtaactcctctcagcgagttgaattgctagccaagaagatttctcaactgggttattcttgcttctatattcatgctaaaatgaggcaggaacatcgaaatcgtgtatttcatgatttccgaaatggcttatgccgcaatcttgtttgcactgatctgtttacccgaggtattgatatacaagctgtgaatgtggtaataaactttgatttcccaaagctggcagagacctatctccatcgtattggaagatcaggtcgctttggtcatcttggcttagccatcaacttgatcacatatgatgatcgcttcaacctgaaaagtattgaggagcagctgggaacagaaattaaacctattccgagcaacattgataagagcctgtatgtggcagaataccacagcgagcctgtagaagatgagaaaccttaa

SEQ ID NO: 146052 - DNA, 2541 bp, Artificial Sequence
  derived and/or modified sequence
acgggcccgagtcgcgaggcttgggattgacgtgagtgaattcagatataactcaagcttgttagagggctttttaaaaataaaaagttgattccgtgcaagagagcaagttactgctgcttaccgttcagagacttacaggtgcttgcctgcattgcaataaaggactcatttattgagcaagacttatatttatctcttcattttggagagcctaataaactgttattacagtttctctactgactttcaaaagttttgaagtttgaaagacctttgcaattaaaacagcatgagcacggccagaacagagaaccctgttataatgggtctgtccagtcaaaatggtcagctgagaggccctgtgaaacccactggtggccctggaggagggggcacacagacacagcaacagatgaaccagctgaaaaacaccaacacaatcaataatggcactcagcagcaagcacagagtatgaccaccactattaaacctggtgatgactggaaaaagactttaaaactccctccaaaggatctaagaatcaaaacttcggatgtgacctccacaaaaggaaatgagtttgaagattactgtttgaaacgggagttactgatgggaatttttgaaatgggctgggaaaagccatctcctattcaggaggagagcattcccattgctttatctggtagggatatcttagctagagcaaaaaatggaacaggcaagagcggtgcctacctcattcccttacttgaacggctagacctgaagaaggacaatatacaagcaatggtgattgttcccactagagaacttgctctacaggtcagtcaaatttgcatccaggtcagcaaacacatgggaggggccaaagtgatggcaaccacaggaggaaccaatttacgagatgacataatgaggcttgatgatacagtgcacgtggtgattgctacccctgggagaatcctggatcttattaagaaaggagtagcaaaggttgatcatgtccagatgatagtattggatgaggcagataagttgctgtcacaggattttgtgcagataatggaggatattattctcacgctacctaaaaacaggcagattttactatattccgctactttccctcttagtgtacagaagttcatgaattcccatttgcagaaaccctatgagattaacctgatggaggaactaactctgaagggagtaacccagtactacgcatatgtaactgagcgccaaaaagtacactgcctcaacacacttttctccaggcttcagataaaccagtcgatcattttctgtaactcctctcagcgagttgaattgctagccaagaagatttctcaactgggttattcttgcttctatattcatgctaaaatgaggcaggaacatcgaaatcgtgtatttcatgatttccgaaatggcttatgccgcaatcttgtttgcactgatctgtttacccgaggtattgatatacaagctgtgaatgtggtaataaactttgatttcccaaagctggcagagacctatctccatcgtattggaagatcaggtcgctttggtcatcttggcttagccatcaacttgatcacatatgatgatcgcttcaacctgaaaagtattgaggagcagctgggaacagaaattaaacctattccgagcaacattgataagagcctgtatgtggcagaataccacagcgagcctgtagaagatgagaaaccttaacaagcatgctttgacaaattacaaaaggctcgtttggatctgtgacacatcgttttggggggaatgctcctctctttgtgggtttttcatcttttattttggaactatgaagacttaaaagagctcagacattttctttttttaactggtgaagagaaaaaggctgaaaagaaggaatataccttttttgttccacttgtttgcactgtgtgctgactgaacattagttgcactaactgctggtttttaaaaaatgttttctggggaaaggggacaaggaaggaaaagaaagaagagaaggggagaaaccctaaaaagagaagaatcttaatgaacacacaagcttgtcaatgatttcaaaattctccaacagctgactctcgtgcatttcaacttctccctgattcctcatccgttttttaagcctgaagagcttattacttatttgtgcgaagtgccttatgctatgagaccattcagaatatcatcttttagacacagcccgaggaatcaacaatagtaactctttctttccgtttttttttctttttcttttaaaaaatgtcttcttattttggtttcaggttgaagtctcttccctttctacccagtactcgagcccagggctagaagttgaaactcactagtaatgttaaacaccattttttttttctttttggggaggagttgatatgcaactgcagttcatccgcactgtaaatacatgtatttaaaaaaacaatcccaagtaaaaatttcttctgggctgagtagataaaaaacatcatcgctcccaa

SEQ ID NO: 146053 - protein, 875 aa, Artificial Sequence
  derived and/or modified sequence
MGKTANSPGSGARPDPVRSFNRWKKKHSHRQNKKKQLRKQLKKPEWQVERESISRLMQNYEKINVNEITRFSDFPLSKKTLKGLQEAQYRLVTEIQKQTIGLALQGKDVLGAAKTGSGKTLAFLVPVLEALYRLQWTSTDGLGVLIISPTRELAYQTFEVLRKVGKNHDFSAGLIIGGKDLKHEAERINNINILVCTPGRLLQHMDETVSFHATDLQMLVLDEADRILDMGFADTMNAVIENLPKKRQTLLFSATQTKSVKDLARLSLKNPEYVWVHEKAKYSTPATLEQNYIVCELQQKISVLYSFLRSHLKKKSIVFFSSCKEVQYLYRVFCRLRPGVSILALHGRQQQMRRMEVYNEFVRKRAAVLFATDIAARGLDFPAVNWVLQFDCPEDANTYIHRAGRTARYKEDGEALLILLPSEKAMVQQLLQKKVPVKEIKINPEKLIDVQKKLESILAQDQDLKERAQRCFVSYVRSVYLMKDKEVFDVSKLPIPEYALSLGLAVAPRVRFLQKMQKQPTKELVRSQADKVIEPRAPSLTNDEVEEFRAYFNEKMSILQKGGKRLEGTEHRQDNDTGNEEQEEEEDDEEEMEEKLAKAKGSQAPSLPNTSEAQKIKEVPTQFLDRDEEEEDADFLKVKRHNVFGLDLKDEKTLQKKEPSKSSIKKKMTKVAEAKKVMKRNFKVNKKITFTDEGELVQQWPQMQKSAIKDAEEDDDTGGINLHKAKERLQEEDKFDKEEYRKKIKAKHREKRLKEREARREANKRQAKAKDEEEAFLDWSDDDDDDDDGFDPSTLPDPDKYRSSEDSDSEDMENKISDTKKKQGMKKRSNSEVEDVGPTSHNRKKARWDTLEPLDTGLSLAEDEELVLHLLRSQS

SEQ ID NO: 146054 - protein, 781 aa, Artificial Sequence
  derived and/or modified sequence
MGKTANSPGSGARPDPVRSFNRWKKKHSHRQNKKKQLRKQLKKPEWQVERESISRLMQNYEKINVNEITRFSDFPLSKKTLKGLQEAQYRLVTEIQKQTIGLALQGKDVLGAAKTGSGKTLAFLVPVNEADRILDMGFADTMNAVIENLPKKRQTLLFSATQTKSVKDLARLSLKNPEYVWVHEKAKYSTPATLEQNYIVCELQQKISVLYSFLRSHLKKKSIVFFSSCKEVQYLYRVFCRLRPGVSILALHGRQQQMRRMEVYNEFVRKRAAVLFATDIAARGLDFPAVNWVLQFDCPEDANTYIHRAGRTARYKEDGEALLILLPSEKAMVQQLLQKKVPVKEIKINPEKLIDVQKKLESILAQDQDLKERAQRCFVSYVRSVYLMKDKEVFDVSKLPIPEYALSLGLAVAPRVRFLQKMQKQPTKELVRSQADKVIEPRAPSLTNDEVEEFRAYFNEKMSILQKGGKRLEGTEHRQDNDTGNEEQEEEEDDEEEMEEKLAKAKGSQAPSLPNTSEAQKIKEVPTQFLDRDEEEEDADFLKVKRHNVFGLDLKDEKTLQKKEPSKSSIKKKMTKVAEAKKVMKRNFKVNKKITFTDEGELVQQWPQMQKSAIKDAEEDDDTGGINLHKAKERLQEEDKFDKEEYRKKIKAKHREKRLKEREARREANKRQAKAKDEEEAFLDWSDDDDDDDDGFDPSTLPDPDKYRSSEDSDSEDMENKISDTKKKQGMKKRSNSEVEDVGPTSHNRKKARWDTLEPLDTGLSLAEDEELVLHLLRSQS

SEQ ID NO: 146055 - DNA, 2628 bp, Artificial Sequence
  derived and/or modified sequence
atggggaagacagcaaacagccctgggtccggggctcgccccgatccagtgaggtcattcaacagatggaagaagaagcattcgcacagacagaacaaaaaaaagcagctgagaaaacagctcaaaaagccagaatggcaggtggagagagagtcaatttcccggttaatgcagaactacgagaaaatcaacgtgaacgagatcacgcggttttctgatttccctctgtcaaagaagaccctgaaggggctgcaggaagcccagtatcgactcgtgaccgaaattcagaaacaaaccatcggactggccctccaggggaaggacgttctgggcgccgcaaagaccggttcaggcaaaacactggctttcctggtaccagtgctcgaggcactgtaccggttacagtggacatcaactgacggcttgggggtgctcatcatatcacctacccgggaattggcttaccaaacctttgaggtgctgagaaaggtcgggaaaaaccacgacttttctgcagggctcataataggtgggaaagatctcaagcatgaggctgaacgcattaacaacattaacattctggtgtgtacgcccggccgcctactgcagcacatggatgagactgtaagttttcacgccacagatctccagatgctggtgctcgatgaggcagacaggatccttgacatgggtttcgctgatacaatgaacgctgtcatcgaaaatctgcccaagaagcgacaaacgctgctcttctccgcaacacagaccaaatcggtgaaggatttggcacggctcagtttgaagaacccagaatatgtatgggttcatgagaaggccaagtactcaacccctgcaaccctggaacaaaactacattgtgtgtgaactgcagcaaaaaatttccgtcctgtatagcttcctaaggtcacacttgaaaaagaagtcgatagtcttcttctcctcttgcaaggaagtgcagtacctgtacagagtgttctgtcgcctgagacccggggtgagcatcctcgccttacatgggaggcagcagcagatgcgccgcatggaggtctataatgagttcgtgaggaagcgcgcagcggttctgttcgctactgacatcgcagctcgcggactggatttccccgccgttaactgggtcctgcagttcgattgccccgaagatgccaacacatacattcacagagccgggcgcaccgccagatataaggaggacggcgaagctttactcatcctgctgccctccgaaaaggctatggtgcagcaactgttgcagaaaaaggtgccagttaaagaaattaagattaatccagagaaactgattgacgtgcagaaaaagcttgagtctatactggctcaggatcaggatttaaaggagcgggctcaacgttgtttcgtatcctatgtgagaagtgtttacctaatgaaagataaagaagtgtttgatgtctcaaaattgccaatacccgaatatgccctctctttggggctcgccgtggccccgcgggtgaggttcttacaaaaaatgcagaaacaacccaccaaggaactggtgcgctcccaggcagataaagttattgagcctagggctccgagcctgactaacgatgaagtagaggagtttcgcgcctactttaatgaaaagatgtcaatcctgcaaaaggggggtaaaagacttgaagggacagaacacagacaggacaatgataccggcaacgaagaacaggaggaggaagaagatgacgaagaggagatggaagaaaagttggccaaggccaagggctctcaagcaccctccctgccaaacacgtccgaggcccaaaagatcaaggaggtaccaacccaattcctcgaccgagatgaggaagaggaggacgccgacttcctgaaggtcaagcggcacaatgtatttggattagacctaaaggacgagaagaccctacaaaagaaggagccttctaagagttcaataaagaaaaagatgaccaaggtcgctgaagccaagaaggtgatgaagcggaactttaaagtgaacaagaagatcacatttactgatgagggcgagctagttcagcagtggccccagatgcaaaagagcgccatcaaagacgccgaggaggatgacgacaccggaggcattaatctgcacaaagctaaagaaagactgcaagaagaagataagttcgataaagaagagtatcggaagaagatcaaggcgaagcaccgagagaagcggctaaaggaaagagaggctaggagggaggccaataaaagacaggcgaaagcgaaagacgaagaggaagccttcctagattggagtgatgacgatgacgacgatgacgatggatttgatcccagtactctccccgatccagacaagtataggtcttctgaggattctgattccgaggacatggagaacaagatcagcgataccaaaaagaaacaaggcatgaagaagcgctcgaacagcgaggtcgaggacgtcggacccacatctcacaatcgtaaaaaggctagatgggacactctggaacccctagacaccgggctgtcgttagcggaagacgaggagctagtactgcatttgctgcgctcacagtcgtag

SEQ ID NO: 146056 - DNA, 2346 bp, Artificial Sequence
  derived and/or modified sequence
atgggtaagacggcgaactctccgggtagcggcgcaagacccgacccagtgcgcagttttaacagatggaagaaaaaacatagccataggcagaataagaaaaagcagctcagaaagcagctcaaaaagcccgagtggcaggtcgagcgagagagtatctcccggctgatgcagaattatgagaagattaatgtcaacgagatcaccagattttcagactttcccctgtccaagaaaacactgaagggtctgcaagaagctcagtatcgcttggtgacggagattcaaaagcagacgatcgggctggctctgcagggaaaagacgtcctgggcgcggctaagaccggatcaggaaagactctggccttccttgttcctgtgaacgaggcggaccggattcttgatatgggtttcgccgacacaatgaacgccgttattgaaaacctacctaaaaaaaggcagacactcctgttcagcgctactcaaacaaaatccgtgaaggacttggcccgcctatccctgaagaacccggaatacgtctgggtgcacgagaaggcaaaatacagtacacctgccacattagaacagaactacatcgtttgtgagttgcaacagaagataagtgtcttatattcatttctgaggtcccatctcaagaaaaaaagtatcgtgtttttcagttcctgtaaggaagtgcaatacctctaccgtgtcttctgcagactccgacctggcgtatcaatacttgctttgcatggacgccagcaacagatgcggcgcatggaggtctacaatgaattcgttaggaagcgagcagccgtcctgtttgctactgatatcgcagccagaggcttggattttcccgcagttaactgggtcctgcaatttgactgccctgaggacgcaaatacatatatccaccgggcaggcagaacggcccgctataaagaggatggcgaggcccttctgattctgcttccatctgagaaagctatggttcaacaactgctccaaaagaaagttcctgtgaaagagatcaagatcaatcctgaaaaactgatcgacgtgcaaaagaagttggaatctatcctggcgcaagaccaggatctgaaagaaagggcccaaagatgtttcgtttcatacgtacgttccgtatatctgatgaaggataaagaggtcttcgacgtttcaaagctgcccattcctgaatacgctctttcccttgggttagccgtggccccacgagtgaggttcctacaaaagatgcagaaacagccaaccaaggagctcgtgcggagccaggcagataaggttattgagccacgcgccccctcactgacaaacgacgaggtcgaggaattcagggcctattttaatgagaagatgtctattcttcagaagggaggcaagcgactcgaaggcactgaacacaggcaggacaacgacaccggtaatgaggagcaggaggaagaggaagatgacgaagaagagatggaagagaagctagcaaaggctaagggctcccaggcaccttccttacctaatacatcagaagcccagaaaatcaaggaagttccaacccaattcctagaccgcgacgaagaagaagaggatgctgactttctgaaggtgaagcggcacaatgtctttggcctggacttgaaggacgaaaagacactgcagaaaaaggagccgtctaagtcaagcataaaaaagaagatgacaaaagtggcagaggcaaagaaagtgatgaagagaaatttcaaagtgaataaaaaaatcactttcactgacgaaggcgagctggtccagcagtggccacaaatgcagaaatccgcaatcaaagacgccgaagaggacgacgacactggaggcatcaatctgcacaaggccaaagaacggctgcaggaagaggacaaatttgataaggaggaataccggaaaaagattaaggctaaacatcgggagaaacgactgaaagagagggaggccaggagagaagcaaataagagacaggccaaagcgaaagatgaagaggaggcgtttctggattggtcagatgacgatgacgacgacgatgatggattcgacccctctacactccctgacccggacaagtatagaagtagcgaagactcagattccgaggacatggagaacaagatttctgacactaaaaaaaaacagggaatgaagaaacgctcaaatagtgaagtcgaggatgtgggcccaaccagccacaacagaaaaaaagcacgatgggacaccttggagcctcttgatactggcctgtcgttagcggaggacgaggaactggtcctgcacctgctgcgttctcagagctag

SEQ ID NO: 146057 - DNA, 2628 bp, Artificial Sequence
  derived and/or modified sequence
atgggcaagacagccaacagccctggcagcggggcccggccagaccctgtgcgctccttcaaccgctggaagaagaagcacagccaccggcagaacaagaagaagcagctgaggaagcagctgaagaagccagagtggcaggtggagcgggagagcatcagccggctgatgcagaactatgagaagatcaacgtgaatgagatcacccgcttcagtgacttccccctgagcaagaagaccctgaagggcctgcaggaggcccagtaccgcctggtgacagagatccagaagcagaccatcggcctggccctgcagggcaaggatgtgctgggcgccgccaagacaggcagcggcaagaccctggccttcctggtgcctgtgctggaggccctgtaccgcctgcagtggaccagcacagatggcctgggcgtgctgatcatcagccccacccgggagctggcctaccagacctttgaggtgctgaggaaggtgggcaagaaccacgacttctctgctggcctcatcatcggcggcaaggacctgaagcatgaagctgagcgcatcaacaacatcaacatcctggtgtgcaccccaggccgcctgctgcagcacatggatgagaccgtgtccttccacgccacagacctgcagatgctggtgctggatgaggccgaccgcatcctggacatgggctttgctgacaccatgaatgctgtgattgagaacctgcccaagaagaggcagaccctgctcttcagcgccacccagaccaagtctgtgaaggacctggcccggctgagcctgaagaacccagaatatgtgtgggtgcatgagaaggccaagtacagcaccccagccaccctggagcagaactacatcgtgtgtgagctgcagcagaagatctctgtgctgtacagcttcctgcggagccacctgaagaagaagagcatcgtgttcttcagcagctgcaaggaggtgcagtacctgtacagagtcttctgccgcctgcggcctggggtgtccatcctggccctgcacggccggcagcagcagatgaggaggatggaggtgtacaatgaatttgtgaggaagagagctgctgtgctgtttgccacagacattgctgcccggggcctggacttccctgctgtgaactgggtgctgcagtttgactgcccagaagatgccaacacctacatccacagagctggccgcacagcccgctacaaggaggatggagaggccctgctgatcctgctgcccagcgagaaggccatggtgcagcagctgctgcagaagaaggtgcctgtgaaggagatcaagatcaaccctgagaagctgattgatgtgcagaagaagctggagagcatcctggcccaggaccaggacctgaaggagcgggcccagcgctgctttgtgtcctatgtgcgctctgtgtacctgatgaaggacaaggaggtgtttgatgtgtccaagctgcccatcccagaatatgccctgagcctgggcctggccgtggccccccgggtgcgcttcctgcagaagatgcagaagcagcccaccaaggagctggtgcgcagccaggccgacaaggtgattgagccccgggcccccagcctgaccaatgatgaggtggaggagttccgggcctacttcaatgagaagatgagcatcctgcagaagggcggcaagaggctggagggcacagagcaccggcaggacaatgacacaggaaatgaggagcaggaggaggaggaggatgatgaggaggagatggaggagaagctggccaaggccaagggcagccaggcccccagcctgcccaacaccagcgaggcccagaagatcaaggaggtgcccacccagttcctggacagagatgaggaggaggaggatgctgacttcctgaaggtgaagaggcacaacgtgtttggcctggacctgaaggatgagaagaccctgcagaagaaggagcccagcaagagcagcatcaagaagaagatgaccaaggtggccgaggccaagaaggtgatgaagaggaacttcaaggtgaacaagaagatcaccttcacagatgaaggagagctggtgcagcagtggccccagatgcagaagagcgccatcaaggatgctgaagaagatgatgacacaggaggcatcaacctgcacaaggccaaggagcggctgcaggaggaggacaagtttgacaaggaggagtacaggaagaagatcaaggccaagcaccgggagaagaggctgaaggagcgggaggcccggcgggaggccaacaagaggcaggccaaggccaaggatgaggaggaggccttcctggactggagcgatgatgatgatgatgatgatgatggctttgaccccagcaccctgcctgaccctgacaagtaccgcagcagtgaagattctgattctgaggacatggagaacaagatcagtgacaccaagaagaagcagggcatgaagaagaggagcaacagcgaggtggaggatgtgggccccaccagccacaacaggaagaaggcccgctgggacaccctggagcccctggacaccggcctgagcctggccgaggatgaggagctggtgctgcacctgctgcggagccagagctag

SEQ ID NO: 146058 - DNA, 2346 bp, Artificial Sequence
  derived and/or modified sequence
atgggcaagacagccaacagccctggcagcggggcccggccagaccctgtgcgctccttcaaccgctggaagaagaagcacagccaccggcagaacaagaagaagcagctgaggaagcagctgaagaagccagagtggcaggtggagcgggagagcatcagccggctgatgcagaactatgagaagatcaacgtgaatgagatcacccgcttcagtgacttccccctgagcaagaagaccctgaagggcctgcaggaggcccagtaccgcctggtgacagagatccagaagcagaccatcggcctggccctgcagggcaaggatgtgctgggcgccgccaagacaggcagcggcaagaccctggccttcctggtgcctgtgaatgaggccgaccgcatcctggacatgggctttgctgacaccatgaatgctgtgattgagaacctgcccaagaagaggcagaccctgctcttcagcgccacccagaccaagtctgtgaaggacctggcccggctgagcctgaagaacccagaatatgtgtgggtgcatgagaaggccaagtacagcaccccagccaccctggagcagaactacatcgtgtgtgagctgcagcagaagatctctgtgctgtacagcttcctgcggagccacctgaagaagaagagcatcgtgttcttcagcagctgcaaggaggtgcagtacctgtacagagtcttctgccgcctgcggcctggggtgtccatcctggccctgcacggccggcagcagcagatgaggaggatggaggtgtacaatgaatttgtgaggaagagagctgctgtgctgtttgccacagacattgctgcccggggcctggacttccctgctgtgaactgggtgctgcagtttgactgcccagaagatgccaacacctacatccacagagctggccgcacagcccgctacaaggaggatggagaggccctgctgatcctgctgcccagcgagaaggccatggtgcagcagctgctgcagaagaaggtgcctgtgaaggagatcaagatcaaccctgagaagctgattgatgtgcagaagaagctggagagcatcctggcccaggaccaggacctgaaggagcgggcccagcgctgctttgtgtcctatgtgcgctctgtgtacctgatgaaggacaaggaggtgtttgatgtgtccaagctgcccatcccagaatatgccctgagcctgggcctggccgtggccccccgggtgcgcttcctgcagaagatgcagaagcagcccaccaaggagctggtgcgcagccaggccgacaaggtgattgagccccgggcccccagcctgaccaatgatgaggtggaggagttccgggcctacttcaatgagaagatgagcatcctgcagaagggcggcaagaggctggagggcacagagcaccggcaggacaatgacacaggaaatgaggagcaggaggaggaggaggatgatgaggaggagatggaggagaagctggccaaggccaagggcagccaggcccccagcctgcccaacaccagcgaggcccagaagatcaaggaggtgcccacccagttcctggacagagatgaggaggaggaggatgctgacttcctgaaggtgaagaggcacaacgtgtttggcctggacctgaaggatgagaagaccctgcagaagaaggagcccagcaagagcagcatcaagaagaagatgaccaaggtggccgaggccaagaaggtgatgaagaggaacttcaaggtgaacaagaagatcaccttcacagatgaaggagagctggtgcagcagtggccccagatgcagaagagcgccatcaaggatgctgaagaagatgatgacacaggaggcatcaacctgcacaaggccaaggagcggctgcaggaggaggacaagtttgacaaggaggagtacaggaagaagatcaaggccaagcaccgggagaagaggctgaaggagcgggaggcccggcgggaggccaacaagaggcaggccaaggccaaggatgaggaggaggccttcctggactggagcgatgatgatgatgatgatgatgatggctttgaccccagcaccctgcctgaccctgacaagtaccgcagcagtgaagattctgattctgaggacatggagaacaagatcagtgacaccaagaagaagcagggcatgaagaagaggagcaacagcgaggtggaggatgtgggccccaccagccacaacaggaagaaggcccgctgggacaccctggagcccctggacaccggcctgagcctggccgaggatgaggagctggtgctgcacctgctgcggagccagagctag

SEQ ID NO: 146059 - DNA, 2628 bp, Artificial Sequence
  derived and/or modified sequence
atgggcaagaccgccaacagccccggcagcggcgcccggcccgacccggtgcggagctttaacaggtggaagaaaaagcattcacaccggcagaacaaaaagaagcagcttagaaagcagctgaaaaaacccgaatggcaggtagaacgcgagagcattagtagactaatgcagaactacgagaagatcaatgtgaacgagataactaggtttagtgattttcccttaagtaagaaaacgctgaagggtctacaagaggcacagtataggcttgtcacagagatccagaagcagaccattgggctcgcactgcagggcaaagacgtccttggggctgctaagaccggctccggcaagacgctcgcttttctggttcccgtgcttgaagccctgtatcgtctgcagtggacaagtacagacggtcttggcgttctgattatatctcctacacgagagctagcgtatcagactttcgaagtcctgcgaaaagttggtaagaaccacgattttagcgctggtcttattataggcgggaaagatctgaaacatgaggcggaacggattaacaatataaatatcctagtgtgcacccccgggagactcctccagcacatggacgagacagtgtcattccatgccactgatctgcagatgctagtgctcgatgaagctgatcgcattcttgacatgggctttgccgacacaatgaatgctgtgattgagaaccttccaaaaaaacgacagacactactgttttcggcaacacagactaagagcgttaaagacctggcccgactctctctcaaaaatcccgagtacgtgtgggttcacgagaaggcgaaatacagtaccccagcaacacttgagcagaactacattgtatgtgagctgcagcagaaaatatcagtgctctactccttcctcaggtcacacctaaaaaaaaaatccatcgtttttttctcttcatgtaaagaggtgcagtacctctaccgcgtattttgtagactgcgtcccggcgtgagtatcttagcgctccacggccggcagcagcaaatgcggaggatggaggtttacaatgagttcgtccgcaagagagcagcggtgctctttgccacggatatcgcagcccgggggctggatttccctgcagtgaattgggtcttgcagttcgactgccccgaggacgccaatacttacatccatagggctggtaggaccgcaagatataaagaggacggtgaggcccttctaattctcctgccatcagagaaggctatggtgcagcagctgctgcagaagaaggtgccggtgaaagagatcaaaattaaccccgagaagcttatcgacgtgcaaaagaaacttgagtctatacttgctcaagatcaggaccttaaggaaagagcacagcggtgctttgtgtcctatgtccgaagcgtttacttgatgaaggacaaagaagtctttgacgtatctaagttgccaattcccgaatatgctctatccctcggcttggctgttgcaccacgcgtcagatttctacaaaaaatgcagaagcaaccaacgaaagaactcgtccggtctcaggccgataaggtgattgagccaagagccccaagtctgacgaacgacgaagtcgaagaatttcgagcttatttcaacgagaagatgagtatactccaaaaggggggaaagagactggagggcacagagcataggcaggacaatgacactggaaacgaggaacaggaagaggaggaggatgatgaagaagaaatggaagaaaaactagctaaagccaaggggtcccaggccccgagcctgcctaacacctccgaagcccagaagatcaaagaggtcccaacacagttccttgaccgagatgaggaggaggaagatgccgacttcctcaaggtgaagaggcacaacgtgttcggtctagacctgaaggacgagaagacgctgcagaaaaaggagcctagtaaatcgtccattaagaaaaaaatgactaaggtcgctgaagcgaagaaagttatgaaaaggaacttcaaggtgaataaaaaaattacctttacggacgaaggggagctcgtgcaacagtggccccagatgcagaaaagcgcgataaaagatgctgaagaagatgacgataccggggggattaacctccataaagcgaaagagcgattgcaggaggaagataagtttgataaggaggagtaccgcaaaaagattaaagccaaacaccgggaaaaacgacttaaggaacgtgaagcgaggcgcgaagctaataagaggcaggccaaggccaaggacgaggaggaagccttcttagactggtctgatgacgatgacgacgacgatgatggttttgacccatccactttgccagaccctgataagtatcgctcaagtgaagacagcgactcagaagatatggagaataaaatctctgacacaaagaagaaacaaggtatgaaaaaacgaagcaattctgaagtagaagatgtgggtcccacaagccacaaccggaagaaagccagatgggacactcttgagccgctggataccggcctctctctcgcagaagacgaggagcttgtgctccacctgctcaggtcccaatcttag

SEQ ID NO: 146060 - DNA, 2346 bp, Artificial Sequence
  derived and/or modified sequence
atgggcaagaccgccaacagccccggcagcggcgcccggcccgacccagtgcggtccttcaatcgatggaagaaaaaacacagtcacagacaaaataaaaagaagcagcttcgaaaacagctgaaaaagcctgaatggcaagtcgagagggaatctatttcaagattaatgcagaactatgaaaaaattaacgttaacgagatcaccaggttcagtgatttccctctttcaaaaaagaccctgaaagggctgcaagaggcccagtatcgcctggtgaccgagatccaaaaacagacaatcggtctcgctctccagggcaaggatgtgctgggggctgccaagaccggcagtggcaaaacactggcctttctcgtgcctgttaatgaggcagatcgtattctggacatggggttcgctgacaccatgaatgcagtgattgagaatctaccgaagaagcgacagaccctcctcttttccgcgacccagaccaagagcgtgaaggatcttgctagactttcgctgaagaaccctgagtacgtctgggtacatgaaaaggccaaatattctactccagcaaccctcgagcagaattatatcgtttgtgagctccagcaaaaaatttccgtattgtatagcttccttcggtcccacctcaagaaaaagtctattgtgttcttctcttcctgtaaagaagtccagtacctgtaccgcgtgttttgccgactaaggcccggcgtctcgatccttgctctccacggccgacagcagcagatgcggcgaatggaggtgtataacgagtttgttcgcaagagggctgctgtactgttcgccactgacattgctgcacggggactggacttcccggcagtgaattgggtactccagttcgactgtcccgaagacgccaatacttacatccatcgagccggaaggaccgcccgctataaggaggatggggaagcattgctgattctgctgcccagtgaaaaggcaatggttcagcaattacttcaaaagaaggttccggtaaaggagatcaagatcaaccccgaaaagcttattgacgtgcagaagaaactagagtccatcttagcccaagatcaagatctgaaggaaagggcccaaagatgctttgtgtcttacgttagaagtgtctacttaatgaaggacaaggaagttttcgatgtttctaaactgcccatacccgagtatgccctgtctctgggcttggcagtggccccccgagttcggtttcttcaaaagatgcagaagcagccgacaaaggaactggtccggtcccaagctgataaggtcattgagccacgagccccctcactgacgaacgatgaggtggaggagtttagagcgtacttcaatgagaagatgagcatacttcaaaaaggcggaaagaggctggagggcaccgagcaccgtcaggataatgacactggcaacgaggaacaagaagaggaggaagatgacgaggaggagatggaggagaagcttgccaaagccaagggttctcaagctcctagcttgcccaatacaagtgaggcacagaagatcaaagaggtccccacccagttcctggaccgggacgaggaggaagaggatgcagatttccttaaggtgaagagacataatgtctttggactagatctgaaagatgaaaaaacgctgcaaaaaaaggagcccagtaagtcttctattaagaagaaaatgactaaggtagcggaagcaaagaaagtcatgaaacgaaactttaaggtaaacaaaaagatcaccttcaccgacgagggcgaacttgtccagcagtggccacaaatgcaaaaatctgcaattaaagacgccgaggaggacgatgacacagggggaatcaacttacacaaggcgaaggagagactgcaggaagaagataagttcgataaagaagagtaccgcaagaagattaaagccaagcaccgcgagaagcgtttgaaggagagagaagcacgccgagaagccaataagcggcaggccaaagcgaaggatgaagaggaggcattcctggactggtcagacgacgacgatgacgacgacgacggttttgacccaagcaccctgccagatccggacaaataccgttctagcgaagacagcgactctgaagatatggaaaataagatttcggacactaaaaagaaacagggaatgaagaaacgatccaattcagaggtggaggacgttggccctacaagccacaatagaaagaaggccaggtgggatacactggaaccactagatacaggcctgtcacttgcggaggatgaagagctggtgttacatctgctcagatcgcaatcgtag

SEQ ID NO: 146061 - DNA, 2628 bp, Artificial Sequence
  derived and/or modified sequence
atgggtaagacggccaactcacctggctccggcgcacggccagatccagtgcgtagtttcaatcggtggaagaaaaaacattcgcataggcagaataagaagaaacaactgcggaagcaactcaaaaagcccgagtggcaagtggaaagggaaagcatttcccgactgatgcagaattacgagaaaattaacgtcaatgagatcacaaggttttcggattttccgctctcaaagaaaactttgaaaggtttgcaggaagcacaatacaggctagtgacagaaatccaaaaacaaaccatagggctggccttgcaggggaaggacgtactcggcgcagctaaaaccggatccggcaagactctggcatttctcgtgcccgtattggaagccctctatcgcctgcaatggacgagtacagatggattaggcgtgctgattatcagcccaacacgagaactggcttatcagacttttgaggtgctccggaaggtaggaaagaaccatgatttttcagctggactgatcatcgggggtaaggacctcaagcacgaggcggagcgcatcaacaacatcaatattctggtttgcacacccggacggcttctccagcacatggatgaaaccgtaagtttccacgcaaccgatttgcaaatgctagttttggatgaggctgacagaattctggatatgggattcgcagacactatgaatgccgtaattgaaaatctgcctaagaagcgccagaccctcctgttttctgcaacccagacaaagtcggttaaagacctagccaggctaagtctaaagaacccagagtatgtctgggtccatgaaaaagcgaaatatagtacccctgcaacgcttgaacagaattatatagtgtgtgagctgcagcaaaagatttccgtgctgtattcctttctgcgatcccacctgaagaagaagtcaatagttttcttctcgagctgcaaagaggtacaatatctgtaccgcgtattctgtcgcctccgaccaggggtgtccatactcgccctgcacggtcggcagcagcaaatgaggaggatggaagtgtacaacgaatttgtgcggaaacgcgcagccgtcctgtttgccaccgacattgctgccaggggtctggactttcccgctgtgaattgggtgctgcagttcgactgcccagaggacgcaaacacgtacattcatcgcgctggcagaaccgcccgttataaggaagatggagaagctttgcttatcctcctgccatcagagaaagcgatggtccagcagctcctgcaaaagaaggtgcccgtgaaagagattaaaatcaaccccgagaagctcattgacgtccagaaaaagctagagtccatcctagcacaagaccaagatctcaaggagagagctcagaggtgttttgtgtcttatgtgcgctccgtgtatctaatgaaggataaagaagtgtttgatgtctcaaaactgcctatcccagagtacgccttgtctcttggcctcgccgttgctcctagggtccgcttcctgcagaagatgcagaaacagccaacaaaggaacttgtccgaagtcaggctgataaagtaattgagccgcgtgcacccagcctaaccaacgacgaggtggaggaatttcgggcttattttaacgagaaaatgtcgatccttcagaaaggcggaaagcgattggagggtacagagcataggcaagacaacgacactgggaacgaggagcaggaggaagaagaagacgacgaagaagaaatggaggaaaaactggcaaaggctaaaggttcccaggctcccagtctgccgaacacgagtgaagcgcagaagatcaaggaagtgccaactcagttcctggatagggacgaggaagaggaggacgccgactttctcaaagtcaagaggcataacgtcttcggactggacctcaaggacgaaaagacattacagaagaaagaacccagcaaatcatccatcaagaaaaagatgactaaggtagctgaagccaaaaaagtgatgaagcgtaattttaaggtcaataaaaagataaccttcaccgacgagggcgagctggtccagcagtggccacagatgcagaaaagtgccatcaaggacgccgaagaggacgacgataccggtggaatcaacctgcataaagccaaggaaaggcttcaggaggaagacaagtttgataaggaggagtaccgaaaaaagatcaaggccaaacatagggagaagcgcctgaaagagagggaggcacgcagagaggctaataaacgccaggctaaggcaaaggatgaagaagaggcttttctggactggagtgacgacgacgatgatgatgatgacggatttgacccttccacgcttcccgaccctgacaagtatcgatcatctgaggactccgatagtgaagacatggagaataagattagcgacaccaaaaagaaacaggggatgaaaaagcggagcaactcagaggttgaggatgtgggacccaccagccacaaccggaaaaaggcacgttgggacaccttggaacccttggacaccgggctgagcctcgctgaagacgaggaacttgttcttcacctccttcggtctcagagctag

SEQ ID NO: 146062 - DNA, 2346 bp, Artificial Sequence
  derived and/or modified sequence
atgggcaagacggccaatagcccaggcagcggcgcaaggcccgatcctgtccgcagcttcaaccggtggaagaaaaaacactcccaccggcagaacaagaagaaacagctcaggaagcagctcaaaaagccagaatggcaggtcgaacgggagtccatctctagactcatgcaaaactatgaaaagatcaacgtgaatgagattacaagattttccgatttccctctgtctaagaagacactgaaaggactgcaggaagctcaatacaggttagtaactgagatccaaaaacagacaattggtctggcactccagggcaaggacgtgttaggggctgccaagaccggatcgggcaaaaccctggcctttttggtaccggtgaacgaagctgatcggatcctggatatgggatttgcagataccatgaatgccgttattgagaaccttcctaagaaaagacagacattgctcttctctgctacccagacaaagtctgttaaagatcttgcgcgtttaagcctcaaaaatcccgagtacgtttgggtacacgagaaggcgaaatattcgactcctgctacgctggaacagaactatatcgtatgcgagttgcagcagaaaataagcgtgttgtattcattcctgcgctcccatctgaaaaagaagtcgatagtgttcttttccagctgtaaagaagttcaatacctctaccgtgtgttctgcaggctgaggcctggcgtctccattttggccctgcacggcaggcaacagcagatgcggaggatggaggtgtataatgaattcgtgcgaaagagagccgcagtgctgtttgcgacagatatcgccgcacgaggcctggatttcccagccgtgaactgggtactgcagtttgactgtccagaagatgcgaatacgtacatccaccgcgcagggaggaccgccagatacaaagaggatggggaagcactccttattcttctgccatctgagaaggctatggttcagcagttacttcagaaaaaagtcccagttaaggagatcaaaattaacccggaaaagctaatcgacgtgcaaaaaaagctggaatctattctggcacaggaccaagatctgaaagaacgggctcaacgctgctttgtgtcttatgtgagatcagtgtacctgatgaaagacaaggaggtgtttgacgtcagtaagttaccgattcctgagtatgcattatccctgggcctggctgtcgctcctagagtgcggtttctccaaaaaatgcagaagcagcccacaaaggagctggtgcggtctcaggctgacaaagtgatcgaaccccgagctcccagtctgaccaacgacgaagtggaagagtttcgggcatattttaacgagaagatgtccatcctccagaaaggaggcaagaggctggaaggcactgaacatcgccaggataacgatactgggaatgaggaacaggaagaggaggaggatgatgaggaggaaatggaggagaagctggccaaggccaaagggagccaggccccaagcctacccaatactagcgaggctcagaagattaaggaagttcccacacagttccttgatcgcgacgaggaagaggaagatgctgacttccttaaggtgaaacggcacaatgtgtttggactggatttgaaggatgaaaagactttacaaaagaaagaacccagtaagagctcgatcaaaaagaagatgactaaggtggcggaggccaaaaaggtcatgaaacgtaacttcaaagtgaataaaaaaatcactttcacagacgaaggtgagctggtacaacagtggccgcagatgcagaagtcagctatcaaagatgctgaagaagacgatgacacggggggtataaacttacacaaagccaaggagagactgcaggaggaggacaaattcgacaaagaagaatacaggaaaaaaattaaggcaaaacatagggaaaagcggctcaaagagcgcgaagcacggcgagaggcgaataagcgacaggccaaagccaaggatgaggaagaggcgttcttggattggagtgatgatgatgacgatgatgatgatggcttcgatcctagcacgctccctgacccagataaatatcggagtagcgaggactccgatagcgaggatatggagaacaagatttctgataccaaaaaaaaacaagggatgaagaagaggtctaattccgaggtcgaggacgtgggccctacatcccacaacaggaagaaagctagatgggataccctagagcctttggatacaggtttgtcccttgccgaagacgaagaactagttctgcatttacttcgctctcagtcctag

SEQ ID NO: 146063 - DNA, 3264 bp, Artificial Sequence
  derived and/or modified sequence
aaaagctcgggggcgggcttctgagttcgcgcatgcgcctctgtgcgtttgtcccatgctggttccgtgagtctggccttaggtgtctcgtgtctggggttgatccgagctgtcgccgccgccgccgcaatgggcaaaacggccaactctccgggttcgggagcccgacccgacccggtgcggagcttcaatcgctggaagaaaaaacacagccataggcagaacaaaaagaagcagttgaggaagcaactgaagaaacccgaatggcaggtcgagcgcgagagtatcagccgcctcatgcagaactatgaaaagataaatgtaaatgaaatcacaagattttcagattttcccttgtccaaaaaaacattgaaaggtttgcaagaagctcagtaccgtttggtgactgagatacagaagcagaccattggattggctttgcaaggtaaagatgtacttggagcggccaaaactggatctggcaagactctggcttttcttgttccagtgctggaagccttatatcgtctgcaatggacttcaacagatgggctgggggttctcataatatcacctacgagagaactggcctatcagacctttgaggttctccgaaaagtaggaaagaatcatgacttctcagctggtctcatcattggtggaaaggatctaaaacacgaagctgagaggatcaacaacataaatatactcgtgtgcacaccaggtcggcttcttcaacacatggatgaaacagtatcttttcatgctaccgacctccaaatgttagttcttgatgaagcagatagaatcttggatatgggctttgctgataccatgaatgctgttattgaaaatctccccaagaaacgtcagactttacttttctcagcaacacaaactaaatctgtaaaggaccttgcacgcttgagtttgaaaaaccctgagtatgtctgggttcatgaaaaagcaaaatatagcacccctgccactttggaacagaactacatagtctgtgagctgcagcaaaaaataagtgtgctgtattcctttttgagaagccatctgaagaagaagagcattgtatttttttccagttgcaaagaggtccagtatctgtaccgagtgttttgccggctacgtcctggtgtttctatccttgcactccatggtcgacagcagcaaatgagaagaatggaagtctataatgagtttgtccgtaagagagctgcagtactctttgctactgatattgcagccaggggtctggatttcccggccgtgaattgggttcttcagtttgattgtcctgaggatgccaacacatatattcacagagcaggtagaactgccaggtacaaagaggatggtgaagctttgctaattttgctaccctcagaaaaagctatggtgcagcagcttcttcagaagaaagtacctgtgaaggaaatcaaaatcaatccagaaaaacttatagatgtccagaaaaaattggaatctattttagctcaagatcaagatttaaaagaaagagctcaaaggtgtttcgtctcctatgtacgatctgtatatctgatgaaggataaagaagtatttgatgtgagcaagttacctatacctgaatatgccctgtctcttggtcttgctgtggcaccacgcgtaagatttcttcagaaaatgcagaaacaacccaccaaagaattggtaaggagccaagccgataaagtaattgagccaagggctccctccctcaccaatgacgaagtggaagaatttagagcctacttcaatgagaaaatgtccatccttcaaaaaggtggaaaaagactcgaagggacagagcacagacaggataatgatactggtaatgaagaacaggaagaagaagaagacgatgaagaagaaatggaagagaaactggcaaaagcaaaaggatctcaagccccatctcttcctaacaccagtgaggcacagaagatcaaggaagttcctacacagttcttggacagagatgaggaggaagaagatgctgatttcttgaaggtgaagcggcataatgtgtttggattggaccttaaagacgagaaaacattacagaagaaagaaccttctaaatccagcatcaagaaaaaaatgaccaaagttgcagaagcaaaaaaagtaatgaagagaaattttaaagtgaataagaagataacatttactgatgaaggggagttggttcagcagtggccacaaatgcagaaatctgccatcaaggatgctgaggaagatgatgacacaggtggtatcaacttacataaagcaaaggaaagacttcaggaagaggacaaatttgacaaagaagaatataggaaaaaaattaaggcaaagcatcgggagaaaagactgaaagaaagggaagccagaagagaagccaacaagagacaagcaaaggccaaagatgaagaggaagcctttctggattggagtgatgatgatgatgatgatgatgatggatttgatccaagcacactcccagatccagataaatacagaagctctgaagattcagatagtgaagatatggaaaataaaataagtgataccaagaagaagcaggggatgaagaagaggagcaacagtgaagtggaagacgtgggaccaacaagtcataacagaaagaaggccaggtgggacactttagagcctttggataccggcctgtctttagcagaggatgaagagctggtgttacatctgctaagaagtcaaagctaaatacttcctgcgcctgccttctccttgaaaccttggttatgactgcgtaggcaagaagttgaaaaacagttgatttgggggcacttaggtaccatatgccccattcccaaagggcacatttctggatagaagcgatcgtatctccaagtccctctcacaggacatgctttgtgccatcactgagcatactcagatcgagggtggatgataccatttcctgaccccgttttccagcatgtgttctgttagatttttatccatgggttcctacgccttgtcattggaaacactgcctttgtcttactggcaagttctggagctcttgtgtcattgttagaaatccctgtcttgcttactgtacagaagtttctgttgctgttaaaattgctcatgatttcgacgtatttaatattttcaaagagactatgatggaccagccctgagaaagaatgagtatttttgaattgagatgatcaataataaacatatttcctataaaagaaagta

SEQ ID NO: 146064 - DNA, 2929 bp, Artificial Sequence
  derived and/or modified sequence
cccatgctggttccgtgagtctggccttaggtgtctcgtgtctggggttgatccgagctgtcgccgccgccgccgcaatgggcaaaacggccaactctccgggttcgggagcccgacccgacccggtgcggagcttcaatcgctggaagaaaaaacacagccataggcagaacaaaaagaagcagttgaggaagcaactgaagaaacccgaatggcaggtcgagcgcgagagtatcagccgcctcatgcagaactatgaaaagataaatgtaaatgaaatcacaagattttcagattttcccttgtccaaaaaaacattgaaaggtttgcaagaagctcagtaccgtttggtgactgagatacagaagcagaccattggattggctttgcaaggtaaagatgtacttggagcggccaaaactggatctggcaagactctggcttttcttgttccagtaaatgaagcagatagaatcttggatatgggctttgctgataccatgaatgctgttattgaaaatctccccaagaaacgtcagactttacttttctcagcaacacaaactaaatctgtaaaggaccttgcacgcttgagtttgaaaaaccctgagtatgtctgggttcatgaaaaagcaaaatatagcacccctgccactttggaacagaactacatagtctgtgagctgcagcaaaaaataagtgtgctgtattcctttttgagaagccatctgaagaagaagagcattgtatttttttccagttgcaaagaggtccagtatctgtaccgagtgttttgccggctacgtcctggtgtttctatccttgcactccatggtcgacagcagcaaatgagaagaatggaagtctataatgagtttgtccgtaagagagctgcagtactctttgctactgatattgcagccaggggtctggatttcccggccgtgaattgggttcttcagtttgattgtcctgaggatgccaacacatatattcacagagcaggtagaactgccaggtacaaagaggatggtgaagctttgctaattttgctaccctcagaaaaagctatggtgcagcagcttcttcagaagaaagtacctgtgaaggaaatcaaaatcaatccagaaaaacttatagatgtccagaaaaaattggaatctattttagctcaagatcaagatttaaaagaaagagctcaaaggtgtttcgtctcctatgtacgatctgtatatctgatgaaggataaagaagtatttgatgtgagcaagttacctatacctgaatatgccctgtctcttggtcttgctgtggcaccacgcgtaagatttcttcagaaaatgcagaaacaacccaccaaagaattggtaaggagccaagccgataaagtaattgagccaagggctccctccctcaccaatgacgaagtggaagaatttagagcctacttcaatgagaaaatgtccatccttcaaaaaggtggaaaaagactcgaagggacagagcacagacaggataatgatactggtaatgaagaacaggaagaagaagaagacgatgaagaagaaatggaagagaaactggcaaaagcaaaaggatctcaagccccatctcttcctaacaccagtgaggcacagaagatcaaggaagttcctacacagttcttggacagagatgaggaggaagaagatgctgatttcttgaaggtgaagcggcataatgtgtttggattggaccttaaagacgagaaaacattacagaagaaagaaccttctaaatccagcatcaagaaaaaaatgaccaaagttgcagaagcaaaaaaagtaatgaagagaaattttaaagtgaataagaagataacatttactgatgaaggggagttggttcagcagtggccacaaatgcagaaatctgccatcaaggatgctgaggaagatgatgacacaggtggtatcaacttacataaagcaaaggaaagacttcaggaagaggacaaatttgacaaagaagaatataggaaaaaaattaaggcaaagcatcgggagaaaagactgaaagaaagggaagccagaagagaagccaacaagagacaagcaaaggccaaagatgaagaggaagcctttctggattggagtgatgatgatgatgatgatgatgatggatttgatccaagcacactcccagatccagataaatacagaagctctgaagattcagatagtgaagatatggaaaataaaataagtgataccaagaagaagcaggggatgaagaagaggagcaacagtgaagtggaagacgtgggaccaacaagtcataacagaaagaaggccaggtgggacactttagagcctttggataccggcctgtctttagcagaggatgaagagctggtgttacatctgctaagaagtcaaagctaaatacttcctgcgcctgccttctccttgaaaccttggttatgactgcgtaggcaagaagttgaaaaacagttgatttgggggcacttaggtaccatatgccccattcccaaagggcacatttctggatagaagcgatcgtatctccaagtccctctcacaggacatgctttgtgccatcactgagcatactcagatcgagggtggatgataccatttcctgaccccgttttccagcatgtgttctgttagatttttatccatgggttcctacgccttgtcattggaaacactgcctttgtcttactggcaagttctggagctcttgtgtcattgttagaaatccctgtcttgcttactgtacagaagtttctgttgctgttaaaattgctcatgatttcgacgtatttaatattttcaaagagactatgatggaccagccctgagaaagaatgagtatttttgaattgagatgatcaataataaacatatttcctataaaagaaagt

SEQ ID NO: 146065 - DNA, 2628 bp, Artificial Sequence
  derived and/or modified sequence
atgggcaagaccgccaacagccccggcagcggcgccagacccgaccccgtgagaagcttcaacagatggaagaagaagcacagccacagacagaacaagaagaagcagctgagaaagcagctgaagaagcccgagtggcaggtggagagagagagcatcagcagactgatgcagaactacgagaagatcaacgtgaacgagatcaccagattcagcgacttccccctgagcaagaagaccctgaagggcctgcaggaggcccagtacagactggtgaccgagatccagaagcagaccatcggcctggccctgcagggcaaggacgtgctgggcgccgccaagaccggcagcggcaagaccctggccttcctggtgcccgtgctggaggccctgtacagactgcagtggaccagcaccgacggcctgggcgtgctgatcatcagccccaccagagagctggcctaccagaccttcgaggtgctgagaaaggtgggcaagaaccacgacttcagcgccggcctgatcatcggcggcaaggacctgaagcacgaggccgagagaatcaacaacatcaacatcctggtgtgcacccccggcagactgctgcagcacatggacgagaccgtgagcttccacgccaccgacctgcagatgctggtgctggacgaggccgacagaatcctggacatgggcttcgccgacaccatgaacgccgtgatcgagaacctgcccaagaagagacagaccctgctgttcagcgccacccagaccaagagcgtgaaggacctggccagactgagcctgaagaaccccgagtacgtgtgggtgcacgagaaggccaagtacagcacccccgccaccctggagcagaactacatcgtgtgcgagctgcagcagaagatcagcgtgctgtacagcttcctgagaagccacctgaagaagaagagcatcgtgttcttcagcagctgcaaggaggtgcagtacctgtacagagtgttctgcagactgagacccggcgtgagcatcctggccctgcacggcagacagcagcagatgagaagaatggaggtgtacaacgagttcgtgagaaagagagccgccgtgctgttcgccaccgacatcgccgccagaggcctggacttccccgccgtgaactgggtgctgcagttcgactgccccgaggacgccaacacctacatccacagagccggcagaaccgccagatacaaggaggacggcgaggccctgctgatcctgctgcccagcgagaaggccatggtgcagcagctgctgcagaagaaggtgcccgtgaaggagatcaagatcaaccccgagaagctgatcgacgtgcagaagaagctggagagcatcctggcccaggaccaggacctgaaggagagagcccagagatgcttcgtgagctacgtgagaagcgtgtacctgatgaaggacaaggaggtgttcgacgtgagcaagctgcccatccccgagtacgccctgagcctgggcctggccgtggcccccagagtgagattcctgcagaagatgcagaagcagcccaccaaggagctggtgagaagccaggccgacaaggtgatcgagcccagagcccccagcctgaccaacgacgaggtggaggagttcagagcctacttcaacgagaagatgagcatcctgcagaagggcggcaagagactggagggcaccgagcacagacaggacaacgacaccggcaacgaggagcaggaggaggaggaggacgacgaggaggagatggaggagaagctggccaaggccaagggcagccaggcccccagcctgcccaacaccagcgaggcccagaagatcaaggaggtgcccacccagttcctggacagagacgaggaggaggaggacgccgacttcctgaaggtgaagagacacaacgtgttcggcctggacctgaaggacgagaagaccctgcagaagaaggagcccagcaagagcagcatcaagaagaagatgaccaaggtggccgaggccaagaaggtgatgaagagaaacttcaaggtgaacaagaagatcaccttcaccgacgagggcgagctggtgcagcagtggccccagatgcagaagagcgccatcaaggacgccgaggaggacgacgacaccggcggcatcaacctgcacaaggccaaggagagactgcaggaggaggacaagttcgacaaggaggagtacagaaagaagatcaaggccaagcacagagagaagagactgaaggagagagaggccagaagagaggccaacaagagacaggccaaggccaaggacgaggaggaggccttcctggactggagcgacgacgacgacgacgacgacgacggcttcgaccccagcaccctgcccgaccccgacaagtacagaagcagcgaggacagcgacagcgaggacatggagaacaagatcagcgacaccaagaagaagcagggcatgaagaagagaagcaacagcgaggtggaggacgtgggccccaccagccacaacagaaagaaggccagatgggacaccctggagcccctggacaccggcctgagcctggccgaggacgaggagctggtgctgcacctgctgagaagccagagctag

SEQ ID NO: 146066 - DNA, 2346 bp, Artificial Sequence
  derived and/or modified sequence
atgggcaagaccgccaacagccccggcagcggcgccagacccgaccccgtgagaagcttcaacagatggaagaagaagcacagccacagacagaacaagaagaagcagctgagaaagcagctgaagaagcccgagtggcaggtggagagagagagcatcagcagactgatgcagaactacgagaagatcaacgtgaacgagatcaccagattcagcgacttccccctgagcaagaagaccctgaagggcctgcaggaggcccagtacagactggtgaccgagatccagaagcagaccatcggcctggccctgcagggcaaggacgtgctgggcgccgccaagaccggcagcggcaagaccctggccttcctggtgcccgtgaacgaggccgacagaatcctggacatgggcttcgccgacaccatgaacgccgtgatcgagaacctgcccaagaagagacagaccctgctgttcagcgccacccagaccaagagcgtgaaggacctggccagactgagcctgaagaaccccgagtacgtgtgggtgcacgagaaggccaagtacagcacccccgccaccctggagcagaactacatcgtgtgcgagctgcagcagaagatcagcgtgctgtacagcttcctgagaagccacctgaagaagaagagcatcgtgttcttcagcagctgcaaggaggtgcagtacctgtacagagtgttctgcagactgagacccggcgtgagcatcctggccctgcacggcagacagcagcagatgagaagaatggaggtgtacaacgagttcgtgagaaagagagccgccgtgctgttcgccaccgacatcgccgccagaggcctggacttccccgccgtgaactgggtgctgcagttcgactgccccgaggacgccaacacctacatccacagagccggcagaaccgccagatacaaggaggacggcgaggccctgctgatcctgctgcccagcgagaaggccatggtgcagcagctgctgcagaagaaggtgcccgtgaaggagatcaagatcaaccccgagaagctgatcgacgtgcagaagaagctggagagcatcctggcccaggaccaggacctgaaggagagagcccagagatgcttcgtgagctacgtgagaagcgtgtacctgatgaaggacaaggaggtgttcgacgtgagcaagctgcccatccccgagtacgccctgagcctgggcctggccgtggcccccagagtgagattcctgcagaagatgcagaagcagcccaccaaggagctggtgagaagccaggccgacaaggtgatcgagcccagagcccccagcctgaccaacgacgaggtggaggagttcagagcctacttcaacgagaagatgagcatcctgcagaagggcggcaagagactggagggcaccgagcacagacaggacaacgacaccggcaacgaggagcaggaggaggaggaggacgacgaggaggagatggaggagaagctggccaaggccaagggcagccaggcccccagcctgcccaacaccagcgaggcccagaagatcaaggaggtgcccacccagttcctggacagagacgaggaggaggaggacgccgacttcctgaaggtgaagagacacaacgtgttcggcctggacctgaaggacgagaagaccctgcagaagaaggagcccagcaagagcagcatcaagaagaagatgaccaaggtggccgaggccaagaaggtgatgaagagaaacttcaaggtgaacaagaagatcaccttcaccgacgagggcgagctggtgcagcagtggccccagatgcagaagagcgccatcaaggacgccgaggaggacgacgacaccggcggcatcaacctgcacaaggccaaggagagactgcaggaggaggacaagttcgacaaggaggagtacagaaagaagatcaaggccaagcacagagagaagagactgaaggagagagaggccagaagagaggccaacaagagacaggccaaggccaaggacgaggaggaggccttcctggactggagcgacgacgacgacgacgacgacgacggcttcgaccccagcaccctgcccgaccccgacaagtacagaagcagcgaggacagcgacagcgaggacatggagaacaagatcagcgacaccaagaagaagcagggcatgaagaagagaagcaacagcgaggtggaggacgtgggccccaccagccacaacagaaagaaggccagatgggacaccctggagcccctggacaccggcctgagcctggccgaggacgaggagctggtgctgcacctgctgagaagccagagctag

SEQ ID NO: 146067 - protein, 224 aa, Artificial Sequence
  derived and/or modified sequence
MAELYRVLEAGKIGIFESPTGTGKSLSLICGALSWLRDFEQKKREEEARLLETGTGPLHDEKDESLCLSSSCEGAAGTPRPAGEPAWVTQFVQKKEERDLVDRLKAEQARRKQREERLQQLQHRVQLKYAAKRLRQEEEERENLLRLSREMLETGPEAERLEQLESGEEELVLAEYESDEEKKVASRVDEDEDDLEEEHITKIYYCSRTHSQLAQFVHEVKKSP

SEQ ID NO: 146068 - DNA, 2571 bp, Artificial Sequence
  derived and/or modified sequence
atggccaacgagacccagaaggtgggcgccatccacttccccttccccttcaccccctacagcatccaggaggacttcatggccgagctgtacagagtgctggaggccggcaagatcggcatcttcgagagccccaccggcaccggcaagagcctgagcctgatctgcggcgccctgagctggctgagagacttcgagcagaagaagagagaggaggaggccagactgctggagaccggcaccggccccctgcacgacgagaaggacgagagcctgtgcctgagcagcagctgcgagggcgccgccggcacccccagacccgccggcgagcccgcctgggtgacccagttcgtgcagaagaaggaggagagagacctggtggacagactgaaggccgagcaggccagaagaaagcagagagaggagagactgcagcagctgcagcacagagtgcagctgaagtacgccgccaagagactgagacaggaggaggaggagagagagaacctgctgagactgagcagagagatgctggagaccggccccgaggccgagagactggagcagctggagagcggcgaggaggagctggtgctggccgagtacgagagcgacgaggagaagaaggtggccagcagagtggacgaggacgaggacgacctggaggaggagcacatcaccaagatctactactgcagcagaacccacagccagctggcccagttcgtgcacgaggtgaagaagagccccttcggcaaggacgtgagactggtgagcctgggcagcagacagaacctgtgcgtgaacgaggacgtgaagagcctgggcagcgtgcagctgatcaacgacagatgcgtggacatgcagagaagcagacacgagaagaagaagggcgccgaggaggagaagcccaagagaagaagacaggagaagcaggccgcctgccccttctacaaccacgagcagatgggcctgctgagagacgaggccctggccgaggtgaaggacatggagcagctgctggccctgggcaaggaggccagagcctgcccctactacggcagcagactggccatccccgccgcccagctggtggtgctgccctaccagatgctgctgcacgccgccaccagacaggccgccggcatcagactgcaggaccaggtggtgatcatcgacgaggcccacaacctgatcgacaccatcaccggcatgcacagcgtggaggtgagcggcagccagctgtgccaggcccacagccagctgctgcagtacgtggagagatacggcaagagactgaaggccaagaacctgatgtacctgaagcagatcctgtacctgctggagaagttcgtggccgtgctgggcggcaacatcaagcagaaccccaacacccagagcctgagccagaccggcaccgagctgaagaccatcaacgacttcctgttccagagccagatcgacaacatcaacctgttcaaggtgcagagatactgcgagaagagcatgatcagcagaaagctgttcggcttcaccgagagatacggcgccgtgttcagcagcagagagcagcccaagctggccggcttccagcagttcctgcagagcctgcagcccagaaccaccgaggccctggccgcccccgccgacgagagccaggccagcaccctgagacccgccagccccctgatgcacatccagggcttcctggccgccctgaccaccgccaaccaggacggcagagtgatcctgagcagacagggcagcctgagccagagcaccctgaagttcctgctgctgaaccccgccgtgcacttcgcccaggtggtgaaggagtgcagagccgtggtgatcgccggcggcaccatgcagcccgtgagcgacttcagacagcagctgctggcctgcgccggcgtggaggccgagagagtggtggagttcagctgcggccacgtgatcccccccgacaacatcctgcccctggtgatctgcagcggcatcagcaaccagcccctggagttcaccttccagaagagagagctgccccagatgatcttccaggagcccaagagcgcccaccaggtggagcaggtgctgctggcctacagcagatgcatccaggcctgcggccaggagagaggccaggtgaccggcgccctgctgctgagcgtggtgggcggcaagatgagcgagggcatcaacttcagcgacaacctgggcagatgcgtggtgatggtgggcatgcccttccccaacatcagaagcgccgagctgcaggagaagatggcctacctggaccagaccctgcccagagcccccggccaggccccccccggcaaggccctggtggagaacctgtgcatgaaggccgtgaaccagagcatcggcagagccatcagacaccagaaggacttcgccagcgtggtgctgctggaccagagatacgccagaccccccgtgctggccaagctgcccgcctggatcagagccagagtggaggtgaaggccaccttcggccccgccatcgccgccgtgcagaagttccacagagagaagagcgccagcagctag

SEQ ID NO: 146069 - DNA, 2571 bp, Artificial Sequence
  derived and/or modified sequence
atggctaatgaaacccaaaaggtgggcgcaatacacttccccttcccatttacaccgtattcgatccaggaggactttatggccgaactctacagagtgctggaggctgggaaaattggaatattcgaatcacccaccggcacagggaaatccttgtcgttgatctgcggcgcgttatcttggctgcgtgactttgaacaaaagaaacgcgaggaggaggcgcggctcctggagactggcacgggaccactgcacgatgagaaggatgagtcactctgcttatcttccagttgtgaaggtgcagccgggaccccccgcccagctggcgagccggcctgggtgactcagttcgtgcaaaaaaaggaagaacgggatcttgttgatagactgaaggctgagcaagctcggagaaagcaacgggaggaaaggctgcagcagctgcagcaccgcgtgcagctcaagtacgctgctaagcgtcttcgacaggaggaagaagaacgtgagaacctgctccggttgagtagagagatgctcgaaacggggcctgaggccgaacgactggaacagctcgagtcgggcgaagaagagctcgtgctggccgagtatgagtccgacgaggagaagaaagttgcaagtcgcgtcgatgaggatgaagatgacctggaagaggagcacattacaaaaatctactattgcagccgaacccactctcagcttgcccaatttgtgcatgaggtaaagaagtcaccgttcgggaaggacgtcagactcgtgtccctgggaagtcgacagaatctgtgcgtgaatgaggacgtaaagagtcttgggtcagtccagctgatcaatgatcgctgcgtggacatgcaacgcagtcggcacgaaaaaaagaaaggtgccgaggaagagaagccaaagcgcagaaggcaggaaaagcaggccgcctgtcctttctacaatcatgagcaaatgggattgctgcgcgatgaagccctggcagaggtgaaggacatggaacaactgctcgctctcgggaaggaggcgagagcgtgtccttattacgggtcccggctggctatcccagccgctcagctggtggtgctgccatatcagatgctcttgcacgctgcaactcgccaggccgcaggtatcaggctccaagaccaggtggtgataatagatgaagctcacaatctgattgatactataaccggcatgcattcagtcgaagtgtctggctcccagttgtgccaagcgcacagtcaactcctgcaatacgtcgaacggtatggcaagaggctcaaggcgaagaatcttatgtatctgaagcagatcctctacctcttggaaaagtttgtcgctgtacttggaggtaacatcaagcagaatcccaatacgcagtctctgagccagaccggaaccgaactgaagacaatcaatgactttctgttccagagtcaaattgataacatcaatctttttaaggtgcagaggtattgcgagaagtccatgatatctcgaaagctgtttggattcactgaaaggtacggagccgtgtttagttctcgcgaacagccgaaactcgccgggttccaacagttcctacagtcacttcagccaagaacaacagaagccctggcagcccccgcagacgagagtcaagcatcaaccttacgacctgcaagtcccctcatgcacatccagggtttccttgcagcccttaccaccgcaaaccaggatgggcgggtcatcctgtcaaggcaggggtcattatcccagagtacacttaagtttctcctccttaatcctgctgtccatttcgctcaagttgtgaaagagtgcagagctgtcgtgatagcaggaggtacaatgcagcccgtttctgactttagacagcaattgctggcatgcgccggggtggaagccgagcgcgtggtggagttctcctgcggacatgtcattccgccagacaatattttgccactcgtaatttgcagcggcatctccaatcagccactggagtttacatttcagaaaagagaattgcctcagatgatctttcaggaacccaagagcgcacaccaggtcgaacaggttttattggcttacagtcgctgcattcaagcgtgtggtcaggagagaggccaggtgacaggcgctctgttgttgtcagtggttgggggaaaaatgtctgaaggaattaatttcagcgataacttaggaaggtgtgtcgtgatggtcggaatgcccttcccaaacattaggtccgcagaactccaggagaagatggcgtacctggatcaaactcttccaagagctcccggccaggccccccctggaaaagctctggtggagaacctgtgtatgaaggctgtaaatcagagcatcggccgagcaatccgccatcagaaggatttcgcgtccgtggtcttactggaccaaagatacgcccgacccccagtcctagctaagctgccggcgtggatccgggccagggtagaggtgaaggccaccttcggacccgcaattgcggccgtgcagaagtttcatagggagaaatctgcctcctcctag

SEQ ID NO: 146070 - DNA, 2571 bp, Artificial Sequence
  derived and/or modified sequence
atggccaatgagacccagaaggtgggcgccatccacttccccttccccttcaccccctacagcatccaggaggacttcatggccgagctgtacagagtgctggaggccggcaagattggcatctttgagagccccaccggcaccgggaagagcctgagcctcatctgtggggccctgtcctggctgcgggactttgagcagaagaagcgggaggaggaggcccggctgctggagactggaacaggccccctgcatgatgagaaggatgagagcctgtgcctgagcagcagctgtgagggcgccgccggcacccccaggcctgctggggagcccgcctgggtgacccagtttgtgcagaagaaggaggagcgggacctggtggaccggctgaaggccgagcaggcccggaggaagcagcgggaggagcggctgcagcagctgcagcaccgggtgcagctgaagtatgctgccaagaggctgcggcaggaggaggaggagcgggagaacctgctgcggctgagccgggagatgctggagaccggccctgaggccgagcggctggagcagctggagagcggggaggaggagctggtgctggccgagtatgaaagtgatgaggagaagaaggtggccagccgggtggatgaagatgaagatgacctggaggaggagcacatcaccaagatctactactgcagcaggacccacagccagctggcccagtttgtgcatgaggtgaagaagagcccctttgggaaggatgtgcggctggtgtccctgggcagccggcagaacctgtgtgtgaatgaagatgtgaagagcctgggctctgtgcagctgatcaatgacagatgtgtggacatgcagaggagcagacatgagaagaagaagggagctgaggaggagaagcccaagagaagacggcaggagaagcaggccgcctgccccttctacaaccacgagcagatgggcctgctgagagatgaggccctggccgaggtgaaggacatggagcagctgctggccctgggcaaggaggcccgggcctgcccctactacggcagccggctggccatcccagctgcccagctggtggtgctgccctaccagatgctgctgcatgctgccacccggcaggccgccggcatccggctgcaggaccaggtggtgatcattgatgaggcccacaacctgattgacaccatcaccggcatgcacagcgtggaggtgtctggcagccagctgtgccaggcccacagccagctgctgcagtatgtggagagatatggcaagaggctgaaggccaagaacctgatgtacctgaagcagatcctgtacctgctggagaagtttgtggccgtgctgggcggcaacatcaagcagaaccccaacacccagagcctgagccagacaggaacagagctgaagaccatcaatgacttcctgttccagagccagattgacaacatcaacctcttcaaggtgcagcgctactgtgagaagtccatgatcagcaggaagctgtttggcttcacagaaagatatggagctgtgttcagcagccgggagcagcccaagctggccggcttccagcagttcctgcagagcctgcagcccaggaccacagaggccctggccgccccagcagatgagagccaggccagcaccctgcggcctgccagccccctgatgcacatccagggcttcctggccgccctgaccacagccaaccaggacggccgggtcatcctgagccggcagggcagcctgagccagagcaccctgaagttcctgctgctgaacccagctgtgcactttgcccaggtggtgaaggagtgcagagctgtggtgattgctgggggcaccatgcagcctgtgtctgacttccggcagcagctgctggcctgtgccggcgtggaggccgagcgggtggtggagttcagctgtggccacgtgatccccccagacaacatcctgcccctggtgatctgcagcggcatcagcaaccagcccctggagttcaccttccagaagcgggagctgccccagatgatcttccaggagcccaagagcgcccaccaggtggagcaggtgctgctggcctacagccgctgcatccaggcctgtggccaggagcggggccaggtgactggagccctgctgctgtctgtggtgggcggcaagatgtctgagggcatcaacttcagtgacaacctgggccgctgtgtggtgatggtgggcatgcccttccccaacatccgctctgctgagctgcaggagaagatggcctacctggaccagaccctgccccgggcccctggccaggcccctcctgggaaggccctggtggagaacctgtgcatgaaggctgtgaaccagagcatcggccgggccatccgccaccagaaggactttgcctctgtggtgctgctggaccagagatatgcccggccccctgtgctggccaagctgcctgcctggatccgggcccgggtggaggtgaaggccaccttcggccctgccatcgctgctgtgcagaagttccaccgggagaagagcgccagcagctag

SEQ ID NO: 146071 - DNA, 2571 bp, Artificial Sequence
  derived and/or modified sequence
atggccaacgagacccagaaggtgggcgccatccacttccccttccctttcacaccatactcgatccaggaggactttatggccgagctgtatagggtcctagaagctggaaagattggaatttttgaatcacccaccggaacaggaaagtctctcagcctgatctgcggcgccctctcctggctgagagattttgagcagaaaaagcgcgaagaagaggccaggctgttagagaccggaactggcccactgcacgatgagaaagatgagtctttgtgcctatccagcagctgcgaaggcgctgcagggacccctcggccagcaggggaacccgcctgggttacgcaatttgtgcagaagaaggaggaaagagacctggtggatcggcttaaggcagaacaggctcgtcgcaagcagcgggaggaacgccttcagcaactgcagcatagagtccagctgaaatacgcagccaagaggctgcggcaggaagaagaagagagggagaatctgctgaggctgtctcgggagatgcttgaaaccggacctgaggccgaaagactagagcagttagagagcggagaggaggagcttgttctggctgaatatgaatcagatgaagagaagaaggtggctagtcgtgtggacgaggatgaagacgatctggaagaggaacacattaccaagatctactactgctcgagaacccactcccaattggcccagttcgtacatgaagtgaagaaaagtccttttggaaaggacgtgcgtctggtttcgctgggctcccgccagaacctctgtgtgaacgaggatgtcaaatctctcggctcagtgcagctgataaacgacagatgtgtcgacatgcaacgtagtagacacgagaaaaaaaagggggctgaggaagagaagcccaagaggaggaggcaagagaagcaggccgcttgtcctttttacaaccatgagcagatgggactgctgcgtgacgaggccctcgcggaggtgaaagatatggagcagctccttgccctaggtaaagaggccagagcctgtccgtattacggatcgcggctggccattccagctgcccagctggtcgtcctcccttatcagatgcttctgcatgccgctacccgccaggccgccggcatcaggctgcaggatcaagtggtgattatagacgaggctcacaacctgatagatactattactggcatgcattccgtcgaagtgtctggaagccagctgtgtcaagctcacagccaactcttacagtatgtggagagatatggaaagcggttaaaggctaaaaacctgatgtatttgaaacagatactgtatttgctcgaaaaatttgttgccgttctcggtggcaatatcaaacagaatccaaacacccagtcgttaagccagactggcaccgagctgaaaaccattaatgatttccttttccaatcccagatcgataacatcaatttattcaaagttcagcgatattgcgagaagtctatgatctctcggaagttgttcggatttactgaaagatatggcgccgttttctcatcccgtgaacaacctaagctagctggatttcagcaattcctgcagagtttgcagccccgtacaacagaagcattggcagctccggccgacgaatcccaggctagcactctgcgtcctgccagccccctgatgcatatccagggatttctggccgcactgacaacagctaatcaggatggccgggtgatattgtcccggcaggggagtctttcgcagagcaccttgaagtttttattgctaaatccagctgtgcactttgctcaggtcgttaaagaatgtagggctgtcgtgatcgcaggaggaaccatgcagccagtgtctgattttcgccagcaactgctggcctgtgctggtgttgaagctgaacgagtggtagagttctcctgcggacatgtgatccctcccgacaacattttgcctttggttatctgttcaggaatatctaatcagccactggaatttacctttcaaaagcgggaattgccgcagatgatctttcaggagcccaaaagcgcccatcaggtcgaacaggtcttgctcgcatattccaggtgtattcaggcctgtggccaggaaagagggcaagtaactggcgccctgctgctgtccgtcgtgggtgggaagatgtcagagggcataaacttctccgataatctcggcaggtgtgtggtgatggtcggtatgccctttcccaacattaggtcagccgagcttcaggaaaaaatggcctacctcgatcaaaccctcccgcgggcacccgggcaggcaccaccagggaaagctttggttgagaacctatgcatgaaggctgtcaatcagagtataggacgagcaatccgacatcagaaggacttcgcaagtgttgtcctgttggatcagcggtatgctcggcccccagtgcttgccaaactgccagcctggattcgcgccagagttgaggttaaggcaacttttggccctgctattgccgcagtccagaaattccatcgggagaaatccgcatccagctag

SEQ ID NO: 146072 - DNA, 2571 bp, Artificial Sequence
  derived and/or modified sequence
atggccaacgaaacccagaaagtaggcgcaatccatttcccctttcccttcacgccttatagcatacaagaggattttatggctgaactttacagggtgttggaagccggtaaaatcggaatctttgagagtccaaccggcaccggcaaaagcttaagtctgatttgcggcgcactgagctggctcagggacttcgagcaaaagaaaagggaagaagaggctagattgctggaaactggcacaggccctctccacgacgaaaaagatgaaagtctgtgcttgagttcttcttgcgagggggctgctgggacaccccgacccgcaggcgagcccgcttgggtcacccagtttgtccagaagaaggaggaacgagacctggtggacagactaaaggccgagcaagcacgcagaaagcagagagaagagaggctccaacagctgcagcaccgcgttcaactcaaatacgcagccaaaaggctgcggcaagaggaggaagagcgcgaaaacctccttcgattgagcagagagatgctggaaacgggtcctgaagccgagagactggaacagctggaatcaggggaggaagaattagttttggctgagtatgaatcagatgaagagaagaaggtggctagccgggtggacgaagacgaagacgatctggaggaggaacatattaccaaaatctattactgctctagaacccacagccaactcgcccagttcgtgcacgaagtgaagaagtctccttttggtaaggacgtccgtttagtatctctcgggtcacgtcagaatctctgcgtcaacgaggatgttaagtccttggggtctgtgcagcttatcaatgataggtgcgttgacatgcagcgcagcagacatgaaaagaaaaaaggcgctgaagaggaaaaacctaagcggagaagacaggaaaaacaggcggcttgtcccttctacaatcacgaacaaatggggctcctcagagacgaggccctggccgaagtgaaagacatggagcaactccttgccctggggaaggaagcacgggcatgcccctactacggatctagactggctattcccgcagcgcaactcgtggtattgccgtatcaaatgctcctgcacgccgcaacccgccaagcagccggaatcaggctccaggaccaagtggttattatcgatgaagcacataatctgattgatacaatcactgggatgcatagtgtagaagtgagtggatctcaactgtgtcaggcccactcccaactcttgcagtacgtagaaagatatggaaaacgcctgaaggcaaaaaatctcatgtatcttaagcagatcttgtacttgctcgaaaagttcgtcgccgttctgggcggaaacattaaacagaatccgaacacacagagccttagtcagacaggcactgaactaaaaacaatcaatgactttctgttccagagccagattgacaacattaatctgtttaaagttcagagatattgtgaaaagtctatgatttctagaaaactctttgggttcacagagagatatggggcagtctttagctcccgggaacagcccaagcttgcgggatttcagcaattcttacagtcactccagccccgtacaacggaggcactcgccgctcccgctgatgaaagccaggctagcactttgcggccagcttcccccctgatgcatattcagggctttctagccgctttgaccaccgccaatcaagatgggcgtgtgatcctgtcacgtcaaggcagcctcagccagagcacccttaaattcttattattgaaccccgctgttcacttcgctcaggtggtgaaagagtgccgggcagttgtgatcgccggtgggactatgcagccagtaagcgacttcaggcaacagctgcttgcctgtgcgggagtcgaggccgagcgggttgtagagttcagctgcgggcacgttataccacctgacaatattctgcctctggtaatctgttccggcatttcaaatcagcctctggaattcacattccaaaagagagagctgccccagatgatttttcaggaaccaaagtcggcccaccaggtcgaacaggtgttgctcgcatatagccgatgcatccaagcatgcggtcaggagcggggacaggtgaccggggcacttttgctgtcggtggtgggcggtaagatgtccgagggtataaatttcagcgataatttgggaagatgcgtcgtgatggtcgggatgcccttcccaaatatcaggagtgcagagcttcaagagaagatggcatacctggatcagaccctgcccagggcccctggacaggcgcctcccggtaaggctctcgtcgagaacctctgcatgaaagctgtgaatcagtctattgggagagccattcgccatcaaaaggattttgcctccgtggtgctgctcgatcagaggtatgcccgacctccagtccttgccaagctgccggcatggattagggcaagggtcgaggtgaaggctactttcggaccagccatcgccgcagttcaaaagttccatagagagaagtccgcgtcttcttag

SEQ ID NO: 146073 - protein, 328 aa, Artificial Sequence
  derived and/or modified sequence
MTGVFDSLVADMHSTQIAASSTYHQHQQPPSGGGAGPGGNSSSSSSLHKPQESPTLPVSTATDSSYYTNQQHPAGGGGGGGSPYAHMGSYQYQASGLNNVPYSAKSSYDLGYTAAYTSYAPYGTSSSPANNEPEKEDLEPEIRIVNGKPKKVRKPRTIYSSFQLAALQRRFQKTQYLALPERAELAASLGLTQTQVKIWFQNRRSKFKKMWKSGEIPSEQHPGASASPPCASPPVSAPASWDFGVPQRMAGGGGPGSGGSGAGSSGSSPSSAASAFLGNYPWYHQTSGSASHLQATAPLLHPTQTPQPHHHHHHHGGGGAPVSAGTIF

SEQ ID NO: 146074 - protein, 217 aa, Artificial Sequence
  derived and/or modified sequence
MTGVFDSLVADMHSTQIAASSTYHQHQQPPSGGGAGPGGNSSSSSSLHKPQESPTLPVSTATDSSYYTNQQHPAGGGGGGGSPYAHMGSYQYQASGLNNVPYSAKSSYDLGYTAAYTSYAPYGTSSSPANNEPEKEDLEPEIRIVNGKPKKVRKPRTIYSSFQLAALQRRFQKTQYLALPERAELAASLGLTQTQVGLAPCRGEESAGLRWLGSRRV

SEQ ID NO: 146075 - DNA, 2308 bp, Artificial Sequence
  derived and/or modified sequence
aagaggatgcgaccagaggcagctgtcccgagcagcgcacggtgatcgcctcccccggaggaggaggcgcctagacggttgcctcctttcttgtttccccaccaccacccccgtaattacattggctgctggaggggaccgggagagacagaggaggcgcctggcttcccccgcacgcccgccacctctgctctttcccgtctcgggccaggatgactggagtctttgacagtctagtggctgatatgcactcgacccagatcgccgcctccagcacgtaccaccagcaccagcagcccccgagcggcggcggcgccggcccgggtggcaacagcagcagcagcagcagcctccacaagccccaggagtcgcccacccttccggtgtccaccgccaccgacagcagctactacaccaaccagcagcacccggcgggcggcggcggcggcgggggctcgccctacgcgcacatgggttcctaccagtaccaagccagcggcctcaacaacgtcccttactccgccaagagcagctatgacctgggctacaccgccgcctacacctcctacgctccctatggaaccagttcgtccccagccaacaacgagcctgagaaggaggaccttgagcctgaaattcggatagtgaacgggaagccaaagaaagtccggaaaccccgcaccatctactccagtttccagctggcggctcttcagcggcgtttccaaaagactcaatacttggccttgccggagcgagccgagctggcggcctctctgggcctcacccagactcaggtcaaaatctggttccagaaccgccggtccaagttcaagaagatgtggaaaagtggtgagatcccctcggagcagcaccctggggccagcgcttctccaccttgtgcttcgccgccagtctcagcgccggcctcctgggactttggtgtgccgcagcggatggcgggcggcggtggtccgggcagtggcggcagcggcgccggcagctcgggctccagcccgagcagcgcggcctcggcttttctgggcaactacccctggtaccaccagacctcgggatccgcctcacacctgcaggccacggcgccgctgctgcaccccactcagaccccgcagccgcatcaccaccaccaccatcacggcggcgggggcgccccggtgagcgcggggacgattttctaaccccagggagaactcgccagagactgagagcagagaccacttatcctcattgcttaccccgagccggggttccctcctcccggcccgctgccgccacccacctctcctgcaggctgcgacctgcagtggcccgtctcaggccctgctcactcccggggccaccaaacgggcccctctctcgggggaaccggacagcagcttggcaaaggcctccctaaaaggccgcatttctgacctgagccccgggtctcggctgtttcgagccccgcctcggacttgccttccctcccctccgggtgagcctgtctggcgccttcctcgccccgggctgagagctgggtcccgggagatggaagcctcccaggcgcgcgaggcttcccgggcgctctgaggcttctttctcctcgcccgctcccctgggctcagctcggacgctgcagttattgacctcccggtcccgcctgcccgccctcccccacgtggccccttgacccgggcggccccgccgcttctttccttcctgcagttcccagccctcggagcccccatcccttatcttacccccaccgcgctcccccaggagcgctccctcagctctctcctcatccatcaccagtggagtttttttatttgttatttttttaaaagtttaggtgcctttgcggatgacctcattttgacgttgaaaaaatgattttttaatatgtgaacactgcaaaaatgtgtttaaattatcttttttaaaacctattcaggattattagcctggacttggacacagagtttgtaaataaaggtgtctgtgcagattttcccactgatttatttgtataaaaatactcatcttttcagacttttttgtaaacccccagttgtgaaaactgcagtttagcagtgacctcagcaacccctcctttttattttttcctttaaaaacatttcagttaaattaagctactgatttggatttgttttatcgtatcctaaagtctttgttgttgaaatgaaaggtattttggggttatttattatgaaaacaacatgctcttaatgttgattttacaatatgaagagattatttaaataaattattgttttcattggaaaaa

SEQ ID NO: 146076 - DNA, 654 bp, Artificial Sequence
  derived and/or modified sequence
atgaccggagttttcgacagtctggtggctgacatgcacagcacccagatcgccgcgtcctcaacctaccaccagcaccaacagcccccctccggcgggggggctggccccggaggaaacagttctagctctagctcgctgcacaaacctcaagagagcccaaccctgccagtgagtaccgccactgatagtagttactatactaatcagcagcatcctgctggggggggaggcggagggggatccccttatgcacacatgggatcgtaccaataccaggcatccggcctgaacaatgttccctacagcgcgaagtccagttacgacctgggatacactgccgcctacacgtcatatgccccctatggcacctctagtagccctgccaataatgaaccggagaaagaggatctggaacctgaaatccgcatcgtgaacgggaagccaaagaaggtgcgtaaacctcgaacgatctactcatccttccagctggcagcgctccaacgaagattccagaaaactcagtacctcgctctccccgaaagagccgaactcgcagcttccttaggcctcactcagacccaggttggcctcgccccttgccggggcgaggagtcagctgggctccgttggctcggctctcgaagggtgtag

SEQ ID NO: 146077 - DNA, 987 bp, Artificial Sequence
  derived and/or modified sequence
atgaccggtgtgttcgactcattggtggcggatatgcatagtactcagatcgccgcgtcctccacatatcaccaacatcagcaaccccctagtggcggcggcgccggcccaggaggaaactcatcctcctcctccagcttacataaaccgcaggaatccccaaccctaccagtgagcaccgcgacagacagctcctactatactaatcagcaacaccccgctggcggaggcgggggtggtggatcgccatacgctcacatggggtcataccaataccaagcctctggactgaacaatgttccttattctgccaaatcctcctatgatctgggctatacagccgcttataccagctacgctccttatggaacatcttcatcccccgccaacaacgaaccagaaaaagaggatcttgagccagagatacggatcgtgaacggcaagccaaaaaaggtgaggaagcctcgtacaatttactctagcttccaactcgccgctcttcagcgtcgttttcagaagacccagtatcttgccttgccagagagggcggaactcgcagcctctctgggacttactcagacccaggtcaaaatttggttccagaaccggcgatccaaatttaaaaagatgtggaagtccggcgagatcccatctgaacaacatcccggcgcatccgcatccccaccatgcgcttccccccccgtttccgcccccgcctcctgggactttggtgtgccacagaggatggccggcggcgggggacctggctccggagggagtggcgcaggctcttctgggtctagcccttcctctgccgctagcgcattcctgggcaactatccatggtaccatcagacatcaggctcagcgtcacatctgcaagctacagcgcctcttctccacccaacccaaactcctcaaccgcaccaccatcatcatcaccacggcggcgggggcgcacccgtctcagctgggacaatattctag

SEQ ID NO: 146078 - DNA, 654 bp, Artificial Sequence
  derived and/or modified sequence
atgactggagtgtttgacagcctggtggccgacatgcacagcacccagattgctgccagcagcacctaccaccagcaccagcagcccccatctgggggcggggccggccctgggggcaacagcagcagcagcagcagcctgcacaagccccaggagagccccaccctgcctgtgtccacagccacagacagcagctactacaccaaccagcagcaccctgctgggggcggcggcggcggcggcagcccctatgcccacatgggcagctaccagtaccaggccagcggcctgaacaacgtgccctacagcgccaagagcagctatgacctgggctacacagctgcctacaccagctatgccccctacggcaccagcagcagccctgccaacaatgaacctgagaaggaggacctggagcctgagatccgcatcgtgaatggcaagcccaagaaggtgaggaagcccaggaccatctacagcagcttccagctggccgccctgcagaggcgcttccagaagacccagtacctggccctgcctgagagagctgagctggccgccagcctgggcctgacccagacccaggtgggcctggccccctgccgcggggaggagagcgctggcctgcgctggctgggcagcagaagagtgtag

SEQ ID NO: 146079 - DNA, 987 bp, Artificial Sequence
  derived and/or modified sequence
atgactggagtgtttgacagcctggtggccgacatgcacagcacccagattgctgccagcagcacctaccaccagcaccagcagcccccatctgggggcggggccggccctgggggcaacagcagcagcagcagcagcctgcacaagccccaggagagccccaccctgcctgtgtccacagccacagacagcagctactacaccaaccagcagcaccctgctgggggcggcggcggcggcggcagcccctatgcccacatgggcagctaccagtaccaggccagcggcctgaacaacgtgccctacagcgccaagagcagctatgacctgggctacacagctgcctacaccagctatgccccctacggcaccagcagcagccctgccaacaatgaacctgagaaggaggacctggagcctgagatccgcatcgtgaatggcaagcccaagaaggtgaggaagcccaggaccatctacagcagcttccagctggccgccctgcagaggcgcttccagaagacccagtacctggccctgcctgagagagctgagctggccgccagcctgggcctgacccagacccaggtgaagatctggttccagaacagaagaagcaagttcaagaagatgtggaagtctggagagatccccagcgagcagcaccctggggccagcgccagccccccctgtgccagcccccctgtgtctgccccagcctcctgggactttggagtgccccagaggatggccggcggcggcggccctggcagcggcggcagcggggccggcagcagcggcagcagccccagcagcgctgccagcgccttcctgggcaactacccctggtaccaccagaccagcggcagcgccagccacctgcaggccacagcccccctgctgcaccccacccagaccccccagccccaccaccaccaccaccaccacggcggcggcggggcccctgtgtctgctggcaccatcttctag

SEQ ID NO: 146080 - DNA, 654 bp, Artificial Sequence
  derived and/or modified sequence
atgaccggcgtgttcgacagcctggtggccgacatgcacagcacccaaattgctgctagttccacataccaccagcaccagcagcctccttccgggggtggcgccgggccgggggggaatagctcttcgagtagcagcctgcataaaccccaagaatcaccaaccctacccgtgtccactgccaccgattccagttactacacaaaccagcagcatcccgctgggggcggaggaggaggagggagtccttatgctcatatgggaagttatcagtaccaggcttcaggtttgaataacgttccatactccgcaaagagttcctacgacttgggctatactgccgcctatacaagctatgccccatatggtacctctagtagtccggctaataacgagccagagaaggaggacctggagccggagataaggattgttaacgggaagcctaaaaaggtgaggaagccgaggacaatctacagtagcttccagctggccgctctccagcgcagatttcagaagactcagtacctggcactccccgagagagccgaactggccgcatccctcggcctgacccaaacgcaagtgggcctggcaccgtgcaggggcgaggaaagcgcagggctgcgttggttgggctcccggcgggtgtag

SEQ ID NO: 146081 - DNA, 987 bp, Artificial Sequence
  derived and/or modified sequence
atgaccggcgtgttcgacagcctggtggccgacatgcacagcacccagatcgctgccagtagtacataccatcagcatcaacagcccccaagcggggggggagcgggcccagggggcaactcaagttcctcttcatccctacacaaaccacaggagagtcccactctccccgttagcactgctaccgattcctcttattacactaaccaacagcacccggcggggggcggcgggggcggagggagcccctacgcccacatgggatcctaccagtaccaagccagcggtcttaataacgtgccctatagtgcaaaatccagctacgatcttggttatacggccgcttatacctcctacgcaccatacggaactagttcctctcctgccaataacgaaccggaaaaagaagacctcgagcctgaaatcaggatagtgaatgggaagcccaagaaagttcgaaaaccccggacaatttattcctcttttcagctcgcggctctgcaacggcgttttcagaagacacagtatctggctcttcccgagagggcggagcttgcagccagcttagggctaacgcagacacaggtgaagatctggtttcaaaacagaaggtctaaatttaagaagatgtggaagtccggggaaataccgtcagagcaacatcctggcgcttcggcctcccccccctgtgctagcccccctgtgagcgctcctgcttcctgggatttcggtgtgccacagaggatggcaggcggggggggccctggttcgggcggttcaggcgccggttcaagcggctcaagtccttcttccgcagcttcggcctttctgggtaattacccatggtaccaccaaactagcgggagtgcaagccacctccaggccactgctcccctgttgcatcctacgcagacgccgcagcctcatcaccaccatcaccaccatggcgggggcggggcaccagtgtccgccggcactatcttttag

SEQ ID NO: 146082 - DNA, 654 bp, Artificial Sequence
  derived and/or modified sequence
atgacaggcgtttttgattcattagtggccgatatgcactcaacgcagatcgctgcctcgagtacgtaccaccagcatcagcaaccccctagtggtggaggagctggacccggtggaaatagctccagctcatccagcctgcacaaaccccaggagagccccacgctccccgtgtccaccgcaaccgatagcagctattatacaaaccagcagcaccctgcgggaggtggcggaggaggtggctccccctatgcacacatggggtcctatcagtatcaagctagtggcctgaataacgtgccatactcggctaaatcatcctatgacttaggctatactgcagcatacacttcgtatgctccgtatggaactagtagtagccctgccaataatgaacctgagaaagaggacctcgaacccgagatccggatcgtgaacgggaagcctaagaaagtacgaaaacccaggactatctactcaagcttccaactggccgctttacagcgcagattccaaaaaacccagtatctcgcccttccagaacgggcagagctcgccgctagcttgggcctgactcagacccaggtgggcttggccccatgtagaggagaagagtcggctggccttcgctggcttggtagtaggagggtttag

SEQ ID NO: 146083 - DNA, 987 bp, Artificial Sequence
  derived and/or modified sequence
atgacgggggtgttcgattctctcgtcgccgacatgcattccacacagatcgctgcatcttctacctaccatcagcatcagcaaccaccttcagggggaggcgctggcccaggcggtaactccagctcaagctcatctctgcataagccacaagaatctcctaccctgccggtcagtactgccacagatagttcttactatacaaatcaacagcaccccgctggcggtgggggtggcggaggcagtccatatgctcacatgggctcataccagtatcaggcctctggacttaataatgtgccctactccgcaaagagctcatacgatctcggttatacagctgcctatactagttatgccccttacgggacctcctcctccccagccaataacgagccagaaaaggaagatctggagccagagatccggatcgtgaacggaaaacccaagaaagtgagaaagcccagaactatttattccagttttcaacttgctgctctgcagaggagattccaaaagacgcagtatctcgctctgccagaacgggctgaactggcagcatccctaggcctgacacaaactcaagtaaagatttggtttcagaataggagatcaaagttcaaaaagatgtggaagtctggcgaaattccctccgagcaacaccctggagcatccgcatcaccgccatgcgctagtccccctgttagtgcgccagcatcatgggattttggcgtgccgcagagaatggccggtggtggaggaccaggctctggcggaagcggggctggctcgagcggtagcagcccgagcagcgcagccagtgcctttctcgggaactatccatggtaccaccagacatctggtagcgctagccacttacaggcaaccgcacccctcctgcacccaactcagactccccagccacaccatcaccatcatcaccatgggggtggaggtgcccctgtgagcgcaggaaccatcttttag

SEQ ID NO: 146084 - DNA, 654 bp, Artificial Sequence
  derived and/or modified sequence
atgaccggcgtgttcgacagcctggtggccgacatgcacagcacccagatcgccgccagcagcacctaccaccagcaccagcagccccccagcggcggcggcgccggccccggcggcaacagcagcagcagcagcagcctgcacaagccccaggagagccccaccctgcccgtgagcaccgccaccgacagcagctactacaccaaccagcagcaccccgccggcggcggcggcggcggcggcagcccctacgcccacatgggcagctaccagtaccaggccagcggcctgaacaacgtgccctacagcgccaagagcagctacgacctgggctacaccgccgcctacaccagctacgccccctacggcaccagcagcagccccgccaacaacgagcccgagaaggaggacctggagcccgagatcagaatcgtgaacggcaagcccaagaaggtgagaaagcccagaaccatctacagcagcttccagctggccgccctgcagagaagattccagaagacccagtacctggccctgcccgagagagccgagctggccgccagcctgggcctgacccagacccaggtgggcctggccccctgcagaggcgaggagagcgccggcctgagatggctgggcagcagaagagtgtag

SEQ ID NO: 146085 - DNA, 2453 bp, Artificial Sequence
  derived and/or modified sequence
agacaatcgtaaagccgctcggggccgctcacctgctcccgcctcccagagccccgacccggcccagccacccctgccccctccactgcccgccccccgccagagcccgcgctcgcgctgggcaaggagccgagcgggcccagaggccgaaagaggatgcgaccagaggcagctgtcccgagcagcgcacggtgatcgcctcccccggaggaggaggcgcctagacggttgcctcctttcttgtttccccaccaccacccccgtaattacattggctgctggaggggaccgggagagacagaggaggcgcctggcttcccccgcacgcccgccacctctgctctttcccgtctcgggccaggatgactggagtctttgacagtctagtggctgatatgcactcgacccagatcgccgcctccagcacgtaccaccagcaccagcagcccccgagcggcggcggcgccggcccgggtggcaacagcagcagcagcagcagcctccacaagccccaggagtcgcccacccttccggtgtccaccgccaccgacagcagctactacaccaaccagcagcacccggcgggcggcggcggcggcgggggctcgccctacgcgcacatgggttcctaccagtaccaagccagcggcctcaacaacgtcccttactccgccaagagcagctatgacctgggctacaccgccgcctacacctcctacgctccctatggaaccagttcgtccccagccaacaacgagcctgagaaggaggaccttgagcctgaaattcggatagtgaacgggaagccaaagaaagtccggaaaccccgcaccatctactccagtttccagctggcggctcttcagcggcgtttccaaaagactcaatacttggccttgccggagcgagccgagctggcggcctctctgggcctcacccagactcaggtcaaaatctggttccagaaccgccggtccaagttcaagaagatgtggaaaagtggtgagatcccctcggagcagcaccctggggccagcgcttctccaccttgtgcttcgccgccagtctcagcgccggcctcctgggactttggtgtgccgcagcggatggcgggcggcggtggtccgggcagtggcggcagcggcgccggcagctcgggctccagcccgagcagcgcggcctcggcttttctgggcaactacccctggtaccaccagacctcgggatccgcctcacacctgcaggccacggcgccgctgctgcaccccactcagaccccgcagccgcatcaccaccaccaccatcacggcggcgggggcgccccggtgagcgcggggacgattttctaaccccagggagaactcgccagagactgagagcagagaccacttatcctcattgcttaccccgagccggggttccctcctcccggcccgctgccgccacccacctctcctgcaggctgcgacctgcagtggcccgtctcaggccctgctcactcccggggccaccaaacgggcccctctctcgggggaaccggacagcagcttggcaaaggcctccctaaaaggccgcatttctgacctgagccccgggtctcggctgtttcgagccccgcctcggacttgccttccctcccctccgggtgagcctgtctggcgccttcctcgccccgggctgagagctgggtcccgggagatggaagcctcccaggcgcgcgaggcttcccgggcgctctgaggcttctttctcctcgcccgctcccctgggctcagctcggacgctgcagttattgacctcccggtcccgcctgcccgccctcccccacgtggccccttgacccgggcggccccgccgcttctttccttcctgcagttcccagccctcggagcccccatcccttatcttacccccaccgcgctcccccaggagcgctccctcagctctctcctcatccatcaccagtggagtttttttatttgttatttttttaaaagtttaggtgcctttgcggatgacctcattttgacgttgaaaaaatgattttttaatatgtgaacactgcaaaaatgtgtttaaattatcttttttaaaacctattcaggattattagcctggacttggacacagagtttgtaaataaaggtgtctgtgcagattttcccactgatttatttgtataaaaatactcatcttttcagacttttttgtaaacccccagttgtgaaaactgcagtttagcagtgacctcagcaacccctcctttttattttttcctttaaaaacatttcagttaaattaagctactgatttggatttgttttatcgtatcctaaagtctttgttgttgaaatgaaaggtattttggggttatttattatgaaaacaacatgctcttaatgttgattttacaatatgaagagattatttaaataaattattgttttcattgg

SEQ ID NO: 146086 - DNA, 1852 bp, Artificial Sequence
  derived and/or modified sequence
agacaatcgtaaagccgctcggggccgctcacctgctcccgcctcccagagccccgacccggcccagccacccctgccccctccactgcccgccccccgccagagcccgcgctcgcgctgggcaaggagccgagcgggcccagaggccgaaagaggatgcgaccagaggcagctgtcccgagcagcgcacggtgatcgcctcccccggaggaggaggcgcctagacggttgcctcctttcttgtttccccaccaccacccccgtaattacattggctgctggaggggaccgggagagacagaggaggcgcctggcttcccccgcacgcccgccacctctgctctttcccgtctcgggccaggatgactggagtctttgacagtctagtggctgatatgcactcgacccagatcgccgcctccagcacgtaccaccagcaccagcagcccccgagcggcggcggcgccggcccgggtggcaacagcagcagcagcagcagcctccacaagccccaggagtcgcccacccttccggtgtccaccgccaccgacagcagctactacaccaaccagcagcacccggcgggcggcggcggcggcgggggctcgccctacgcgcacatgggttcctaccagtaccaagccagcggcctcaacaacgtcccttactccgccaagagcagctatgacctgggctacaccgccgcctacacctcctacgctccctatggaaccagttcgtccccagccaacaacgagcctgagaaggaggaccttgagcctgaaattcggatagtgaacgggaagccaaagaaagtccggaaaccccgcaccatctactccagtttccagctggcggctcttcagcggcgtttccaaaagactcaatacttggccttgccggagcgagccgagctggcggcctctctgggcctcacccagactcaggtggggctcgcgccctgcaggggcgaggagagcgcgggcctgagatggctgggaagcaggcgggtttaggacaatgctttttaaagttcattttaagtacttttaaggatttccaggcctgcgcctcgagcggccctaagtaagcttctaggcccaaagctggaaacccccaaggggccgccgtgggagggaaggaaagggaccgggtggacagaaatcccgtacctctcgctactgattaagcgggtgaaataactggccctcctcaccctcccgctgtcaccatcatcacagtgcacgtacaccagcagtcctggccttttggcaattacctccccagggagcaggaaccggcagagcctcgaaggccgccgcccgtgatcctcttatctccccagggcgctcgctgcccaccgctagccagcggtttttctctgccttcttttttctcctcttcgaacccctactgccccaagactaggttcctccactaatgctcaggtctttttcctcaaaggtcaaaatctggttccagaaccgccggtccaagttcaagaagatgtggaaaagtggtgagatcccctcggagcagcaccctggggccagcgcttctccaccttgtgcttcgccgccagtctcagcgccggcctcctgggactttggtgtgccgcagcggatggcgggcggcggtggtccgggcagtggcggcagcggcgccggcagctcgggctccagcccgagcagcgcggcctcggcttttctgggcaactacccctggtaccaccagacctcgggatccgcctcacacctgcaggccacggcgccgctgctgcaccccactcagaccccgcagccgcatcaccaccaccaccatcacggcggcgggggcgccccggtgagcgcgg

SEQ ID NO: 146087 - DNA, 987 bp, Artificial Sequence
  derived and/or modified sequence
atgaccggcgtgttcgacagcctggtggccgacatgcacagcacccagatcgccgccagcagcacctaccaccagcaccagcagccccccagcggcggcggcgccggccccggcggcaacagcagcagcagcagcagcctgcacaagccccaggagagccccaccctgcccgtgagcaccgccaccgacagcagctactacaccaaccagcagcaccccgccggcggcggcggcggcggcggcagcccctacgcccacatgggcagctaccagtaccaggccagcggcctgaacaacgtgccctacagcgccaagagcagctacgacctgggctacaccgccgcctacaccagctacgccccctacggcaccagcagcagccccgccaacaacgagcccgagaaggaggacctggagcccgagatcagaatcgtgaacggcaagcccaagaaggtgagaaagcccagaaccatctacagcagcttccagctggccgccctgcagagaagattccagaagacccagtacctggccctgcccgagagagccgagctggccgccagcctgggcctgacccagacccaggtgaagatctggttccagaacagaagaagcaagttcaagaagatgtggaagagcggcgagatccccagcgagcagcaccccggcgccagcgccagccccccctgcgccagcccccccgtgagcgcccccgccagctgggacttcggcgtgccccagagaatggccggcggcggcggccccggcagcggcggcagcggcgccggcagcagcggcagcagccccagcagcgccgccagcgccttcctgggcaactacccctggtaccaccagaccagcggcagcgccagccacctgcaggccaccgcccccctgctgcaccccacccagaccccccagccccaccaccaccaccaccaccacggcggcggcggcgcccccgtgagcgccggcaccatcttctag

SEQ ID NO: 146088 - protein, 1785 aa, Artificial Sequence
  derived and/or modified sequence
MGISTVILEMCLLWGQVLSTGGWIPRTTDYASLIPSEVPLDPTVAEGSPFPSESTLESTVAEGSPISLESTLESTVAEGSLIPSESTLESTVAEGSDSGLALRLVNGDGRCQGRVEILYRGSWGTVCDDSWDTNDANVVCRQLGCGWAMSAPGNAWFGQGSGPIALDDVRCSGHESYLWSCPHNGWLSHNCGHGEDAGVICSAAQPQSTLRPESWPVRISPPVPTEGSESSLALRLVNGGDRCRGRVEVLYRGSWGTVCDDYWDTNDANVVCRQLGCGWAMSAPGNAQFGQGSGPIVLDDVRCSGHESYLWSCPHNGWLTHNCGHSEDAGVICSAPQSRPTPSPDTWPTSHASTAGPESSLALRLVNGGDRCQGRVEVLYRGSWGTVCDDSWDTSDANVVCRQLGCGWATSAPGNARFGQGSGPIVLDDVRCSGYESYLWSCPHNGWLSHNCQHSEDAGVICSAAHSWSTPSPDTLPTITLPASTVGSESSLALRLVNGGDRCQGRVEVLYQGSWGTVCDDSWDTNDANVVCRQLGCGWAMSAPGNARFGQGSGPIVLDDVRCSGHESYLWSCPHNGWLSHNCGHSEDAGVICSASQSRPTPSPDTWPTSHASTAGSESSLALRLVNGGDRCQGRVEVLYRGSWGTVCDDYWDTNDANVVCRQLGCGWAMSAPGNARFGQGSGPIVLDDVRCSGHESYLWSCPHNGWLSHNCGHHEDAGVICSASQSQPTPSPDTWPTSHASTAGSESSLALRLVNGGDRCQGRVEVLYRGSWGTVCDDYWDTNDANVVCRQLGCGWATSAPGNARFGQGSGPIVLDDVRCSGHESYLWSCPHNGWLSHNCGHHEDAGVICSASQSQPTPSPDTWPTSRASTAGSESTLALRLVNGGDRCRGRVEVLYQGSWGTVCDDYWDTNDANVVCRQLGCGWAMSAPGNAQFGQGSGPIVLDDVRCSGHESYLWSCPHNGWLSHNCGHHEDAGVICSAAQSQSTPRPDTWLTTNLPALTVGSESSLALRLVNGGDRCRGRVEVLYRGSWGTVCDDSWDTNDANVVCRQLGCGWAMSAPGNARFGQGSGPIVLDDVRCSGNESYLWSCPHKGWLTHNCGHHEDAGVICSATQINSTTTDWWHPTTTTTARPSSNCGGFLFYASGTFSSPSYPAYYPNNAKCVWEIEVNSGYRINLGFSNLKLEAHHNCSFDYVEIFDGSLNSSLLLGKICNDTRQIFTSSYNRMTIHFRSDISFQNTGFLAWYNSFPSDATLRLVNLNSSYGLCAGRVEIYHGGTWGTVCDDSWTIQEAEVVCRQLGCGRAVSALGNAYFGSGSGPITLDDVECSGTESTLWQCRNRGWFSHNCNHREDAGVICSGNHLSTPAPFLNITRPNTDYSCGGFLSQPSGDFSSPFYPGNYPNNAKCVWDIEVQNNYRVTVIFRDVQLEGGCNYDYIEVFDGPYRSSPLIARVCDGARGSFTSSSNFMSIRFISDHSITRRGFRAEYYSSPSNDSTNLLCLPNHMQASVSRSYLQSLGFSASDLVISTWNGYYECRPQITPNLVIFTIPYSGCGTFKQADNDTIDYSNFLTAAVSGGIIKRRTDLRIHVSCRMLQNTWVDTMYIANDTIHVANNTIQVEEVQYGNFDVNISFYTSSSFLYPVTSRPYYVDLNQDLYVQAEILHSDAVLTLFVDTCVASPYSNDFTSLTYDLIRSGCVRDDTYGPYSSPSLRIARFRFRAFHFLNRFPSVYLRCKMVVCRAYDPSSRCYRGCVLRSKRDVGSYQEKVDVVLGPIQLQTPPRREEEPR

SEQ ID NO: 146089 - DNA, 5358 bp, Artificial Sequence
  derived and/or modified sequence
atgggcatcagcaccgtgatcctggagatgtgcctgctgtggggccaggtgctgagcaccggcggctggatccccagaaccaccgactacgccagcctgatccccagcgaggtgcccctggaccccaccgtggccgagggcagccccttccccagcgagagcaccctggagagcaccgtggccgagggcagccccatcagcctggagagcaccctggagagcaccgtggccgagggcagcctgatccccagcgagagcaccctggagagcaccgtggccgagggcagcgacagcggcctggccctgagactggtgaacggcgacggcagatgccagggcagagtggagatcctgtacagaggcagctggggcaccgtgtgcgacgacagctgggacaccaacgacgccaacgtggtgtgcagacagctgggctgcggctgggccatgagcgcccccggcaacgcctggttcggccagggcagcggccccatcgccctggacgacgtgagatgcagcggccacgagagctacctgtggagctgcccccacaacggctggctgagccacaactgcggccacggcgaggacgccggcgtgatctgcagcgccgcccagccccagagcaccctgagacccgagagctggcccgtgagaatcagcccccccgtgcccaccgagggcagcgagagcagcctggccctgagactggtgaacggcggcgacagatgcagaggcagagtggaggtgctgtacagaggcagctggggcaccgtgtgcgacgactactgggacaccaacgacgccaacgtggtgtgcagacagctgggctgcggctgggccatgagcgcccccggcaacgcccagttcggccagggcagcggccccatcgtgctggacgacgtgagatgcagcggccacgagagctacctgtggagctgcccccacaacggctggctgacccacaactgcggccacagcgaggacgccggcgtgatctgcagcgccccccagagcagacccacccccagccccgacacctggcccaccagccacgccagcaccgccggccccgagagcagcctggccctgagactggtgaacggcggcgacagatgccagggcagagtggaggtgctgtacagaggcagctggggcaccgtgtgcgacgacagctgggacaccagcgacgccaacgtggtgtgcagacagctgggctgcggctgggccaccagcgcccccggcaacgccagattcggccagggcagcggccccatcgtgctggacgacgtgagatgcagcggctacgagagctacctgtggagctgcccccacaacggctggctgagccacaactgccagcacagcgaggacgccggcgtgatctgcagcgccgcccacagctggagcacccccagccccgacaccctgcccaccatcaccctgcccgccagcaccgtgggcagcgagagcagcctggccctgagactggtgaacggcggcgacagatgccagggcagagtggaggtgctgtaccagggcagctggggcaccgtgtgcgacgacagctgggacaccaacgacgccaacgtggtgtgcagacagctgggctgcggctgggccatgagcgcccccggcaacgccagattcggccagggcagcggccccatcgtgctggacgacgtgagatgcagcggccacgagagctacctgtggagctgcccccacaacggctggctgagccacaactgcggccacagcgaggacgccggcgtgatctgcagcgccagccagagcagacccacccccagccccgacacctggcccaccagccacgccagcaccgccggcagcgagagcagcctggccctgagactggtgaacggcggcgacagatgccagggcagagtggaggtgctgtacagaggcagctggggcaccgtgtgcgacgactactgggacaccaacgacgccaacgtggtgtgcagacagctgggctgcggctgggccatgagcgcccccggcaacgccagattcggccagggcagcggccccatcgtgctggacgacgtgagatgcagcggccacgagagctacctgtggagctgcccccacaacggctggctgagccacaactgcggccaccacgaggacgccggcgtgatctgcagcgccagccagagccagcccacccccagccccgacacctggcccaccagccacgccagcaccgccggcagcgagagcagcctggccctgagactggtgaacggcggcgacagatgccagggcagagtggaggtgctgtacagaggcagctggggcaccgtgtgcgacgactactgggacaccaacgacgccaacgtggtgtgcagacagctgggctgcggctgggccaccagcgcccccggcaacgccagattcggccagggcagcggccccatcgtgctggacgacgtgagatgcagcggccacgagagctacctgtggagctgcccccacaacggctggctgagccacaactgcggccaccacgaggacgccggcgtgatctgcagcgccagccagagccagcccacccccagccccgacacctggcccaccagcagagccagcaccgccggcagcgagagcaccctggccctgagactggtgaacggcggcgacagatgcagaggcagagtggaggtgctgtaccagggcagctggggcaccgtgtgcgacgactactgggacaccaacgacgccaacgtggtgtgcagacagctgggctgcggctgggccatgagcgcccccggcaacgcccagttcggccagggcagcggccccatcgtgctggacgacgtgagatgcagcggccacgagagctacctgtggagctgcccccacaacggctggctgagccacaactgcggccaccacgaggacgccggcgtgatctgcagcgccgcccagagccagagcacccccagacccgacacctggctgaccaccaacctgcccgccctgaccgtgggcagcgagagcagcctggccctgagactggtgaacggcggcgacagatgcagaggcagagtggaggtgctgtacagaggcagctggggcaccgtgtgcgacgacagctgggacaccaacgacgccaacgtggtgtgcagacagctgggctgcggctgggccatgagcgcccccggcaacgccagattcggccagggcagcggccccatcgtgctggacgacgtgagatgcagcggcaacgagagctacctgtggagctgcccccacaagggctggctgacccacaactgcggccaccacgaggacgccggcgtgatctgcagcgccacccagatcaacagcaccaccaccgactggtggcaccccaccaccaccaccaccgccagacccagcagcaactgcggcggcttcctgttctacgccagcggcaccttcagcagccccagctaccccgcctactaccccaacaacgccaagtgcgtgtgggagatcgaggtgaacagcggctacagaatcaacctgggcttcagcaacctgaagctggaggcccaccacaactgcagcttcgactacgtggagatcttcgacggcagcctgaacagcagcctgctgctgggcaagatctgcaacgacaccagacagatcttcaccagcagctacaacagaatgaccatccacttcagaagcgacatcagcttccagaacaccggcttcctggcctggtacaacagcttccccagcgacgccaccctgagactggtgaacctgaacagcagctacggcctgtgcgccggcagagtggagatctaccacggcggcacctggggcaccgtgtgcgacgacagctggaccatccaggaggccgaggtggtgtgcagacagctgggctgcggcagagccgtgagcgccctgggcaacgcctacttcggcagcggcagcggccccatcaccctggacgacgtggagtgcagcggcaccgagagcaccctgtggcagtgcagaaacagaggctggttcagccacaactgcaaccacagagaggacgccggcgtgatctgcagcggcaaccacctgagcacccccgcccccttcctgaacatcaccagacccaacaccgactacagctgcggcggcttcctgagccagcccagcggcgacttcagcagccccttctaccccggcaactaccccaacaacgccaagtgcgtgtgggacatcgaggtgcagaacaactacagagtgaccgtgatcttcagagacgtgcagctggagggcggctgcaactacgactacatcgaggtgttcgacggcccctacagaagcagccccctgatcgccagagtgtgcgacggcgccagaggcagcttcaccagcagcagcaacttcatgagcatcagattcatcagcgaccacagcatcaccagaagaggcttcagagccgagtactacagcagccccagcaacgacagcaccaacctgctgtgcctgcccaaccacatgcaggccagcgtgagcagaagctacctgcagagcctgggcttcagcgccagcgacctggtgatcagcacctggaacggctactacgagtgcagaccccagatcacccccaacctggtgatcttcaccatcccctacagcggctgcggcaccttcaagcaggccgacaacgacaccatcgactacagcaacttcctgaccgccgccgtgagcggcggcatcatcaagagaagaaccgacctgagaatccacgtgagctgcagaatgctgcagaacacctgggtggacaccatgtacatcgccaacgacaccatccacgtggccaacaacaccatccaggtggaggaggtgcagtacggcaacttcgacgtgaacatcagcttctacaccagcagcagcttcctgtaccccgtgaccagcagaccctactacgtggacctgaaccaggacctgtacgtgcaggccgagatcctgcacagcgacgccgtgctgaccctgttcgtggacacctgcgtggccagcccctacagcaacgacttcaccagcctgacctacgacctgatcagaagcggctgcgtgagagacgacacctacggcccctacagcagccccagcctgagaatcgccagattcagattcagagccttccacttcctgaacagattccccagcgtgtacctgagatgcaagatggtggtgtgcagagcctacgaccccagcagcagatgctacagaggctgcgtgctgagaagcaagagagacgtgggcagctaccaggagaaggtggacgtggtgctgggccccatccagctgcagaccccccccagaagagaggaggagcccagatag

SEQ ID NO: 146090 - DNA, 5802 bp, Artificial Sequence
  derived and/or modified sequence
tttatagcagcagtagaaatataccaccctagaggacacacctccttttagctaggtacctataaatgtccaggattttctattcaattgagaagaacccagcaaaatggggatctccacagtcatccttgaaatgtgtcttttatggggacaagttctatctacaggtgggtggatcccaaggactacagactacgcttcactgattccctcggaggtgcccttggatccaactgtagcagaaggttctccatttccctcggagtcgaccctggagtcaactgtagcagaaggttctccgatttccttggagtcaaccctggagtcaaccgtagcagaaggttctctgattccctcagagtcaaccctggagtcaactgtagcagaaggatctgattctggtttggccctgaggctggtgaatggagatggcaggtgtcagggccgagtggagatcctataccgaggctcctggggcaccgtgtgtgatgacagctgggacaccaatgatgccaacgtggtctgtaggcagctgggttgtggctgggccatgtcagctccaggaaatgcctggtttggccagggctcaggacccattgccctggatgatgtgcgctgctcaggacacgaatcctacctgtggagctgcccccacaatggctggctctcccataactgtggccatggtgaagatgctggtgttatctgctcagctgcccagcctcagtcaacactcaggccagaaagttggcctgtcaggatatcaccacctgtacccacagaaggatctgaatccagtttggccctgaggctggtgaatggaggcgacaggtgtcgaggccgagtggaggtcctataccgaggctcctggggcaccgtgtgtgatgactactgggacaccaatgatgccaatgtggtctgcaggcagctgggctgtggctgggccatgtcagccccaggaaatgcccagtttggccagggctcaggacccattgtcctggatgatgtgcgctgctcaggacatgagtcctacctgtggagctgcccccacaatggctggctcacccacaactgtggccatagtgaagacgctggtgtcatctgctcagctccccagtcccggccgacacccagcccagatacttggccgacctcacatgcatcaacagcaggacctgaatccagtttggccctgaggctggtgaatggaggtgacaggtgtcagggccgagtggaggtcctataccgaggctcctggggcaccgtgtgtgatgatagctgggacaccagtgacgccaatgtggtctgccggcagctgggctgtggctgggccacgtcagccccaggaaatgcccggtttggccagggttcaggacccattgtcctggatgacgtgcgctgctcaggctatgagtcctacctgtggagctgcccccacaatggctggctctcccataactgtcagcacagtgaagacgctggtgtcatctgctcagctgcccactcctggtcgacgcccagtccagacacattgccgaccatcaccttgcctgcatcgacagtaggatctgaatccagtttggccctgaggctggtgaatggaggtgacaggtgtcagggccgagtggaggtcctataccaaggctcctggggcaccgtgtgcgatgacagctgggacaccaatgatgccaatgtcgtctgcaggcaactgggctgtggctgggccatgtcagccccaggaaatgcccggtttggtcagggctcaggacccattgtcctggatgatgtgcgctgctcaggacacgagtcttacctgtggagctgcccccacaatggctggctctcccacaactgtggccatagtgaagacgctggtgtcatctgctcagcttcccagtcccggccaacacctagtccagacacttggccaacctcacatgcatcaacagcaggatctgaatccagtttggccctgaggctggtgaatggaggtgacaggtgtcagggccgagtggaggtcctataccgaggctcctggggcaccgtgtgtgatgactactgggacaccaatgatgccaatgtggtttgcaggcagctgggctgtggctgggccatgtcagccccaggaaatgcccggtttggccagggttcaggacccattgtcctggatgatgtgcgctgctcaggacatgagtcctatctgtggagctgcccccacaatggctggctctcccacaactgtggccatcatgaagacgctggtgtcatctgctcagcttcccagtcccagccgacacccagcccagacacttggccaacctcacatgcatcaacagcaggatctgaatccagtttggccctgaggctggtgaatggaggtgacaggtgtcagggccgagtggaggtcctataccgaggctcctggggcaccgtgtgtgatgactactgggacaccaatgatgccaatgtggtttgcaggcagctgggctgtggctgggccacgtcagccccaggaaatgcccggtttggccagggttcaggacccattgtcctggatgatgtgcgctgctcaggacatgagtcctatctgtggagctgcccccacaatggctggctctcccacaactgtggccatcatgaagacgctggtgtcatctgctcagcttcccagtcccagccgacacccagcccagacacttggccaacctctcgtgcatcaacagcaggatctgaatccactttggccctgagactggtgaatggaggtgacaggtgtcgaggccgagtggaggtcctataccaaggctcctggggcaccgtgtgtgatgactactgggacaccaatgatgccaacgtggtctgcaggcagctgggctgtggctgggccatgtcagccccaggaaatgcccagtttggccagggctcaggacccattgtcctggatgatgtgcgctgctcaggacacgagtcttacctgtggagctgcccccacaatggctggctctcccacaactgtggccatcatgaagatgctggtgtcatctgctcagctgctcagtcccagtcaacgcccaggccagatacttggctgaccaccaacttaccggcattgacagtaggatctgaatccagtttggctctgaggctggtgaatggaggtgacaggtgtcgaggccgagtggaggtcctgtatcgaggctcctggggaaccgtgtgtgatgacagctgggacaccaatgatgccaatgtggtctgcaggcagctgggctgtggctgggccatgtcggccccaggaaatgcccggtttggccagggctcaggacccattgtcctggatgatgtgcgctgctcagggaatgagtcctacctgtggagctgcccccacaaaggctggctcacccacaactgtggccatcacgaagacgctggtgtcatctgctcagccacccaaataaattctactacgacagattggtggcatccaacaactacaaccactgcaagaccctcttcaaattgtggtggcttcttattctatgccagtgggacattctccagcccatcctaccctgcatactaccccaacaatgctaagtgtgtttgggaaatagaagtgaattctggttatcgcataaacctgggcttcagtaatctgaaattggaggcacaccataactgcagttttgattatgttgaaatctttgatggatcattgaatagcagtctcctgctggggaaaatctgtaatgataccaggcaaatatttacatcttcttacaaccgaatgaccattcactttcgaagtgacatcagtttccaaaacactggctttttggcttggtataactccttcccaagcgatgccaccttgaggttggtcaatttaaattcatcctatggtctatgtgccgggcgtgtagaaatttaccatggtggcacctgggggacagtttgtgatgactcctggaccattcaggaagctgaggtggtctgcagacagctagggtgtggacgtgcagtttcagcccttggaaatgcatattttggctctggctctggccccatcaccctggacgatgtagagtgctcagggacggaatccactctctggcagtgccggaaccgaggctggttctcccacaactgtaatcatcgtgaagatgctggtgtcatctgctcaggaaaccatctatcgacacctgctccttttctcaacatcacccgtccaaacacagattattcctgcggaggcttcctatcccaaccatcaggggacttttccagcccattctatcccgggaactatccaaacaatgccaagtgtgtgtgggacattgaggtgcaaaacaactaccgtgtgactgtgatcttcagagatgtccagcttgaaggtggctgcaactatgattatattgaagttttcgatggcccctaccgcagttcccctctcattgctcgagtttgtgatggggccagaggctccttcacttcttcctccaacttcatgtccattcgcttcatcagtgaccacagcatcacaaggagagggttccgggctgagtactactccagtccctccaatgacagcaccaacctgctctgtctgccaaatcacatgcaagccagtgtgagcaggagctatctccaatccttgggcttttctgccagtgaccttgtcatttccacctggaatggatactacgagtgtcggccccagataacgccgaacctggtgatattcacaattccctactcaggctgcggcaccttcaagcaggcagacaatgacaccatcgactattccaacttcctcacagcagctgtctcaggtggcatcatcaagaggaggacagacctccgtattcacgtcagctgcagaatgcttcagaacacctgggtcgacaccatgtacattgctaatgacaccatccacgttgctaataacaccatccaggtcgaggaagtccagtatggcaattttgacgtgaacatttccttttatacttcctcatctttcttgtatcctgtgaccagccgcccttactacgtggacctgaaccaggacttgtacgttcaggctgaaatcctccattctgatgctgtactgaccttgtttgtggacacctgcgtggcatcaccatactccaatgacttcacgtctttgacttatgatctaatccggagtggatgcgtgagggatgacacctacggaccctactcctcgccatctcttcgcattgcccgcttccggttcagggccttccacttcctgaaccgcttcccctccgtgtacctgcgttgtaaaatggtggtgtgcagagcgtatgacccctcttcccgctgctaccgaggctgtgtgttgaggtcgaagagggatgtgggctcctaccaggaaaaggtggacgtcgtcctgggtcccatccagctgcagacccccccacgccgagaagaggagcctcggtaggtggtcgctctcagaccccactgtccaccggggcgcagacccctgactcggggacttgggatgttcctcttggtgtcatattccaactcagattgagccctacattgtgctgcacctggtcatacggagttgaatcagacctggttcccgcctcccccaaggctcatggtccttggaggacccgttgcagggtgaggtcaagagagttctgacctggatggcccatagacctgacgtcccagaatccatgcttctcatctgcaaaatgaaaatgtcaatacttacttcttagcactgttgagagggttacttacataaaggaattttggtgaaactgc

SEQ ID NO: 146091 - DNA, 5358 bp, Artificial Sequence
  derived and/or modified sequence
atgggcatctctacggtcatccttgagatgtgtcttctttggggacaggtactaagtacaggcggctggattccccgaacaaccgactacgcctcactgattccaagcgaagtacctcttgatcctactgttgccgagggatcccccttccctagtgagtccaccttagaatccaccgttgccgaggggtcccctatctcacttgagtctaccctagaaagcaccgtggccgaaggatccctaataccaagtgagagtactttggaatccacagtggccgaaggatccgactctggactcgctctccgcctggtcaatggagacgggcggtgccagggcagagtggaaatactgtaccggggatcctggggcactgtctgtgacgatagctgggacaccaacgacgccaatgtggtgtgcaggcagcttggttgcggttgggcaatgagcgcacccggaaacgcctggttcgggcaggggagtggtcctattgctctggatgatgtgcgatgttcaggacatgaatcttacctgtggtcgtgcccacacaatggttggctctcccataattgcgggcacggagaagatgccggcgtgatttgcagcgcagctcagccacagtctaccctgcgcccagagagctggcctgtgcggatctctccccctgtgcccactgaagggagcgaatcgtcactggctctcaggctggtaaacgggggggacaggtgcagagggcgcgtcgaagtcttgtacaggggctcttggggtaccgtttgcgacgattattgggacaccaacgacgcaaacgtcgtttgccgacaacttggctgcggctgggctatgagtgcccccgggaacgcacagtttgggcagggaagcgggcctattgtcctggacgatgtcagatgtagtggacacgagtcctacctatggagttgcccgcataacggatggctgacccacaattgtggacactccgaagacgctggtgtcatttgctcagccccccaaagcagaccaacaccatcacctgacacttggcccactagccatgctagtaccgccggccccgaatcgtcactcgccctccgtctggtaaacggaggggacagatgtcaggggcgcgtagaagtcctgtatagaggaagttgggggaccgtatgcgacgactcatgggacacaagtgatgccaacgtggtatgccgccagctggggtgtggttgggcaacatccgctcctggaaacgcaagatttgggcaaggctcaggaccaatcgtactggacgatgtgaggtgttccggctatgagtcctacctgtggtcgtgcccccataacggttggctatcccacaactgccagcacagtgaagacgccggggtgatttgtagtgctgctcactcatggtccacaccgtcccctgacaccctgcccaccatcacacttcccgcatctaccgtcggcagtgagagtagcctagctttacggctcgttaacggcggagacaggtgtcagggacgcgtcgaggtactgtaccagggttcctgggggactgtttgtgacgattcctgggacactaatgacgcgaatgtcgtatgtcggcagctgggatgtggctgggccatgtccgctcccggcaatgcacgcttcggccagggctcgggtcccattgttctggacgatgtgcgatgtagtggccatgagagctacctttggagttgtccacacaacggctggttgagtcacaattgcggacactccgaggatgcaggagttatttgttctgcaagccagtcacgccctacccccagtccagatacttggcctaccagtcacgcttcaacagcgggttccgaatcgagtctggctctgagactggtgaacggcggggacaggtgccagggcagagtcgaggtgctgtaccggggatcttgggggaccgtgtgtgatgattactgggatactaatgatgctaatgtggtttgcagacagctgggatgtggctgggctatgtccgcacccggaaatgctcgtttcgggcagggctccggccctattgtcctcgacgacgtccggtgctcaggtcatgagtcttatctgtggtcctgtccacataatgggtggctctcgcataactgtggtcatcacgaagatgccggtgttatctgttctgccagccagtcccagcccacgccgagtcctgacacatggccaactagtcatgcgtctacagctggctcggagtcatctctggctctgcgtctcgtgaatggaggagacagatgtcaggggagagtagaagtactctacaggggcagctgggggacagtatgcgatgactattgggatacgaacgatgcgaacgtcgtttgcaggcagctcggctgtggttgggctacttccgccccgggaaacgcacggttcgggcagggctcaggacccatcgtcctagacgacgtcaggtgtagcggtcacgaatcctatctttggagctgtccgcataatggttggttgtcgcacaattgcgggcatcatgaagacgctggtgtgatttgttctgcttcacagagccagccgacaccaagccccgacacatggcccacttcacgggcctctaccgccgggtcagaatccactctggctctcaggttagtgaatggcggcgacaggtgtcgagggcgggttgaggtgctctaccaagggtcctggggaacagtttgtgatgactactgggatacaaacgatgccaatgtcgtgtgtcggcagctgggctgtggatgggccatgtccgcaccgggtaacgcccagttcgggcagggttctggtccgattgtcttagacgacgttcgttgcagcggccacgaaagttatttgtggtcctgcccacacaacggttggttatctcacaattgcggacaccacgaggatgctggggtgatttgcagtgctgctcaatcccagagcactccaagacccgacacttggctgacaacaaaccttcctgcactgaccgtcggctccgagtcgagtctggccttgcgccttgtgaatgggggagaccgctgccggggccgggtagaagttctgtaccgaggatcgtggggcacagtgtgtgacgattcgtgggacacgaacgacgcaaacgtggtgtgccgtcagctgggatgtggatgggctatgagcgcccccggaaatgctagattcggacagggttctgggccgattgtgcttgatgatgttagatgcagtggaaacgagagctatctctggtcttgtcctcataaaggctggcttacacacaattgcggccatcacgaggatgctggcgtgatttgcagcgctacccagataaattctaccaccactgattggtggcacccgactaccaccactaccgcccgccctagttccaactgcgggggtttcctgttctatgcctccggtactttctcttcgcctagctacccagcatactatcctaataatgccaaatgcgtgtgggagattgaggtgaattcaggatataggatcaatttaggttttagtaacctgaaattggaagctcaccacaattgtagcttcgactacgtggagatcttcgacggctctctgaattctagccttctgctcgggaagatttgtaatgacacgcgtcagatattcaccagtagttacaatagaatgacaatccacttcagatctgacatctctttccagaataccggatttctcgcttggtataactctttccccagtgatgccaccctacgactagtgaacttaaacagcagctatgggctgtgcgccggtcgcgtcgagatctatcacggaggcacatggggcactgtatgcgacgactcctggactattcaagaagccgaggtggtttgcagacagttgggctgcggaagggcagtctccgctttgggtaacgcttacttcggatctggaagtggacccattaccttggatgatgtggagtgtagcggaacagaaagcacgctgtggcagtgccggaatagaggttggttcagccacaattgtaaccacagggaggacgcaggcgtaatctgctcaggcaaccatctctctacaccagcccctttcctcaacatcactcggcctaatacagattactcctgcggtgggttcctgtcccagccgagcggcgacttctcttcgccattttaccccggaaactatcccaataatgcaaagtgcgtttgggatattgaggttcagaacaattatcgcgtcaccgttatcttccgggacgtgcagctggagggtgggtgcaactatgactacatcgaagtgttcgatggtccttaccggtcaagtcctctaatagcccgggtgtgtgacggggcgaggggatcttttacttctagttccaatttcatgtctattaggttcattagcgatcacagtattaccagaagaggattcagggcagaatactattcgagccctagtaacgattccactaacttgctctgcttacccaatcacatgcaggccagcgtatcacggtcctatctgcagagcctcgggttctccgcctctgacctggtgatatctacttggaacggctactacgaatgtaggcctcagattactcccaatctagtaattttcacaattccctatagtggctgtgggacattcaagcaggctgacaatgataccatcgattactcaaacttcttgaccgcagcggtatcaggggggataatcaagagaaggactgaccttaggattcatgtctcctgcagaatgctacaaaacacttgggtcgataccatgtatatcgctaacgataccattcacgtggcaaataacaccatacaggtagaggaggtccagtacggaaatttcgatgtgaacatcagcttctacaccagctccagctttctgtaccccgtgacatccaggccctactacgtggatcttaaccaggacctgtacgtgcaagctgaaatacttcattccgacgcagttcttacgctcttcgtcgatacatgcgttgcttctccctactctaatgatttcacaagcctcacctacgatttgatccgttccgggtgcgtcagagatgacacctacggaccatatagttccccttcactcagaatagcccggttccgttttcgtgctttccattttctcaacaggtttccgtccgtctaccttagatgcaaaatggtggtctgtcgtgcatatgatcccagctccagatgttacagggggtgcgtgctgcgcagtaagcgggacgtgggcagttatcaggagaaagtggacgttgtgctggggccaatccagctacagacccctccccgacgagaggaggagccacgctag

SEQ ID NO: 146092 - DNA, 5358 bp, Artificial Sequence
  derived and/or modified sequence
atgggcatatctacagttatcttagagatgtgtctgttgtgggggcaggttctgagtaccggagggtggatcccgcggacgaccgactatgccagcctcatcccatccgaagtacctctggatcccaccgtggcagaaggaagtccttttccgtctgaatccactcttgagagcaccgtggccgagggaagccccatctcccttgagagcacacttgagagcactgtggcggagggtagccttattccaagtgagagcaccttggagtcaacggttgccgaaggctccgacagcggattggccctaagactggtcaacggagatggtcgctgtcaggggagagtggaaatactataccgggggtcctggggtaccgtatgcgatgattcttgggacactaatgacgccaacgtggtttgcaggcagctgggctgtggttgggcaatgagcgctcccggcaacgcttggttcggacagggtagtgggcctatcgctctggacgatgtgcgctgttcaggccatgaatcatatctctggtcttgtccccacaatggttggctctctcacaactgtggacacggagaggacgccggggtgatttgtagcgcagcccaaccccaaagtactcttcggcccgagtcctggcccgtgaggatctctcctccagttccgactgagggaagcgagagcagcctggccctgaggttggtgaacgggggagatcgatgtcgcggtcgtgtggaagtcctataccgtggaagttggggaaccgtgtgcgacgactattgggacacaaatgatgcgaatgtcgtttgcaggcagctcgggtgtggatgggccatgagcgcgcccggaaacgctcagtttggacaggggagtggtcctatcgtgttagacgatgtaagatgcagcgggcacgagtcctatctgtggtcatgccctcataatggatggctgacccacaattgcggccacagcgaggatgcgggggtaatctgttccgccccccagtcaaggcccacaccttcgcctgacacatggccgactagccacgcgtcaaccgcaggacctgagtccagcctggcattaagattggtaaatgggggagatagatgccaggggcgagtcgaagtgctgtaccgtgggtcttggggaaccgtatgcgatgatagctgggatacaagcgatgccaacgtcgtgtgtagacagttaggctgcggatgggccacttctgcccccggaaatgcaaggtttgggcagggtagcgggccaatcgtgttggatgatgtaagatgttcaggttacgaaagctatctttggtcttgcccacacaatggctggttgtctcataattgccaacacagtgaagatgcaggagtgatttgttccgcagcacatagttggagcactcccagccctgataccctgccaactataacactccccgctagcacagtcggttctgaatcatcgttagctctgagacttgtcaacggaggcgatcgctgccaggggagggtagaggttttgtatcaggggagttgggggactgtttgcgacgattcttgggacacgaacgacgcgaatgttgtgtgccgccagctgggatgcgggtgggccatgtcagcccccggcaatgccagattcggccaaggttcagggcctatagtgcttgatgatgtcagatgttctggacatgaatcttacctgtggtcgtgcccacacaacgggtggctttcacacaactgcggccattccgaggatgcgggtgtgatttgcagcgcttcccaatcccggcccaccccgagtccagacacatggcctaccagtcacgccagtactgccgggagcgaatccagcctcgcgttgagacttgtgaacggtggcgatcggtgccagggccgcgtggaggtactgtaccgagggagctgggggacggtttgcgatgactattgggataccaatgacgccaatgtggtgtgccggcaactggggtgcggatgggccatgagcgccccaggaaatgctcggttcggccagggctcaggaccaattgtgcttgatgacgttaggtgttcggggcacgagagctatctttggagttgtccacataatggctggttaagtcacaactgcgggcatcacgaggatgcaggtgtaatctgctcggcatcacagtcccagccaacccctagcccagatacctggcccacctcccacgcttcaacagcagggtccgaatcaagtttggcgctgcgcttggtgaacggcggcgatagatgccagggtcgagttgaagtgctttaccggggatcctgggggacagtctgtgatgattattgggacaccaacgacgctaatgtagtgtgtcggcagctggggtgcggttgggctacctcagctcctggcaatgctcggtttggacagggctcaggcccaatcgtgctggatgacgtgcggtgctctggccacgaaagttacctgtggtcttgtccccacaacggatggctatcacataactgcgggcaccatgaggatgcaggggtcatctgttcagcttctcagtctcagccgactccgagccccgacacttggcctaccagtcgtgcgtctactgccgggagtgaatccacccttgcactgcgcctcgtaaacggcggagatagatgccgcgggagggtggaagtgctgtatcagggtagttggggcaccgtgtgcgatgattactgggacaccaacgacgccaacgtcgtttgccgacagttgggctgcgggtgggcgatgtccgccccagggaatgcccagttcggccaaggtagcggcccaattgtcctggatgacgttcgctgttccgggcatgaatcttacctctggtcctgcccccacaacggctggttatcccacaattgcgggcaccatgaggacgctggcgtgatctgtagcgctgcccagtcacagtctaccccaagaccagatacatggctcactaccaacctgcctgcccttaccgtggggtccgagtccagcctggccttgcgcctggtcaacggcggcgacaggtgcaggggtcgcgttgaggtcttgtacagaggctcctggggtactgtgtgtgacgacagttgggatacaaacgacgcgaacgtagtttgcagacaattgggctgtgggtgggccatgtcagcacccgggaacgccaggttcgggcagggctctgggcccattgtactggacgatgtgcgatgttcgggcaatgagtcttatttgtggagttgccctcataagggctggctcacacacaactgtggacatcacgaagacgccggcgtaatctgctcagccactcagatcaattccacgactaccgattggtggcatcctacaactaccacaacggctcgaccctctagtaattgcggtggctttctgttctatgcatcaggaaccttctctagtcccagttaccctgcctactacccgaacaacgctaaatgcgtgtgggaaatagaagtcaatagcgggtaccgcatcaatttaggattcagcaatctcaaactggaagctcaccataactgctcctttgattacgtggaaatctttgatggatcactgaactcttcactactgctgggcaagatttgcaatgacacccggcaaatcttcaccagtagttacaacaggatgaccattcactttcgcagtgatatttcatttcagaacaccgggttcttagcgtggtataatagcttccccagtgacgctacccttcggcttgtgaacctcaatagtagctatggactctgtgccggccgtgtggaaatctatcacgggggtacttggggcactgtgtgcgacgatagttggaccatacaagaagctgaagtggtgtgtagacagctgggctgcgggcgggcggtatctgccctcgggaacgcttacttcggctccggaagtggcccaattacactggatgatgttgagtgtagtgggaccgaatccacactgtggcagtgccgtaaccggggatggttctcccacaactgtaaccatagagaagatgccggggtgatctgttccggtaaccatttatccacaccagcccccttcctaaatataaccaggcccaatacagactactcttgtggaggatttctgtcccaaccatccggcgatttctcttcccctttttaccctgggaactatcctaataacgcaaaatgcgtttgggatatcgaggtacagaataattatagggtcacggtcatatttcgagacgtgcaactggaaggcgggtgtaactacgactacattgaagtattcgacggtccttacagatcctcaccactgattgccagggtctgtgatggggctaggggaagcttcacttcaagctcgaactttatgtccattagattcataagtgaccatagtattactcgtaggggctttcgtgctgagtattattcctcaccatccaacgactctacaaacttgctatgtctgcctaaccacatgcaggcctccgtgagccgatcttacctccaatctctgggcttctccgccagtgatttagtcatatccacatggaatggatactacgagtgtcgcccccagataacccctaacttggtgatttttactatcccttactccggttgcggtactttcaaacaagctgacaatgataccattgattacagcaacttcctgactgccgccgtcagcggtggaatcattaaaaggcgtaccgacctgcggattcatgtgtcttgcaggatgctccagaacacgtgggttgacaccatgtatatcgcaaatgacactatacacgtagccaacaatactatacaagtggaagaggtccagtatggcaatttcgatgtcaatatttccttctacacatcgtctagtttcctgtatccagttacctcacgaccatactatgtcgacttgaatcaagatctgtatgtccaggcagagattttacactcggacgccgtgttgacactctttgtggatacatgtgtggcctctccttacagtaatgacttcacctcactgacctatgacctgatcagatccggatgtgtcagagatgacacatatggcccttactcttctccaagcctgcgcattgctagatttaggtttagagcatttcactttctgaaccgattcccgtcggtttacttgcggtgcaagatggtggtatgtcgtgcttacgaccccagcagcagatgctaccgaggctgtgtcctgcggtcaaagagagatgtcggatcctaccaggagaaagtggatgttgttctgggacctatccagcttcagaccccacccagaagagaagaagagccaagatag

SEQ ID NO: 146093 - DNA, 5358 bp, Artificial Sequence
  derived and/or modified sequence
atgggaatatcaaccgtgatattagagatgtgcttattgtgggggcaggtgctgtccactggcggctggatcccccggacgacggattatgcatctctcattcccagtgaagtcccccttgatcccacagtggccgagggatcacccttcccttcagaaagcacccttgagtcaactgtggccgagggctccccgatctctctggaatccactctcgaaagcactgttgccgaaggtagtctcatcccctctgagtctactctggagagtaccgtagccgaggggagtgactccggcctggcactcagactggtgaacggtgacggaagatgccagggcagggtggaaatattataccgcggcagctggggaacagtttgcgatgatagttgggacaccaatgatgcgaatgtggtgtgtagacagctggggtgtgggtgggccatgtcagcccctgggaatgcttggtttggacagggcagcggccctatcgccctggatgacgtgcgatgctcaggacacgaatcttatctctggagctgcccacacaatggctggttgtcccataattgcggacatggcgaagacgccggcgtgatttgttccgccgctcaacctcagagtactttaaggccggagtcttggcccgtccgaatcagccccccggtacccactgagggcagcgagtcatcactcgcccttcgactagtcaatggcggcgatcggtgtcgtgggcgtgtggaggtgctgtaccgagggagctggggaactgtctgtgatgattactgggatacaaacgacgccaacgttgtgtgtcgacagttagggtgcgggtgggccatgtccgctccaggaaatgcgcagtttggtcagggcagcggcccgatcgtgctggacgacgttcgatgtagcggccacgaatcttacttgtggagctgtccgcacaatggatggctgactcacaactgtggccatagcgaggacgccggggtcatttgtagcgccccacagtcccgcccaacaccttctcccgacacttggcctacttcacatgcttcaactgcgggaccagaatctagtcttgcactccggttggtcaatgggggcgataggtgtcagggacgggtggaggtgttatatcgcgggtcatgggggactgtttgtgatgactcttgggatacaagtgatgccaatgtggtttgccgacagttaggatgtggctgggccacttcggcccctggcaacgcaagattcggtcaaggctctggccccatagtgctggatgacgtgagatgttcgggctacgaaagctacttatggtcatgtccccacaatggatggctgtctcacaactgtcaacatagtgaggatgccggcgtaatctgcagcgccgcgcacagctggtctactccttcccctgacacactcccgacaattaccctgccggccagcaccgttggatctgagagctccctggcactaaggctggtcaacggcggcgatagatgtcaaggacgagtagaagtactctaccagggtagttggggaactgtgtgcgatgacagctgggacactaacgacgcaaacgtggtgtgccggcagctgggatgcggttgggcgatgtctgcacccggcaatgcgcgcttcggccaaggaagcggccctatagttctggacgacgtccgctgcagtgggcacgagtcttacttgtggtcttgtcctcataatgggtggttgtcgcataattgtgggcactccgaagacgctggcgtcatatgttcagctagtcagagcaggcccaccccttctcctgatacttggcctacttctcacgcaagcacagccggtagcgaatctagtctggccctcagactggttaacgggggtgatcggtgccagggtagggttgaggtgctatacagaggctcttggggcactgtgtgcgatgactactgggacactaatgacgccaatgtagtctgtcgacagctgggctgcggctgggccatgtcagcaccaggcaacgctagatttggtcagggctccggtcccatcgtactggacgacgttcggtgttctggacacgagtcttacctctggtcctgtccacacaacggatggctgtcccataactgcgggcatcacgaagatgctggggtgatctgctccgcctcgcagtcccaacctaccccttccccagacacttggcccacctctcatgcttccaccgcggggtctgagtcctctctggcattgagactcgtcaatggcggagacagatgccagggtagggtggaggtgctatatagggggagttgggggaccgtatgtgacgactattgggatactaatgatgccaatgtagtgtgccgccaactggggtgcggatgggctacatctgctcctggtaatgcacgatttggacagggctctggacccatcgtcctggatgatgtaaggtgttctggacacgagagctacttatggagttgtccacacaacggttggctgagtcacaactgcgggcatcacgaagatgctggtgtgatttgttccgcctcccagtcacagccaaccccctctcctgatacttggcctacttcacgtgcaagcaccgctggaagtgaaagtaccttagccctcagactggtgaatggaggggacaggtgccgagggcgggttgaagtgctataccaaggctcctggggaactgtgtgtgacgactattgggataccaatgacgcaaatgtagtttgtcgccagttgggctgtggctgggctatgagtgcgcctggtaacgctcagtttggacagggcagcggacccattgtgttggacgatgtcaggtgttctgggcacgaaagctatctgtggtcctgcccacacaacggttggctgagtcacaattgtgggcaccacgaggatgccggagttatttgtagcgcagcacaatctcagagcaccccaaggccagatacctggctgacaaccaatttgcccgccctgaccgtgggtagcgaaagtagcctggctttacgcttggttaacggcggcgataggtgtcgcggacgcgtagaggttctgtatcgcggcagttggggaacggtttgcgacgatagctgggacactaacgacgccaatgttgtctgtagacagctcggttgtggatgggctatgtctgcccctggtaatgccagattcgggcaaggcagtgggccaatcgtactggatgacgttaggtgctcagggaatgaaagctatttatggtcctgtccacacaaagggtggctgactcacaattgtgggcatcacgaggatgcgggagtgatttgcagcgctacacaaatcaacagcacaaccaccgactggtggcaccctactacaacaaccacagcgcggccatctagcaattgtggcgggttcctattctacgcttccggtacatttagcagcccatcataccccgcctactatccaaataacgcaaaatgtgtctgggagatcgaagttaatagcggataccgtatcaatctggggttctcgaacctgaagctggaggcgcatcataattgttctttcgattacgtcgaaatatttgatggtagtctgaatagtagcttacttctggggaaaatatgtaacgatacccgtcagatctttacctccagttataatcgtatgacaatccactttcgatcagacatctcattccagaataccggcttcctagcttggtataacagcttcccgagtgacgcaactctcagattagtgaatctgaattcctcctatggattgtgcgccggccgggttgagatataccacggtggcacctggggtacagtgtgcgacgattcctggacaatccaggaggcggaagtggtctgtaggcagctcggctgcggccgggccgtttccgctcttggtaatgcatattttggctctgggtccggtcccatcaccctggacgatgtggagtgtagtggaacagaatctaccttgtggcagtgcagaaatagagggtggttcagccataactgcaatcatcgcgaggacgcaggagtgatttgttccgggaatcatctctcgacccccgccccctttctcaacataacccgtcctaacacagattattcttgtggcggattcttgagtcagccaagcggcgatttcagcagcccattttatccaggcaattacccaaataacgccaagtgtgtgtgggatattgaggtgcagaacaattaccgggtgaccgtgatcttccgcgacgtccagttagagggcggatgtaattacgattatatcgaggtattcgatggaccttatcggtcttccccactaatagccagagtatgcgacggagcaagaggatccttcactagttcgtcaaacttcatgagtattaggttcatcagcgatcatagtataacgcgtagaggatttagagccgaatattatagtagtccaagtaacgattccacaaacctgctgtgcctccctaatcacatgcaggctagtgtgagtagaagttacctgcaaagcttagggttcagcgcaagcgacctagtgatcagcacttggaatggctattacgagtgtaggccacagataacccctaacctggtgatctttaccatcccctactccggctgcggaaccttcaagcaagccgacaatgatactatagactactcgaattttctcaccgctgccgtcagcggcgggattattaaaaggagaactgacctcagaattcatgtctcttgtcggatgctccagaatacctgggtggataccatgtatatagccaacgatacaatacatgtggcaaacaataccatccaagtggaggaggtgcagtatggtaattttgatgtgaatatctcattttacacaagttcaagcttcttgtacccagtaacttcaaggccatactacgtcgacctgaatcaagacttgtatgttcaggcagagattctccattccgacgccgtgcttactcttttcgtggacacgtgtgtagccagtccttactctaacgatttcacttctcttacttatgacttgattagatcaggttgcgtgagagacgatacttacggcccatactctagccctagcctgagaattgcacgtttccgcttcagagcctttcacttcctgaaccgcttcccgagcgtgtacctacgctgtaagatggtcgtctgcagagcctacgatccctcttcaagatgctatcggggttgtgtcctgagaagcaaaagggacgtggggtcttaccaagaaaaagtggacgtagttctgggcccaatccagctgcagacacccccccgtagagaggaggagccacgctag

SEQ ID NO: 146094 - DNA, 5358 bp, Artificial Sequence
  derived and/or modified sequence
atgggaatctctactgttatcctcgagatgtgtttactgtggggccaggtgttgagtactggcggatggataccacggaccactgattatgctagcctgattcccagcgaggtgccattggatcctaccgtagctgaaggtagtccctttccttcagaaagtactctggaatccacggtggccgagggcagccccatcagtcttgaatctactctggagtcaaccgtggccgaaggtagcctcatcccaagtgagagtacactcgaaagcacggtggctgaggggtcggacagtggactcgccctccggcttgtcaacggcgacggccgatgtcagggtagggttgagatcctgtacagaggctcatggggcactgtgtgcgatgacagctgggatacaaatgatgcgaatgtggtttgccggcagctgggttgtggatgggccatgagtgctccaggtaatgcctggttcggacagggctccggccccattgctctggatgacgtgaggtgctcaggccatgagtcctacttatggagctgcccccataacgggtggctcagccataattgcggccatggcgaggatgctggcgtgatttgctcagccgcccaacctcagagcaccctccgccccgagagctggcccgtgcggatctctcctcccgtacccactgaggggagcgagtcgtcattggcgctgaggctggtcaacggcggggacaggtgcagaggtcgagtagaggtgctgtatcgaggaagctggggtacggtatgcgatgattattgggatacaaacgacgcaaatgtagtctgccgccagctcggatgtggctgggcgatgagcgcgccaggtaatgcccagtttggccaggggtcgggtccaattgtcctagatgacgtccgctgctccggacacgagagctatctgtggtcatgcccgcataatggatggctcacccataactgcggacactcagaggacgctggagtgatatgttcggcacctcagtcccggccaaccccctccccagatacctggcccacatctcatgcatccacggccggtcccgaatcatcgcttgccctgcgtctcgtcaatgggggggaccggtgccagggccgcgtcgaggtgttgtataggggctcttgggggaccgtctgcgatgactcttgggatacatcagacgccaatgtggtatgtaggcaattaggttgtggctgggccacatccgcccctggaaatgcccggttcgggcaggggagtggccccatcgtattggacgacgtgagatgctctggctatgaaagttatctttggtcctgccctcataatggctggctgtcccacaattgtcaacactctgaggatgccggtgtcatctgctccgccgcccactcctggtctacaccatctccggacactctccccaccattaccctgcctgctagcaccgtgggatccgagtcctccctggccctgaggttggtaaacggcggcgatcgatgtcaggggagagtcgaagtgctttatcaaggtagttggggaacggtgtgcgacgacagctgggacacaaacgatgcaaacgtagtatgccggcagctcggctgtgggtgggccatgtcggcccccgggaatgctcgatttggccaggggtcggggcctattgtcttagatgacgtacgttgcagcgggcatgaaagttatctgtggagttgcccacataacggttggctgagccataactgtggccactcagaagacgcgggggtgatatgtagcgcgagtcagtctagacccacaccttcaccagacacctggcccacatcacatgctagtactgctgggtctgaatcatcactggctctacgtctcgtcaacggtggagatcggtgtcaaggcagggtggaggtgctataccggggcagctggggaactgtatgtgacgactattgggacactaatgatgctaacgtggtgtgtagacagcttgggtgtggttgggctatgtccgcccctggaaacgccagatttgggcagggctccggccccatcgtgcttgatgacgtccgatgcagcggtcatgaaagctacctctggtcctgccctcataacgggtggctgtcacacaactgtgggcaccacgaggatgccggcgtaatctgctccgcctcacagagccagcccaccccgtcaccggatacctggccaacttcccatgccagtactgccggctccgaaagctctctggccctgcggctggtaaatggaggcgatcgttgtcaaggccgcgtagaggtcctgtacagaggaagctggggcactgtctgcgacgattactgggataccaacgatgctaacgtagtatgccggcaactggggtgtggatgggctacctcagcccctgggaatgcaaggttcgggcagggtagcggacctattgtgctggatgacgttagatgttccggacacgagtcctacctgtggtcctgcccccataacggatggctgagccataattgcggccaccatgaagacgctggtgttatctgctccgcctctcagagtcagccaaccccatcccccgacacttggccaacctctagagcttccacagccggatccgagtccaccctcgcgttgcgtctagtcaatggcggggaccgctgtaggggtcgcgtggaggttctttaccaggggagctggggcacagtctgcgacgattattgggacaccaatgatgccaacgttgtatgcaggcagcttggatgtggttgggccatgtccgcccctggaaacgcgcagttcggccaggggtctggcccaatcgtcctggacgatgtgcgatgtagtgggcacgagagctacctgtggtcatgcccccacaacggatggttgagccacaattgtggacatcacgaggatgccggtgtaatttgtagcgctgcacaaagccagtctacaccacgtccggacacatggctgaccacaaacttgccagccctcactgtcggcagcgaatccagcctggctctgaggctcgtcaatggaggagaccgctgccgcggtagggtcgaagtgctgtaccgaggtagctgggggaccgtatgcgatgattcttgggacacaaatgacgcaaatgtcgtgtgcaggcagcttggctgcgggtgggccatgagcgcccctgggaacgcccggttcggccaaggcagcggaccaatagtgttagatgatgtgcgttgcagcggtaacgaatcatacctctggagttgtccccacaaaggttggctaactcacaactgcggtcaccacgaggatgccggagttatctgttccgccacgcaaattaactccactacaaccgattggtggcacccgacaaccaccactactgcccgcccatcgagtaactgcgggggcttccttttttatgcctccgggacgttctcatcacccagctaccccgcatactaccctaataatgcgaagtgtgtttgggagatcgaggtgaattctggctatagaataaatctggggttctcgaacctgaaactggaggcccatcataattgttcctttgactatgtggagatctttgacggttccttaaacagctcgttgctgctcggaaagatatgcaacgatacgagacaaatttttactagttcttataaccgaatgactattcacttcaggtcggacatttctttccagaatacagggttccttgcttggtataatagtttcccaagcgacgcgacccttcggcttgtgaatctaaattcatcttatgggctctgcgcaggcagagtagaaatatatcacggcggaacctggggcaccgtatgcgatgactcttggacaattcaagaagccgaggtcgtatgccggcaactcggctgcggcagagctgtgtcagcccttggcaatgcctactttggctccgggagtggcccaataaccctggatgacgtagagtgttccggcacagaaagcactctttggcaatgccggaacaggggatggttttcgcacaactgcaaccaccgcgaggacgccggtgtcatttgtagcggaaaccatctgagcacacccgcaccattcctgaatatcacaaggccaaataccgattattcctgtggcgggttcctttcccagcctagcggcgacttctcaagtccgttctatcccggcaactatccgaataatgctaaatgcgtatgggacatcgaggtgcaaaacaattaccgcgtcacggtgattttccgagacgtccagctagaagggggctgcaattatgattacatcgaggttttcgacggtccatatcgaagctcgcctctgattgccagagtttgcgacggagcccgaggctccttcacctctagctctaactttatgtcaatccggttcatttctgatcacagcattacaaggcgaggattcagggcagagtactattcctcaccctccaatgattcaacaaacctgctgtgcttgcctaatcacatgcaggctagcgtgtcacgctcctacctgcagtctttgggattctcagccagtgacctcgttatctctacgtggaatgggtactatgagtgtcgcccccagatcactccgaacctcgtgatttttaccatcccctactcgggttgcggcacgtttaagcaggcagacaatgatacaattgactactcaaactttcttacagcagccgtctccggcggaatcatcaaaaggcgaacagacctgcggattcacgtgagttgtagaatgctccaaaacacgtgggtggataccatgtacattgcgaacgataccatccacgtcgcaaacaacacgatccaggtggaagaggttcaatacgggaacttcgacgtgaacatcagtttctatacctctagctccttcctgtatcctgtgacttctcgcccctactacgtggacttgaaccaggacctgtatgtgcaggctgaaattctgcatagtgacgcggtacttaccctctttgtagacacgtgcgtggccagtccatacagtaatgacttcacaagtctaacgtatgacttaatacgcagcgggtgtgtcagagacgacacttatgggccctatagctcgccctctctgaggatagctagatttaggtttagagcattccacttcctcaatagatttcccagcgtctacttacgctgcaaaatggttgtgtgtcgtgcctacgaccctagcagccgatgctaccggggctgcgtcctaaggtctaaaagggatgtgggctcctaccaggagaaagtcgacgtggtattgggaccaattcagctgcaaacgcctccccggagggaggaggagccccgctag

SEQ ID NO: 146095 - DNA, 5358 bp, Artificial Sequence
  derived and/or modified sequence
atgggcatcagcaccgtcatcctggagatgtgcctgctgtggggccaggtgctgagcactggaggctggatccccaggaccacagattatgccagcctcatccccagcgaggtgcccctggaccccaccgtggccgagggcagccccttccccagcgagagcaccctggagagcacagtggccgagggcagccccatcagcctggagagcaccctggagagcacagtggccgagggcagcctcatccccagcgagagcaccctggagagcacagtggccgagggcagtgacagcggcctggccctgcggctggtgaatggagatggccgctgccagggccgggtggagatcctgtaccggggctcctggggcaccgtgtgtgatgacagctgggacaccaatgatgccaacgtggtgtgccggcagctgggctgcggctgggccatgtctgcccctggaaatgcctggtttggccagggcagcggccccatcgccctggatgatgtgcgctgcagcggccacgagagctacctgtggagctgcccccacaacggctggctgagccacaactgtggccatggagaagatgctggggtcatctgcagcgctgcccagccccagagcaccctgcggcctgagagctggcctgtgcgcatcagcccccctgtgcccacagagggcagcgagagcagcctggccctgcggctggtgaatggaggagaccgctgccggggccgggtggaggtgctgtaccggggctcctggggcaccgtgtgtgatgactactgggacaccaatgatgccaacgtggtgtgccggcagctgggctgcggctgggccatgtctgcccctggaaatgcccagtttggccagggcagcggccccatcgtgctggatgatgtgcgctgcagcggccacgagagctacctgtggagctgcccccacaacggctggctgacccacaactgtggccacagtgaagatgctggggtcatctgcagcgccccccagagccggcccacccccagcccagacacctggcccaccagccacgccagcacagctggccctgagagcagcctggccctgcggctggtgaatggaggagaccgctgccagggccgggtggaggtgctgtaccggggctcctggggcaccgtgtgtgatgacagctgggacaccagtgatgccaacgtggtgtgccggcagctgggctgcggctgggccaccagcgcccctggaaatgcccgcttcggccagggcagcggccccatcgtgctggatgatgtgcgctgcagcggctatgagagctacctgtggagctgcccccacaacggctggctgagccacaactgccagcacagtgaagatgctggggtcatctgcagcgctgcccacagctggagcacccccagcccagacaccctgcccaccatcaccctgcctgccagcacagtgggcagcgagagcagcctggccctgcggctggtgaatggaggagaccgctgccagggccgggtggaggtgctgtaccagggctcctggggcaccgtgtgtgatgacagctgggacaccaatgatgccaacgtggtgtgccggcagctgggctgcggctgggccatgtctgcccctggaaatgccaggtttggccagggcagcggccccatcgtgctggatgatgtgcgctgcagcggccacgagagctacctgtggagctgcccccacaacggctggctgagccacaactgtggccacagtgaagatgctggggtcatctgcagcgccagccagagccggcccacccccagcccagacacctggcccaccagccacgccagcacagctggcagcgagagcagcctggccctgcggctggtgaatggaggagaccgctgccagggccgggtggaggtgctgtaccggggctcctggggcaccgtgtgtgatgactactgggacaccaatgatgccaacgtggtgtgccggcagctgggctgcggctgggccatgtctgcccctggaaatgcccgcttcggccagggcagcggccccatcgtgctggatgatgtgcgctgcagcggccacgagagctacctgtggagctgcccccacaacggctggctgagccacaactgtggccaccatgaagatgctggggtcatctgcagcgccagccagagccagcccacccccagcccagacacctggcccaccagccacgccagcacagctggcagcgagagcagcctggccctgcggctggtgaatggaggagaccgctgccagggccgggtggaggtgctgtaccggggctcctggggcaccgtgtgtgatgactactgggacaccaatgatgccaacgtggtgtgccggcagctgggctgcggctgggccaccagcgcccctggaaatgccaggtttggccagggcagcggccccatcgtgctggatgatgtgcgctgcagcggccacgagagctacctgtggagctgcccccacaacggctggctgagccacaactgtggccaccatgaagatgctggggtcatctgcagcgccagccagagccagcccacccccagcccagacacctggcccaccagccgggccagcacagctggcagcgagagcaccctggccctgcggctggtgaatggaggagaccgctgccggggccgggtggaggtgctgtaccagggctcctggggcaccgtgtgtgatgactactgggacaccaatgatgccaacgtggtgtgccggcagctgggctgcggctgggccatgtctgcccctggaaatgcccagtttggccagggcagcggccccatcgtgctggatgatgtgcgctgcagcggccacgagagctacctgtggagctgcccccacaacggctggctgagccacaactgtggccaccatgaagatgctggggtcatctgcagcgctgcccagagccagagcacccccaggccagacacctggctgaccaccaacctgcctgccctgactgtgggcagcgagagcagcctggccctgcggctggtgaatggaggagaccgctgccggggccgggtggaggtgctgtaccggggctcctggggcaccgtgtgtgatgacagctgggacaccaatgatgccaacgtggtgtgccggcagctgggctgcggctgggccatgtctgcccctggaaatgccaggtttggccagggcagcggccccatcgtgctggatgatgtgcgctgcagcggaaatgaaagctacctgtggagctgcccccacaagggctggctgacccacaactgtggccaccatgaagatgctggggtcatctgcagcgccacccagatcaacagcaccaccacagactggtggcaccccaccaccaccaccacagcccggcccagcagcaactgtggcggcttcctgttctacgccagcggcaccttcagcagccccagctacccagcctactaccccaacaatgccaagtgtgtgtgggagattgaggtgaacagcggctaccgcatcaacctgggcttcagcaacctgaagctggaggcccaccacaactgcagctttgattatgtggagatctttgatggcagcctgaacagcagcctgctgctgggcaagatctgcaatgacacccggcagatcttcaccagcagctacaacaggatgaccatccacttcagaagtgacatctccttccagaacacaggcttcctggcctggtacaacagcttccccagtgatgccaccctgcggctggtgaacctgaacagcagctatggcctgtgtgccggccgggtggagatctaccatggaggcacctggggcaccgtgtgtgatgacagctggaccatccaggaggccgaggtggtgtgccggcagctgggctgcggccgggctgtgtctgccctgggcaatgcctactttggaagtggcagcggccccatcaccctggatgatgtggagtgcagcggcacagagagcaccctgtggcagtgcaggaacagaggctggttcagccacaactgcaaccacagagaagatgctggggtcatctgcagcggcaaccacctgagcaccccagcccccttcctgaacatcacccggcccaacacagactacagctgtggcggcttcctgagccagcccagcggggacttcagcagccccttctacccaggcaactaccccaacaatgccaagtgtgtgtgggacatcgaggtgcagaacaactacagagtgaccgtcatcttcagagatgtgcagctggagggcggctgcaactatgactacatcgaggtgtttgatggcccctaccgcagcagccccctgattgcccgggtgtgtgatggagcccggggcagcttcaccagcagcagcaacttcatgagcatccgcttcatcagtgaccacagcatcacccggcggggcttccgggcagagtactacagcagccccagcaatgacagcaccaacctgctgtgcctgcccaaccacatgcaggcctctgtgagccgcagctacctgcagagcctgggcttcagcgccagtgacctggtgatcagcacctggaatggctactatgaatgtcggccccagatcacccccaacctggtgatcttcaccatcccctacagcggctgcggcaccttcaagcaggccgacaatgacaccatcgactacagcaacttcctgacagctgctgtgtctgggggcatcatcaagagaagaacagacctgcgcatccacgtgtcctgcaggatgctgcagaacacctgggtggacaccatgtacatcgccaatgacaccatccacgtggccaacaacaccatccaggtggaggaggtgcagtatggcaactttgatgtgaacatctccttctacaccagcagcagcttcctgtaccctgtgaccagccggccctactacgtggacctgaaccaggacctgtatgtgcaggccgagatcctgcacagtgatgctgtgctgaccctgtttgtggacacctgtgtggccagcccctacagcaatgacttcaccagcctgacctatgacctgatccgcagcggctgtgtgagagatgacacctacggcccctacagcagccccagcctgagaattgcccgcttccgcttccgggccttccacttcctgaaccgcttccccagcgtgtacctgcgctgcaagatggtggtgtgccgggcctatgaccccagcagccgctgctaccggggctgtgtgctgcggagcaagagagatgtgggcagctaccaggagaaggtggatgtggtgctgggccccatccagctgcagaccccaccaagaagagaggaggagcccaggtag

SEQ ID NO: 146096 - DNA, 5358 bp, Artificial Sequence
  derived and/or modified sequence
atgggcatcagcaccgtgatcctggagatgtgcctgctgtggggccaggttctttccactggaggctggatcccgcgaaccaccgactatgcaagtctcatcccctccgaagtcccattggacccaacagtcgccgaaggtagtccctttccatctgaaagcaccctggagagcaccgtggcggagggttctcccatttcactggagtccaccttggaaagcactgttgccgaaggctcattaatcccctcagagtccacactggagagcacagtcgctgagggatcagactcagggctggctctcagactggttaacggtgatggtcgctgtcaaggtcgtgtcgaaatattgtacagaggatcttggggaactgtttgcgacgactcttgggacaccaacgacgccaacgtggtgtgtaggcaactgggctgtgggtgggctatgagcgccccagggaacgcctggttcggccagggctcaggaccaatcgccctcgacgatgtgaggtgctccggtcacgagtcttacttgtggtcctgtccgcacaatggatggctaagccataattgcggacacggcgaagatgccggcgtgatatgttccgcagcgcagccgcagagcacgttgcgccctgagtcctggccagtgaggatttctccgcccgtgcccaccgaagggtcggaatctagcctggccctgaggcttgtcaatggcggagatagatgtcgcggccgggtggaggtgttgtacaggggtagctggggcacagtttgcgatgactactgggatacaaacgatgctaacgttgtgtgccgccaactggggtgtggctgggccatgtcggctcctgggaatgcccaattcgggcagggctctggccctatcgtgctggatgacgtccgctgcagtggacacgagtcctatctatggagctgtccccacaatggatggctgacccataattgcggacacagcgaagatgccggtgtgatatgctctgcgccccagtcaaggcctacccccagtccagacacgtggcccacctcgcatgctagcaccgctggaccagagagctcactggctctcaggctcgttaatggcggcgaccgctgtcaaggccgcgtggaagtactctatcgcggatcttggggaacggtgtgcgatgacagctgggacacctctgacgccaacgttgtctgccgacagcttggatgcggttgggccacatccgctccaggtaatgcacgcttcgggcagggttcgggccccattgtgctggacgatgtgcgctgctccggctatgagagctacctatggtcctgcccccacaacggttggttatctcacaactgtcaacacagcgaggacgctggggtgatctgttctgccgctcacagttggtccaccccctcacctgatacactgcccacaatcacgctaccggccagcaccgtaggctctgaatcttccctggcactaaggctcgtcaacgggggcgatcgctgccaaggaagggtagaggttctataccaggggtcttgggggactgtgtgtgatgattcttgggacactaatgacgccaatgtggtttgtcgccaattgggctgtggctgggctatgtcggcccccggaaatgcacgattcggccagggcagtggacccatcgtcttggatgacgtgaggtgtagcggacacgagagctacctgtggtcttgtccacataacggatggttgtcccataactgcggtcacagcgaggacgctggcgtgatctgtagcgcaagccaatctcgcccaacccctagccccgatacctggcctacttcccatgcctccactgcagggagcgagtcaagccttgccctgcgcctggtgaatggtggcgatcgctgtcaggggagggtagaggtactgtaccgaggtagttggggcaccgtgtgtgatgactactgggatactaatgatgctaatgttgtttgcaggcagctcggttgtggatgggctatgagcgctccagggaatgcacgcttcgggcagggctcagggccgatagtcctggatgatgtcaggtgctccggtcacgaatcatacctgtggtcgtgtccgcataacggatggctatcacacaattgcggacaccacgaagacgccggagtaatttgctcggccagccagtctcagcctactccatccccagacacttggcccacttctcatgcctcgacggccgggagcgaatcctctcttgccctgagattggtgaatggcggggacagatgtcaggggcgggtcgaagtgctgtataggggtagctgggggactgtgtgcgatgattactgggacaccaatgatgccaatgttgtgtgccgccaattaggatgcggatgggctactagtgctcctggtaacgcccgcttcgggcaggggagcggccctatagtcctggacgacgtgaggtgcagcggacacgagagctacctttggtcttgcccccataacggctggttatctcataattgtggacaccatgaagatgccggcgtgatttgttctgcctctcagtctcagcctacgccttcccccgacacgtggcctacctctcgggctagcacggcaggcagtgaatctaccctcgctctgagactggtgaatgggggagacagatgccgcggtcgggtggaagtgctctatcaaggctcgtggggcactgtatgtgatgattactgggacacaaatgatgccaacgtggtgtgcaggcagctgggatgtgggtgggcgatgtccgccccagggaatgctcagttcgggcagggctccggtcccatcgtcctggacgatgtgcgctgcagtggacacgaatcatatctgtggagctgtcctcataatggttggctgtcgcacaactgcggccaccatgaggatgccggcgtgatttgctctgccgcccagagtcagtcaaccccaagacctgatacatggctgacaaccaacctgccagccctcaccgttggctctgaatcaagtctggccctgcggttggtaaatggtggggatcgatgccgaggcagagtcgaggtgctctacagaggctcatggggtacagtgtgtgatgatagttgggatactaacgatgctaatgtcgtctgcaggcagttggggtgcggctgggcaatgtctgccccaggaaatgctagattcggtcaaggaagcggccccatcgtgctggatgatgttagatgcagtgggaatgaaagctatctgtggtcttgtcctcataaagggtggctcactcacaactgtgggcaccacgaggatgccggggtgatctgtagcgcaacacagattaacagcacaaccaccgattggtggcatcccaccactacaacaaccgccaggcccagctcgaactgtggcggatttctgttctacgcaagtggcacgtttagttcaccctcctatccagcctattatcctaataatgccaagtgcgtgtgggagatcgaagtgaattctggatacaggattaacctcggattttcaaacctgaagctggaagctcaccacaactgcagcttcgattacgtagagatctttgacggatctctgaacagtagcctcctcctgggcaagatctgtaacgacacgcgccagattttcaccagttcatataacaggatgactatccactttagaagcgatatctccttccagaacacaggatttctcgcctggtacaatagcttcccttctgacgctactctcagacttgtcaatttaaattcctcatatgggctctgtgccggtcgggtggagatctatcacggagggacatggggcacagtatgtgacgatagttggaccattcaagaggctgaagttgtctgccgccaactgggctgtggacgggccgtgtcagctctcgggaatgcttactttgggagtggtagcggtcccattacattggatgacgtggagtgctccggtaccgaatctaccctttggcaatgccgaaatagaggatggtttagccataactgtaatcaccgggaggatgcaggagtcatatgctcaggcaatcatctgagcacacctgcccccttcctgaatatcacaagaccaaatacagactatagctgcggtggcttcctctcacagccatctggtgatttctccagccctttctacccaggtaactacccaaataatgctaagtgtgtttgggacattgaagtacaaaacaactatcgagtgaccgtgatcttccgcgatgtacaattagagggggggtgcaattacgattatatcgaggtgttcgacggaccatacaggtcttcccctcttatcgcccgcgtgtgcgacggcgctagaggtagctttaccagttcgagtaacttcatgagcattcgcttcatcagtgaccactccatcacacggcggggctttcgagccgaatattactctagtccttctaacgatagcactaatctcctgtgcctgcccaaccacatgcaggcttccgtctcaagatcctatcttcagtcactcggtttctctgcatccgacctggttatcagtacttggaatggctattacgagtgccgcccacagatcaccccaaatcttgtgatcttcaccatcccatactccgggtgcgggacatttaagcaggccgacaacgacacaatcgattattccaactttctcacagccgccgtttctggggggattataaagcgtcgcacggatttgcggattcatgtctcgtgccggatgctgcagaacacctgggtcgacacgatgtacatagccaacgacaccatccatgtggccaacaacacaattcaggtcgaagaggtccaatatggaaatttcgatgtcaacattagcttttacacaagcagtagttttctctaccccgtgacttcgcgaccctactacgtcgacctcaatcaggacctgtatgtccaggctgagatcctacactccgacgcggtcctcaccctctttgtcgacacctgtgtggcatctccgtattctaatgattttacctccctgacttatgatcttattaggtcaggctgtgtgcgggacgacacctacggcccttattcctctccatccctcaggatcgctaggtttcgcttccgggcattccattttctgaaccgttttccatccgtttatttaaggtgtaagatggtggtctgccgcgcatacgacccgagctctcgatgttaccgtggctgtgttctgagatccaagcgcgacgtgggttcctatcaagaaaaggtcgatgtagtgctcgggcctatccagctccagacgcctcctaggcgcgaagaagaaccaaggtag

SEQ ID NO: 146097 - DNA, 5358 bp, Artificial Sequence
  derived and/or modified sequence
atgggcatcagcaccgtgatcctggagatgtgcctgctgtggggccaggtcctcagcactggcggctggatccctcggacaaccgactacgccagtctcattccatctgaggtgccacttgatcccaccgtggccgaggggtcgcctttcccatccgagagcaccttggagagtactgtggcagaggggtcaccaatttctctggagagcacattagaaagtactgttgccgaagggagcctgatcccttccgagtccacactggagagcactgtggccgaaggaagcgattcgggcctggccctgcggctggtgaacggggatggacgatgccaggggcgggtagagatcttgtacagaggtagttggggcaccgtgtgcgatgactcatgggacaccaatgacgcgaatgtggtgtgcaggcagttgggctgcggatgggcaatgtccgcccccgggaatgcttggtttggacaggggtctggacccattgcgttagacgatgtgcggtgttccggccacgagagttacctctggtcatgcccccacaacgggtggctttctcataactgtggacacggtgaagacgccggtgtcatttgcagcgcggctcagccccagtccacacttcggcctgaatcctggcccgttagaatttcaccccccgttccgaccgagggttccgagagtagtctcgccctcagactggtcaacggaggagatcgctgcagaggtcgagttgaggttttatataggggcagttggggaaccgtttgtgatgactactgggatactaatgatgcaaatgtggtgtgtagacaattaggctgcggctgggctatgagcgcccctggcaacgctcagtttgggcaggggagcggaccgatcgttctggacgatgtaaggtgctctggtcatgagagttacttatggagctgcccccacaacggctggttgactcataactgtggccactctgaggatgcaggagtcatatgttctgcacctcaatcacgcccaacccccagcccagacacgtggcctaccagtcacgcttccactgctgggcctgagtcaagtctggccctgcgcctggtgaatgggggtgaccgttgtcaagggcgagttgaggtgctgtatcgcggttcctggggcaccgtttgcgatgatagctgggatacaagtgacgcaaacgtggtctgccggcaattgggatgtgggtgggccacatctgcacccgggaatgcccggtttggccagggctctggccccatagtcctggatgatgtgagatgctcaggatacgagtcatatctctggagctgccctcacaatggctggctgagtcacaactgccaacactccgaggacgctggggtgatatgctctgccgcccactcttggtctacaccgtcccctgacaccctcccgaccatcacactcccagcctctaccgtgggcagcgaatcctccctcgctctaaggcttgtgaacggcggtgatagatgtcaagggagagtggaggtcctttatcagggatcgtggggtacagtttgcgatgattcctgggatacaaacgatgcaaatgtggtgtgtcgccagctgggttgtgggtgggccatgtctgcgcccggaaacgctcgctttggccagggttccgggcccattgtcctggacgacgtgcgatgctctggtcacgagtcctacctttggtcgtgtccccacaacggatggctgtcacacaactgcggccactctgaggatgccggcgtgatttgttcagcgagtcagagtcgccccactccatcaccagacacctggcccacgagccacgcgagtacggccggctccgaatcatccttggccctccgacttgtgaatgggggcgatcggtgccagggaagggtcgaagtcctgtaccgcggcagctggggcacggtttgcgatgactactgggatacgaacgacgctaacgtggtgtgccgccagctaggatgtggatgggctatgtctgcacccggtaacgcccggttcggtcaagggtctggacctattgtcttagatgatgtgcgctgttcaggccatgagtcttatctttggtcgtgccctcacaacggttggttgagtcacaattgcggccaccacgaagatgcaggcgtgatatgtagcgcctctcagagccagcctacacctagcccagacacatggcctactagtcacgcctcaacggctggaagcgaaagcagcctggcgctgcgtcttgtaaatggaggcgaccggtgccagggccgagtggaggttctttacaggggctcctggggcaccgtctgcgacgattactgggacacgaatgacgcaaacgtggtttgcagacagttgggctgtgggtgggccacaagtgctcccggaaatgcccgctttggtcagggcagcggacccattgtgctggacgatgttcgctgcagcggtcacgaaagttacctttggtcctgcccacacaacgggtggctttctcacaattgtggccatcacgaggatgcaggcgtgatctgcagtgcatcacaaagccagcccacacccagccccgacacgtggcccacctcccgcgcatcgactgccggcagtgaatctaccctcgcactacgcctggtgaacggaggagatagatgtcgggggagggtagaagttctgtatcagggctcttgggggaccgtgtgtgatgactactgggacacaaacgatgctaatgtggtgtgccgccagctggggtgtggttgggccatgagcgccccagggaatgcccaattcgggcagggatccgggccgattgtgttggacgacgtccgctgctcagggcacgaatcctacttgtggagttgtccccataatgggtggcttagccacaattgtgggcaccacgaagatgctggggtgatttgctcggctgcgcagtcccaatctacaccccgcccggacacttggctgacaactaatctcccagccttgacagttggatctgaatcttccctggccctgcggttagtaaacggaggcgaccgctgcagaggccgagtcgaggtcctgtaccggggcagttggggcacagtttgtgatgacagttgggacactaatgacgccaacgtggtttgccggcaactcggctgcggctgggccatgtcagccccaggtaatgccaggttcggccaaggaagcggcccgatcgttctggatgacgtacgctgcagtggcaatgagtcttacctgtggtcatgtccccacaagggatggctgacacacaactgtgggcatcacgaggatgcgggagtaatctgttcagccacccagatcaacagcacgaccactgattggtggcaccctaccacgacaaccactgcgcgccctagctccaattgcggggggtttctcttctatgccagcggaactttctcttcaccttcctaccctgcgtactatccaaacaatgcaaaatgtgtgtgggaaattgaggtgaactccgggtacaggatcaacctgggcttctccaatctcaaactggaggctcaccataactgctcgttcgattacgtggagatttttgatggcagtctgaatagtagcctcttgctcggcaaaatctgcaatgacacccgccagattttcacaagttcttataataggatgaccatacactttcgcagcgacatatcattccagaacaccggtttcttggcctggtataactcatttccctcagatgccacactcaggctcgttaacttgaactcctcgtatgggttgtgcgcgggcagggtggagatctaccatggggggacatgggggaccgtttgtgatgactcctggacaatacaagaggctgaggtggtttgccgccagctcgggtgtgggagggccgtttcagctttaggcaacgcgtatttcggatcaggctcaggtcccatcaccctcgacgacgtggagtgttccggcaccgaaagcacattgtggcagtgtagaaatagaggatggttcagccataactgcaatcaccgtgaagatgctggagtcatctgctctggcaaccacttgtcaacaccggccccctttctgaacattactcgtccaaatactgactactcctgcggcgggtttttgtctcagccaagtggcgattttagctcaccattttatcctggcaactatcccaacaacgccaaatgcgtgtgggatatcgaggtccagaacaactacagggttacagttatctttagggacgtgcaattggaggggggctgcaactatgattatattgaggtgttcgacgggccctatcggtctagcccgctgattgcccgagtctgtgacggcgccagagggtcgtttacaagcagctctaacttcatgagcatccggttcatttccgaccactcaataacacggagaggcttccgcgccgagtattactccagcccgtcaaatgacagcacaaatttattgtgcctgcccaatcacatgcaggccagtgtgagtaggtcttacctccagagcttaggatttagcgcttccgacctcgtgatttcaacatggaatggttactatgaatgccgtccccagataacgccgaatctggtgatatttactattccttactccggctgtgggactttcaaacaagccgataacgacacaatcgattattctaactttcttaccgctgcagtctctggaggaatcatcaaacggcggaccgatcttcgaatccatgtgtcgtgccgcatgctgcagaacacatgggtggacactatgtatatagccaatgacacaatccatgtggccaataacaccatccaggtggaagaagtgcagtatgggaattttgacgtcaatataagtttttacacctctagtagttttctgtaccccgttaccagtcggccttattatgtcgacttgaatcaggatctctacgttcaggctgagatcttgcactccgatgcagtactaaccctgttcgtggatacctgcgtggcctcaccttactccaacgattttacttctttgacctacgacctgatccggagcggctgtgtaagagacgatacatacgggccctattccagcccaagtcttcgtattgcgaggttccgctttcgtgcatttcatttcttgaatcgattccctagtgtatacctaagatgcaaaatggtggtatgccgggcctatgaccctagttctaggtgttatcgtggatgtgtcctccggtctaagagggatgtaggcagttatcaggagaaggtagatgtggtcctcggacccatacagctccagacgcctccccgcagagaggaggagccaagatag

SEQ ID NO: 146098 - DNA, 5358 bp, Artificial Sequence
  derived and/or modified sequence
atgggcatcagcaccgtgatcctggagatgtgcctgctgtggggccaggtgttaagtacagggggttggatccccaggacaacagactatgctagccttattcccagtgaagttcctcttgatcctaccgtagccgagggctcccctttcccaagtgaatccacgttagaatcaacagtggccgagggttctccaatctccctggaaagtacactggagtccaccgtcgccgaggggtctttgattcccagtgagagcactctagaaagtactgtggcggagggctctgactctgggctggctctgcgcttggtcaatggagacggtagatgccagggacgcgtcgaaatcctttatagggggagctggggcacagtgtgtgacgactcatgggataccaatgacgccaatgtagtctgcagacaactaggctgtggttgggctatgtctgctcctgggaacgcctggtttggtcagggaagcggacccattgccttggacgatgtgagatgctctggccacgagagctatctgtggtcttgtccacataacggttggttatcgcataactgcggacatggcgaagacgcaggcgtgatctgttctgcggcacaaccccagagtactctgcgacctgagtcctggcctgtaaggatctctcctcccgtcccaacagagggttcagaaagctcacttgcccttaggctcgtcaacggaggtgatcgatgcagaggccgggtggaagtgctgtatcggggtagctggggcacggtgtgcgatgactactgggacactaatgacgccaacgtggtgtgccggcaactggggtgcggatgggcaatgtcagctccaggcaacgctcagttcggacaggggtctggcccgattgtccttgatgacgttagatgcagtggacacgaaagttacctgtggagctgcccccacaacggctggctcacacacaattgcggacactccgaggacgccggcgtgatttgtagtgcccctcaaagcaggcccactccaagtccagatacctggcccacgtcgcacgccagcacagccggcccagagtccagccttgctttgagattggtcaatggcggggacaggtgccagggccgcgtcgaagtgctctatcggggaagctggggcactgtgtgtgatgattcatgggacacctccgacgcaaacgtggtgtgtcgacagctcgggtgtgggtgggccactagcgcccctggcaacgccaggttcggccaaggctcaggccctatcgttcttgacgatgtgcgttgctccggatatgagtcctacctgtggtcctgccctcataatggttggctttcgcacaactgccagcactccgaggacgctggggtaatctgctctgccgcccactcttggtccaccccaagtcctgacaccctgccaaccatcaccttgccagcgtcaacagtcggttccgagtcatcactggctctgagactggtgaatgggggggacagatgccagggccgggtggaggtgctgtatcagggctcctgggggactgtgtgcgacgactcttgggatactaacgacgccaacgtcgtgtgccggcagctgggatgtgggtgggccatgagcgcacccggaaatgccaggttcggtcaaggcagcggtccaattgtgttagacgacgtccgttgcagcggccatgaatcttacctgtggagctgcccccacaacgggtggcttagccataactgcggccatagtgaagacgcgggtgtaatctgctcggctagtcagtccaggcctacgcctagtcctgatacttggccgacctcccacgccagtacagctgggagcgagtcgtcacttgcgctgcgtttggtgaacggcggggatagatgtcagggcagggtggaagtactctatagaggaagttggggcactgtatgcgatgactactgggatacaaacgacgcaaatgtggtgtgcaggcagctggggtgtggttgggctatgtctgccccagggaacgctcgctttggacagggctcaggaccaattgtgctcgacgacgtacggtgtagcggtcatgaaagctatttatggagctgccctcacaacggctggctgtctcataattgcggccatcatgaagatgctggcgtcatctgttcggcttcccagagccagcctacaccctctccagatacatggcctacttcacacgcctcgaccgccgggtctgagtcttctctcgctttaaggctcgtcaatggcggagatagatgtcaagggagagtcgaggtgctgtaccgaggcagctggggtacagtgtgcgacgattattgggatactaatgatgctaacgtggtgtgtcgccaattggggtgcggctgggccacctctgccccaggcaacgctcgtttcggtcaggggagcggcccaatcgttctcgacgatgtgcggtgcagcgggcacgagagttatctgtggagctgtccccacaatgggtggctttcacataactgtggtcaccacgaggatgccggcgttatctgcagtgcctcccaatcccagcctactcccagccctgacacctggcccacatcccgagcctcgactgccggttccgagtcaaccctcgcactgaggctagtgaatggaggggacaggtgccgcggacgagtggaagtactatatcaggggtcttggggcacagtgtgtgacgactattgggatactaatgacgcgaatgtggtatgccgtcagttaggctgcggctgggcaatgtcggccccgggtaacgcacaatttggacagggtagcggaccaattgtactggatgatgtgcggtgctcagggcacgaatcatacctatggagctgtccccacaacggttggctctcacataactgtggacaccatgaagacgcgggtgtgatttgctctgccgcacagtcacagtcgacaccaagaccagatacctggctgactaccaatctgcccgccctcaccgttggcagtgaaagcagcctggctctcagactcgttaatgggggggatcgatgtagaggtagggtagaggttctgtatcgaggtagctggggcaccgtctgcgatgactcctgggatacaaacgacgcaaatgtcgtgtgtagacaactcggttgtggttgggccatgtcagctcccggtaatgcaagattcggtcaagggagcggccccatcgtgctcgatgatgttcggtgcagcgggaacgaaagttatctatggtcctgcccccataaaggctggcttacacacaattgcggtcaccacgaggatgccggagtgatctgttcagccacacagataaactctacgaccaccgactggtggcaccctactacaactacaacagctagaccctctagcaattgcgggggtttcttgttttacgcaagtggaactttctcatctcctagctatcccgcctattatcctaacaacgctaagtgtgtatgggagattgaggtgaactctggctaccgaatcaatttgggatttagcaatttgaaacttgaggcccatcataactgctcctttgactacgtcgagattttcgatgggagtctcaacagcagcctgctgctgggtaagatttgtaacgatacacgccagatcttcacatcctcgtacaacagaatgacaatccattttcgaagtgatatctccttccagaataccggttttctggcctggtacaacagcttcccgagcgacgccacacttagactggttaatttgaatagtagttacgggctctgcgccggaagggtggaaatttaccatggcggcacttggggcacagtgtgtgacgattcctggacgatacaagaggctgaggtcgtttgccgtcaactgggatgcgggcgtgcagtatccgccctgggaaatgcttatttcggcagcggaagcgggcccattactttggatgatgtggagtgctctggtactgaatctactctttggcaatgtagaaataggggatggttctcacataactgtaatcacagggaagatgctggtgtgatttgcagtggcaatcacctgagcactcccgctcccttcctgaatattactcggccaaacactgactactcgtgcggcggcttcctgtctcaaccctctggagacttcagctctcctttttatccgggcaattatcccaacaacgcaaaatgtgtctgggatatcgaggtgcagaataattacagggtgaccgtcatcttccgcgatgtgcagttggaggggggctgtaactacgactacattgaggtgtttgatggcccctaccgctcaagcccccttattgcgcgcgtgtgcgatggagcccgaggttctttcacctcttcatcaaattttatgtctatacgattcataagcgaccatagcatcacaagacgtggctttagggcagaatattatagcagccctagcaacgactcgaccaacctactgtgtttaccaaatcacatgcaggcctctgtgagcaggagctacttacaaagcctgggcttctcggccagtgatctggtgatatccacttggaacggttactatgaatgccgaccacagataacccctaacttggtcattttcaccataccttactcaggctgcggcaccttcaagcaagccgacaacgataccatcgactattccaacttccttaccgccgctgtctccggcggcatcatcaagagacgcaccgatctacgcatccatgtctcgtgtcggatgcttcagaatacatgggtggacaccatgtacatcgcaaatgataccatacatgtggctaataataccattcaagtcgaagaagtgcagtatggaaacttcgatgttaacataagtttctatacaagcagctcctttctgtatcccgtgacctctagaccttattatgtggacttaaaccaggacctgtacgtgcaggcagaaatcttgcatagtgatgcagtgttgacgttgtttgtggacacctgcgtcgcttcaccttatagcaatgatttcacctctttaacatatgatcttatccgcagtgggtgtgtgagagacgatacatatggtccttattcatctccatcacttaggattgcacggtttcgcttccgggccttccactttttgaacaggtttcctagcgtctacctgagatgcaaaatggtagtctgccgcgcatatgacccgagtagtcggtgctaccggggctgtgtgctgagatctaaaagggatgtcggttcgtatcaggagaaagttgacgtggtcctgggcccgatccaattacagactccacctcggagagaagaggagcccaggtag

SEQ ID NO: 146099 - DNA, 5358 bp, Artificial Sequence
  derived and/or modified sequence
atgggcatcagcaccgtgatcctggagatgtgcctgctgtggggccaggtcttatccacaggtggatggatcccgcgcacaaccgattacgctagcttgatcccatcggaggtgcccctcgatccaactgtcgcagaaggaagcccatttccctctgagagtacactggagtcaacggtcgcggaaggtagtccaatatccctagaaagcaccctcgagagcacagtcgccgaaggcagtcttataccaagtgagagcaccctcgaatccactgtcgccgaaggtagcgattcaggacttgcgctcagattggtcaacggagacggcaggtgtcagggcagggtggagatactataccgcggctcttggggaacagtgtgcgacgattcctgggacactaacgatgcaaatgtagtatgtaggcaattaggatgtgggtgggcaatgtctgcccctgggaacgcatggttcggccagggatccggccctatagcccttgatgacgtgcgttgttccggccatgaatcatacctgtggtcctgtccccacaatgggtggctgagccacaactgtgggcacggggaagacgctggcgtgatttgtagcgccgcccagccccagtccactttgcggcccgaatcatggcctgtgcgcattagccctcctgtacccaccgagggcagcgagtcgtctttagccctcagactcgttaatggaggtgacaggtgcagaggacgcgttgaagtgctttaccgagggagttgggggacagtttgtgatgattattgggatacaaatgatgcgaacgtggtgtgtagacagctcggatgcggctgggcaatgagcgctcctggaaacgcccaatttggccagggtagcggtcccatcgttttagacgacgttaggtgtagtggccatgagtcatatctgtggtcctgcccacacaatggctggctgactcataattgtgggcactctgaggacgccggcgtgatttgtagcgcgccgcaaagtaggcctactcccagcccagatacttggccgacatctcatgctagcaccgctgggcccgagtcaagcctcgcgcttaggctcgtaaatgggggcgataggtgtcaggggcgggttgaggtactttatcggggatcctgggggacagtttgcgacgactcttgggatacttccgatgcaaatgtcgtgtgtagacaacttggttgcgggtgggccacgtcagcccccgggaatgcccgttttggacaagggtccggcccaatcgtgttagatgacgtccgatgctctggctatgaaagctatttgtggtcctgtcctcataacggatggttatctcacaactgtcaacacagcgaggacgctggcgtgatttgtagcgccgcccactcttggtcaacaccctctccagatacactccctacaataacgctccctgcttcaacggtgggctcggagagctcgcttgctctgaggctggtcaatgggggcgatcgctgccaagggagggtggaggtcctgtatcaaggatcctggggcaccgtctgtgatgattcctgggatactaacgacgcgaacgtggtttgccgacagctggggtgcggatgggccatgagcgcacccggaaatgccaggtttgggcagggctctggtccaatcgtgctcgacgatgtcagatgctctgggcacgagtcatatctttggtcgtgcccgcataacggctggctgagccataactgtggtcatagcgaggacgccggagtgatctgttccgcctctcaatcgcgccccacccctagtccagacacctggcccacctcacacgcctccacagcaggatctgagagctctctagctcttagactcgtcaacggcggggatcgctgtcagggccgagtggaggtgctgtaccgtgggagctggggaacagtctgcgacgactactgggacacaaatgatgctaacgtggtctgtagacagctgggatgtggttgggcaatgagcgctcccggcaacgcacggtttggtcaggggtccggacctatagtgctggatgatgttcgctgcagcgggcacgaaagctacctttggtcctgccctcacaacggctggctgtcccacaattgtggacatcatgaggatgcaggggtaatatgctccgcttcgcagtctcagccaacgccatcacctgacacttggccaactagtcacgcttccacagccggctcggagagtagcctcgccctccgtttggttaacggaggcgaccgttgccagggcagagtggaagtgctgtatagagggtcttggggtaccgtgtgcgatgattactgggacactaacgacgcaaatgttgtgtgtcgccaattgggatgcggctgggcaacctcagccccaggcaatgctcggttcggccagggttcaggacccatcgtcctggacgacgtccggtgctctgggcatgaaagctacttgtggagttgcccacacaacggatggttgtcccataattgtggccatcacgaagatgcaggggtaatttgcagcgccagtcaaagtcagccaaccccgagcccagacacctggccaacatccagagcgagcaccgccggttccgagtctaccctcgcgctccggctggtcaatggaggagataggtgccggggcagagtcgaagtgctttaccagggttcttgggggactgtatgtgatgactattgggacacaaacgacgctaatgtggtgtgccgccagcttggttgtgggtgggcaatgtccgcccccgggaacgctcagtttggccaagggtctggacctattgttttggatgatgttcgctgctcgggccacgaaagctatctgtggtcatgtccgcacaatgggtggttaagccacaactgtgggcaccacgaagatgctggcgttatttgctcagcggcacaaagccagtccacacctcgacctgacacatggttaacaacaaatttgcccgccctaacggttgggtctgaaagtagtctggctctgcgcctggtcaatggcggcgaccggtgtcgaggccgcgtggaggtgctgtaccgcgggtcttggggtaccgtgtgcgatgacagttgggacactaatgatgctaacgtggtatgccgtcagctgggttgcggctgggccatgagcgcccccggcaacgccaggttcgggcagggctctggtcctattgtgttggacgacgtgcgctgcagtggtaatgagagctacctgtggtcttgtcctcacaaaggctggctgacacataattgcggccatcatgaggatgctggcgttatctgtagcgctactcagatcaattctaccactacggattggtggcaccccactaccacgaccaccgcccgcccctcctcgaactgcgggggctttctattctacgcatccggcaccttttccagcccctcgtatccagcctactaccccaataacgcaaagtgcgtctgggagattgaggtgaactccggatacaggataaacttggggttctccaacctcaagttggaggctcaccataattgctctttcgactacgtggagattttcgacggcagcctgaactctagcctgctgctgggcaagatctgcaatgataccagacagatctttaccagcagctacaatagaatgacaatacacttccgaagcgacatttcttttcagaatactggttttctagcttggtacaattcattcccttctgatgccactttacgcctggtaaatctgaactccagttatggactttgcgcaggtagagtcgagatttaccacgggggtacctgggggacggtgtgcgacgactcgtggaccatccaggaggccgaggtagtgtgtcgccagctcggctgcggtcgagcggtgagtgcacttggcaatgcctatttcggcagcgggtctgggccaattactctcgacgacgtcgaatgttcaggtactgagagcaccctctggcagtgccgaaatcgcggatggttttctcacaattgcaatcatagggaggatgcaggggtgatctgctccggtaaccacctgagcacgcccgctcctttcttaaatatcactagaccgaacaccgactatagctgcggtggattcttgtcccagccatccggcgactttagctctcccttttaccctggcaattatccaaataatgccaagtgcgtctgggatattgaggtgcagaacaactaccgcgtgactgtcattttccgggacgtgcaattggaggggggttgcaactacgattatattgaagtgttcgacggaccctatagatcttctccactgatcgcacgggtctgcgatggcgccaggggatcgttcactagttccagtaattttatgtctattagatttatctctgaccatagcattaccagacgcggatttcgggctgaatactactcatcgcccagcaatgactccactaatctgttatgccttccaaatcacatgcaagcgagcgtgtcaagatcttaccttcagtccttgggattcagtgcttcggacctcgtgatcagcacttggaacggctattacgagtgccgaccgcagatcactccaaacttggtgatctttacaataccctatagtgggtgcgggactttcaagcaggccgacaatgacactatcgactatagcaacttcctgacagctgcagtttcaggcgggattatcaagcggcgaaccgatctgcgcatccacgtctcctgtcgcatgttgcaaaacacatgggtggacacaatgtatattgcgaatgacacgatccatgtcgcaaataacaccatccaggtggaggaggttcaatacgggaattttgacgttaatatttcattttacaccagtagcagctttctctatccagttactagtcggccttactacgtggatttaaaccaagacctgtacgttcaggccgaaatcctccactcagatgcggtgcttacactctttgtggacacttgcgtggcgtccccatatagtaatgactttacctcattgacttatgaccttatccgctccggttgtgtgagagacgatacatacggtccctattcgtccccctcgctcagaattgctaggtttcggtttcgagctttccatttcctgaatcggtttccgtcagtgtacctccgctgcaagatggtagtatgccgggcttatgatccctcctcccgttgctataggggatgtgtgttgagatctaagcgagatgttggttcctatcaggagaaagtcgatgtcgtgttggggccaattcagttgcagacccctccccgacgagaggaggagcctcgctag

SEQ ID NO: 146100 - DNA, 5357 bp, Artificial Sequence
  derived and/or modified sequence
atgggtattagtacggtgatccttgaaatgtgcctcctgtggggtcaggtgctgtcaaccgggggatggattccacgcactaccgattacgcctcactgatcccctccgaggtgcctctagatcccaccgtggcagagggatctcccttcccctccgaaagtactctggagtcgacagttgcagagggcagccccatttccttggagagtaccttggagagtacagtggcggagggcagtctcatcccctccgagtcaaccctagagagcactgtcgccgagggttccgacagcggactcgccctgcgcctcgtcaacggtgatggcaggtgtcaaggacgagtagagatactctatcgcggatcatggggtactgtctgtgacgattcctgggataccaatgacgccaatgtggtgtgtagacagttgggctgtggatgggcaatgtcagcgccaggtaatgcttggtttggccagggatcaggccctattgccctggacgacgtgcggtgttccggccacgagtcctacctgtggtcttgcccgcacaatggatggctttcccacaactgcggccatggcgaggatgctggagtgatctgttcagccgcacaaccccagtccactctgagaccagagtcctggcccgttaggatttctccacccgtgcccaccgagggatccgaatcttctctcgcacttagactagtgaacgggggtgatcgatgccgcggtagagtggaggtgctgtacagagggagctggggtacggtttgcgacgattattgggataccaatgatgcaaatgtcgtgtgtaggcagttaggctgtggttgggcaatgtccgcgccaggaaatgcacagttcggacaaggcagcggtccaatcgtcctggatgacgtgcgatgctccggacatgaatcatacctttggtcatgccctcacaatggatggctcacccataattgcggtcattcagaggacgccggagtcatatgttctgcgcctcagtcccgcccaacaccttcgcccgacacctggccgacatcccatgcttcaacggcgggacccgagtcgtctctggccctgcgccttgtgaacggtggagatcgatgccaggggcgagtagaagttctttacagagggtcctggggcaccgtgtgtgatgatagttgggacacatccgacgcgaatgtagtctgtcggcaactgggttgtggctgggccaccagcgccccagggaacgctcggtttggacagggctccgggcctatcgttctggatgacgttcgctgttcaggatatgagagttacctgtggagctgtcctcataacgggtggcttagtcataactgtcagcactcggaggacgcaggggtcatctgttccgccgcacattcatggtcaaccccaagcccagatactcttcccaccatcacactgcctgcttcaacagtcggaagcgaatcaagcctggctctgaggcttgttaatggaggcgataggtgtcaggggagagtagaagttctataccaggggtcctgggggactgtgtgcgacgactcctgggacacaaatgatgcgaatgtggtgtgccgccagctggggtgtggatgggccatgtccgcacccggaaacgcccgtttcgggcagggatccggccctatcgttctggatgatgtacgttgttccgggcacgagtcctatctatggtcatgtcctcacaatggctggctgtctcataattgcgggcacagcgaagacgccggagtaatctgttccgccagccagtccaggcctacgccctctcccgatacttggcccacaagccatgcttctaccgccggaagtgagagctccctcgcactccggctggtgaacgggggtgaccgatgtcagggcagggtggaggttctgtataggggctcttggggtacggtctgtgacgattattgggataccaacgacgccaacgtcgtgtgtcgccaactgggctgcggatgggcgatgtccgctccgggaaatgcgcgatttggccaaggcagcggacccatcgtactggacgatgtccggtgttccggccatgaatcatatctatggtcttgccctcacaacggatggctgtcgcacaattgtggtcaccacgaagatgctggagtgatctgttcggcttcccagtcacagcccacccccagtcccgatacttggcccacctctcatgcctctacagcaggctctgagtcttccttggccctccgcctggttaatggcggtgatagatgccagggtagagtcgaggtactgtacagaggcagctgggggacagtttgtgacgattattgggataccaatgatgctaacgtggtgtgtaggcagctcggatgcggctgggccaccagcgcccctggcaacgctaggtttggccagggatctgggcctattgtactcgacgatgtgcgatgttccggccatgaatcctacctgtggtcatgcccccacaatggctggctgtcccacaactgtgggcatcatgaagacgctggtgtgatatgttctgcatctcaatcccagccaactccttcacccgatacttggcctacctcaagggcatctacagcgggatccgaatccactctggccctccgcctggtgaacgggggtgacaggtgccgcggtcgtgttgaggtgctttatcagggaagttggggcactgtgtgcgacgactattgggataccaacgatgctaacgttgtctgccgccaattgggttgcgggtgggccatgtccgcccctggcaacgctcaatttgggcagggttcaggtcccattgtcttggacgatgtgcgatgctctggacacgaatcctacctctggtcttgtcctcacaacggctggctatcacacaactgtggtcaccatgaagacgcgggtgttatctgttcagctgcacagtcgcagtctactcctaggccagatacctggctgacaactaacctgcccgctttgaccgtgggtagtgagtctagtctggccctgcgattagttaatgggggagatcgttgtagaggacgagtggaagtgctttaccgagggagttgggggacggtatgcgacgattcctgggataccaatgacgccaatgtggtttgccgtcagctgggatgtggatgggctatgagtgcccctggtaacgctagatttggacagggctctggtcccattgtgctggatgacgttcgctgttctggcaatgagagttacttatggtcctgtccacacaagggctggctgacccacaactgtggccaccacgaagacgccggagtgatttgttctgccacccagattaatagcaccacaactgattggtggcaccctacaacaaccaccacagctcgccctagcagcaactgtgggggatttctattttacgcttccggaacattctctagccctagctatcccgcatattatcccaacaatgctaagtgtgtctgggaaattgaagtgaacagcgggtaccgcataaacttaggatttagcaatctcaaattggaagcacatcataactgtagctttgattacgtcgaaatctttgatggcagtctgaactcatcgcttctcctcgggaagatctgcaacgatactaggcagatctttacaagctcgtacaacagaatgaccatccacttcaggagcgacatctcatttcagaatacaggatttctggcctggtacaattccttccccagtgatgctaccctccgcctggtcaacctcaattcctcgtatggcctgtgcgctggtagggtagaaatataccacggaggcacgtggggaacagtttgtgacgatagttggactatccaagaagctgaagtcgtgtgccgccagttagggtgtggacgtgccgttagcgctctggggaacgcttacttcggttctggcagcggacccatcaccctagacgatgtggagtgcagcgggactgagtcaactctgtggcagtgtcgtaacagggggtggttttcacataactgcaatcaccgggaggatgcaggagtcatttgtagtggcaatcacttgtcaactcctgcgccattcctgaatatcacccggccaaacaccgactatagctgcgggggttttctctcacaaccctctggtgactttagcagccccttctatccgggaaactatcccaataatgcaaagtgcgtttgggacattgaggtccaaaacaattacagggtcacagtgatcttcagggatgtccagctggaaggcggatgtaactatgattacattgaggtctttgacggcccttaccgaagcagcccacttatagccagggtctgtgatggtgctcgcggaagtttcacaagctcttccaactttatgtccattagatttatcagcgaccatagcattaccagacggggatttcgtgccgagtattactcctccccatccaatgactccactaatctcctgtgtcttccaaaccacatgcaggcttctgtatcacgcagttatctgcagagtctgggctttagcgcttccgacctggtgattagtacatggaatggctactacgagtgccggccacagatcacccctaatcttgtgatttttacaatcccatactccgggtgtggtacattcaaacaagcggataacgacacaattgactactctaacttccttacagccgctgtctcgggcggtatcataaaacgaagaactgacctgcgcatccacgtaagttgtcggatgctgcagaacacttgggtagacactatgtacatagctaatgacaccatccatgtggccaacaacacaatacaagtcgaggaagttcaatatggcaatttcgacgtcaatatctccttctatacatcttcgagctttctgtatcctgttacctcccggccatactatgttgacctgaatcaggatctgtatgttcaagcagaaatcttacactctgacgcagttctgacattgttcgtagacacgtgcgttgcaagcccttacagtaatgacttcacctcgttaacctacgacttaatccggagcggatgcgtcagggacgacacatacgggccatatagctcaccaagcttgcggatcgcgcgatttagattcagagccttccacttcctgaaccgattcccgtctgtctacctgcgttgcaagatggtagtgtgtcgcgcatatgatcctagcagccgttgttatcgaggttgtgtattgcggagtaaacgggacgttggatcatatcaggaaaaggtcgacgtggtattggggccaattcagctgcagactcctccccgtagagaagaggagcctaggta

SEQ ID NO: 146101 - DNA, 5357 bp, Artificial Sequence
  derived and/or modified sequence
atgggcatctccaccgtaatccttgagatgtgcctgctgtgggggcaggtcctaagcaccggcggatggatcccaagaacgaccgactatgcatcactgataccttcggaagtacccctggatcctactgtcgcagaaggatctccctttccatccgagagcacgctggagagcacagttgcagagggtagccccatttcactcgaatctacgctagagagcactgtggcggagggctcactgatacccagcgaatccacactggaaagcaccgtcgccgaagggtctgattcaggactggcgctgagactggttaacggagacggacggtgtcagggccgagtggagattctgtataggggcagttggggcacagtctgcgatgacagctgggacactaacgacgcgaatgtcgtgtgccggcaattaggttgcggatgggccatgagcgccccaggaaacgcctggtttggccaggggtctggacctattgcattagacgatgtgaggtgctcagggcacgagagctacctgtggtcatgtccccataatgggtggctgagccacaactgtggccatggtgaggatgccggagttatttgttccgctgcacagccccagagtactctgcgaccagaatcttggcctgtgcggatcagcccgccagtgcccactgagggctctgaatctagcctcgctttgcggctcgtcaatggcggagaccgctgtcggggtcgcgtggaggtactctacagaggctcctggggaacagtgtgtgacgattactgggataccaatgacgccaacgtggtgtgccgtcaattaggatgcggctgggccatgtccgcccctggaaacgcccagttcggccaaggttcaggcccaatcgtgttagatgacgtgcgctgttctggtcacgagtcctacctgtggtcttgtccacacaatgggtggctgactcacaattgcggtcattctgaggatgccggtgtgatttgttctgctccacagagccgcccaacaccaagccctgatacatggcctacctcacatgccagcacagcgggtccggaaagttccctggccctcaggctggtgaacggaggggacagatgccagggtcgagtcgaggtgctatacagaggatcttggggaactgtttgcgacgactcttgggatacgagtgacgctaacgtggtgtgccggcaactcggatgtggctgggccacgtctgctcccggtaatgcgcgtttcggacaaggctcaggaccaattgtgctggatgatgtgaggtgttccggatacgaatcttacctgtggtcgtgccctcacaatgggtggctgtcacataactgtcagcattcagaggatgcaggggtcatctgcagcgccgcacattcttggagtacaccctccccggacaccctaccaactattactttacccgctagcacggtcggaagtgaatcatcactcgccctcaggctggtaaacggcggtgatagatgccaaggtcgggtcgaggttctttaccaggggagttggggcacagtatgtgatgacagttgggacacaaacgatgcgaatgtagtgtgtaggcagctcggctgcggctgggcaatgagcgcacctggcaacgcccgattcggccaaggtagcgggccaatcgtgctcgacgatgtaagatgttcaggccatgaatcttacttgtggtcctgtccacacaacggctggctgtcccacaactgtggtcattctgaggacgctggcgtaatctgttcagcttcacagtcgcgccctactccttctccggacacctggcctacatcccacgcatcgaccgccggttccgaaagctctctggccctccggttggtaaatgggggtgatcgctgtcagggacgggtggaagtgctttatcggggtagttggggcacagtgtgtgatgactattgggatacaaacgacgcgaacgtcgtgtgcagacaactgggatgtgggtgggcgatgagcgcgccaggaaatgccaggttcggccagggcagtggcccaatcgtgctggatgacgtgaggtgcagtggccatgagtcatatctgtggtcatgcccacacaatggctggttgtcacacaattgtggacaccatgaggacgcaggggttatctgttcggcaagtcagtcgcaacccaccccgtcccccgatacatggcctacttcccatgcatcaaccgcaggaagcgagtcctcccttgcactgaggctcgtcaacggaggtgatagatgtcaaggcagggtcgaagtattataccggggttcctggggtacagtctgcgacgactattgggacacgaacgatgcaaatgtcgtgtgtcgccagttggggtgcggctgggccactagtgcaccagggaatgcccgttttgggcaaggatccggtcctatcgtgttggatgacgttcggtgcagcggacatgagtcctatctttggtcctgcccccacaatgggtggctgagtcacaactgcgggcatcacgaagatgctggagtgatttgttctgccagccagtctcaacccacaccgtcccctgacacttggcccactagtagggcgtcgaccgccggaagcgagtctactttggcactgagactggtgaacggcggtgatcgctgcagggggcgagttgaagttctgtatcaggggagttggggaaccgtgtgtgatgattactgggacactaacgatgcaaatgtggtgtgcagacagctgggctgcgggtgggccatgagtgcccctgggaacgcacaatttggacagggctccggaccgatcgtgcttgacgacgttcgctgttcaggccacgagagttatttgtggagctgtcctcataatggatggctgagccataattgtggtcaccatgaagatgcgggtgtaatttgcagcgcggcacagtcccagtccacccctagacccgatacctggcttaccacaaatctgcccgcactgacagtcggaagcgagtcttctctggctctccggttagtgaacggcggagatcgttgccgtgggagagtcgaggtgctttatcggggatcctggggaaccgtttgcgatgacagttgggacaccaacgacgcgaatgtggtgtgccgccaactgggttgcgggtgggcaatgagcgccccaggcaatgcacggtttggtcaagggagcgggcctatcgtattggatgatgtaaggtgttccggaaacgagtcttacctctggagctgtccgcacaagggctggctcacccacaactgtggacaccacgaagacgccggagtcatttgctcagccactcagattaacagtactacaactgattggtggcatcccacaactacaactactgctcgtccatcgtcgaattgtggagggtttctgttctatgcatctgggactttcagctccccctcatatcccgcatactaccctaataacgccaaatgcgtgtgggagatcgaggttaactcgggttacaggattaacctgggattttcgaacctcaaactggaagcccaccacaactgctccttcgattacgtggagatttttgacggtagcctgaacagctcgctgctcctcggaaaaatttgcaacgacactcgccagattttcacctcctcctataaccgcatgacgatccacttccgaagtgacatcagttttcagaatacagggttccttgcctggtacaactccttcccctctgatgcaaccttgcggctagttaacctgaattcgagctatgggctgtgtgccggaagggtggaaatataccacggtggaacctgggggaccgtttgtgatgatagctggacaatacaggaagccgaggtggtctgtcggcagctggggtgcggtagagccgtcagcgcactggggaatgcctacttcgggagcggctctggcccaatcacactggacgacgtggagtgttccggcaccgagtccacgctgtggcagtgcagaaacagaggctggttcagccacaattgcaatcaccgtgaggatgcgggagtaatctgcagcggcaatcatttgagcacgccagcgccatttctcaatattacccggcctaacaccgattacagttgtgggggatttctgagccagcccagcggagacttttcgtctcctttctatcccggtaactaccccaataacgcaaagtgtgtgtgggatatcgaggttcagaataactatagagtgacggtcatctttcgtgatgtgcaactggaggggggttgtaactatgactatattgaagtgttcgacggaccatatagatcatcgccactgattgcacgcgtgtgcgacggcgctagaggcagcttcacttcaagttcaaatttcatgtctattcgttttataagtgaccattcaatcacacggcgaggtttccgcgctgaatattacagcagtccatctaatgactcaactaatctgctctgtctgcctaaccacatgcaggcctccgtgtcccggtcgtacctgcagtctctgggatttagcgcatcagacctggtgatcagtacctggaacggatattacgagtgtagaccccaaatcactccaaatctcgttatatttacaataccttatagcgggtgtggcacattcaagcaggccgacaacgataccatcgactattcaaacttcctgaccgcggctgtgtctgggggaattattaaacgaagaacagacctgaggattcacgtgagttgcagaatgctacagaacacctgggtggacacaatgtacatagcaaacgatacaattcatgtggcaaataatacgatccaggttgaggaggttcagtatgggaattttgatgttaacatctccttttacacgtcaagctccttcctgtatccagtgactagcagaccgtactatgtcgatttgaaccaggacctttacgtccaggcggaaattctgcacagcgacgccgtgctgacattgtttgtggatacatgtgtggcatccccctacagcaacgacttcacatccttgacgtatgatctgatccgttcaggttgcgtgcgggacgacacatatggtccttacagctctccctctctccgaatagctaggtttagatttcgtgcttttcacttcctgaaccgtttcccttccgtgtatttacgttgtaagatggttgtatgtcgagcatacgatccgagctctcggtgctatcgtgggtgcgtattacgtagcaagcgggatgtggggtcttaccaagagaaggtggacgtggtgttgggcccaattcagctacagactccccctagaagggaggaagagccacggta

SEQ ID NO: 146102 - DNA, 5357 bp, Artificial Sequence
  derived and/or modified sequence
atgggaatttccactgtgattctcgagatgtgtctattgtggggccaggttttatccacagggggatggatccctcgaaccacagactacgcttcgctgatccctagtgaggtgcccctggacccaactgtcgccgaaggctcacctttcccttccgagagcacactggaatcgacagtggcagaaggtagcccaataagcttggagagcaccctggagtccaccgtggctgagggatctctcatccccagtgagtctaccctggagtcaaccgtcgctgagggcagcgattccgggctcgccctgaggctcgtaaacggcgacggaaggtgccagggtcgggtggagattttatacaggggctcatggggtaccgtttgtgatgactcttgggacaccaatgatgcgaatgtcgtctgtcgccagctcggttgcggctgggcaatgtctgccccaggcaatgcctggttcggccagggttcaggtcccattgccctagatgatgtgcggtgttccggccacgagtcttacctttggtcatgtccacataacgggtggctgtctcataattgcggccatggtgaagacgctggcgtcatatgcagcgcagcccaaccgcagtccacgttgaggcctgagtcttggccagttagaatctccccccctgtgccaactgagggtagtgaatcttctcttgctctcaggttagtgaacgggggagataggtgtcggggaagagtggaggtgctatatagaggctcttgggggacagtgtgcgatgactattgggacaccaatgacgctaacgtggtgtgtaggcaactgggatgcggttgggccatgtcagcacctgggaatgcccagtttggacagggaagtggtccaatcgtcctagatgacgtgagatgctccgggcacgaatcttacctctggtcctgtccacacaatgggtggctcactcataattgtgggcattcagaagacgcaggagtgatttgttctgcccctcagagtcgcccaaccccatcacccgatacttggcccacaagccacgcgtctactgccggacctgaaagctcccttgcgcttcgtctggtgaacggaggcgacagatgccagggcagggtggaggtgctgtaccgcggatcgtggggcacagtttgtgacgattcctgggatacctctgacgctaatgtagtgtgcaggcagttgggttgcggctgggctacaagcgctcctggaaacgcacgattcggacagggctccggcccaattgtgctggacgatgtgagatgtagtggatatgagtcttacctgtggtcttgtccacacaacgggtggctgtcccacaactgccaacattcagaggatgcaggcgtgatatgctctgccgcacacagctggagtacaccctcccctgataccctgccaactataactctgcctgcatccaccgtgggctctgagagttcactcgcgctgaggctggtgaatggaggagaccgctgtcagggcagggtggaggtgctttatcaggggtcatggggaacagtctgtgatgacagctgggataccaatgatgcaaatgtcgtctgcaggcagttagggtgcggttgggccatgtctgctcccggaaatgcgagatttgggcaaggttcagggccaattgtgctggacgacgttcgttgttctggccacgagtcttatttgtggtcctgtccacataacggatggctgagccacaattgcggccacagcgaggacgccggtgtaatttgttctgcatcccaaagccgcccaacaccgtcacccgacacttggcccacgtctcacgcgtctactgccggatcagaaagttcactagccctgagattggtgaacgggggagatcggtgtcaaggcagggtcgaggtcctgtatcgagggtcatgggggactgtatgtgatgactattgggataccaatgatgcgaatgtggtgtgcagacagctcgggtgtgggtgggctatgtctgctcctggaaacgcgaggtttggacaaggctccggcccaatcgtcctcgacgacgtgaggtgttccggacacgagtcttacttgtggagctgtccccataatggatggctgagtcacaattgcgggcaccacgaagacgccggagttatttgcagtgctagccaatcccaaccgactccaagcccggatacatggccaacctcgcatgcctcaacggcgggttctgagtccagcctggctctgaggctggtgaacggcggagatcgctgccagggtcgcgtggaggttctgtaccgcggttcttggggcaccgtctgtgatgactactgggacaccaacgatgccaatgtcgtttgcagacagctgggctgtgggtgggcaacctccgcccctggaaacgcgaggtttggtcagggctccggcccaattgtgctggatgatgtccgctgcagtgggcatgaatcatacctgtggtcttgtcctcacaatggctggttgtcccataattgtgggcaccacgaggacgctggagttatttgctctgcatcacagtcacagcctaccccaagcccagacacctggccaaccagtagagcatctacggcaggatctgaatctactcttgccctgcgcctggtcaatgggggtgatcggtgtcgaggaagagtagaggtgctgtatcagggttcttggggaactgtgtgcgatgattactgggatactaacgatgctaatgtggtctgcagacagctggggtgtggatgggctatgtcagccccaggtaacgcccagttcggtcaggggtcaggaccgatcgtgctggacgatgtcaggtgcagcggccatgaaagctacctgtggtcttgtccgcacaacggatggctttcacataattgcggccatcatgaagacgccggtgtcatttgcagcgctgcgcagtcacaatccacaccacggcctgacacatggctcacgactaacttgccagctctaaccgtcgggagtgagtcttctttggctttgagactggtgaatgggggtgatcgctgccggggtagggtcgaggtgctgtaccgtggctcatggggtaccgtttgcgacgactcctgggacaccaacgacgcaaatgtggtgtgtcgccagctaggttgcggttgggccatgagcgctccaggaaatgctcgattcggccagggttcaggtccaatagtgctcgatgatgttcggtgtagcgggaatgagtcctacctctggtcatgccctcacaagggatggctgactcacaattgtggccaccacgaagacgccggagtcatatgcagcgccacccagatcaattccaccaccacagactggtggcaccccaccaccactacgacagccaggcctagctcgaattgtgggggattcttattttacgcaagtgggactttttcgtcgccttcgtaccctgcatactatcccaacaacgctaaatgtgtgtgggaaatagaggtgaattcggggtacaggattaacctgggattttctaatcttaaactagaggcgcatcacaattgctcgttcgattatgttgagatctttgatggctccctgaacagctcacttttgttggggaagatttgcaatgatacgagacagattttcacatctagttacaacagaatgaccatccatttcagaagcgacatttcattccagaatacgggctttttagcttggtacaactcctttcccagcgacgcgacactaaggctggtaaacctcaactcatcttacggcctctgcgcaggacgcgttgagatctaccatggcggaacttggggcaccgtctgcgacgactcttggacaatccaggaggctgaagtcgtttgtaggcaactgggctgtgggagagccgtgtcagcacttggtaacgcctattttgggagtgggtcgggacctatcactctggacgacgttgaatgtagcggcaccgaatccacattgtggcagtgtcgtaaccggggttggttttcccataattgcaaccatcgcgaggacgccggagtgatctgctctgggaaccatttgagcactcccgctccctttctgaacattacaaggcctaatacggattactcttgcggcggtttcctatcccaaccttccggagactttagctctcccttctatcctggaaactacccgaacaatgcgaaatgtgtgtgggacatcgaagttcagaacaactatcgagtgactgttatctttcgcgacgtccagctcgagggcggttgtaactatgattacatagaagtgttcgacggcccataccggtcgtctcccctgattgcaagagtatgtgatggcgcaaggggcagctttacgagctcatcaaactttatgagcatccgcttcatatcagaccatagcattaccagacggggatttagggccgaatattactcctcaccgtccaatgatagcacaaacctgctctgcctgccgaatcatatgcaggcctccgtgtcccggtcctacttgcaaagtctcggcttcagcgcatccgacctggtgattagcacctggaacggctactatgaatgcaggccacagatcactcctaacctcgtgatcttcacaatcccctattccggttgcggcaccttcaaacaggctgataacgacactatcgactactcaaatttcctgacagctgcggtcagtggaggcatcatcaagagaaggactgacctgcgcatacacgtcagttgtcgaatgctgcagaacacatgggtagatacgatgtacattgcaaatgatacaatacacgtcgctaacaacacaatccaggtcgaagaggtgcagtatggcaatttcgacgtgaacatttccttctatacttcgtcctcgttcctctatcccgtgacctctagaccgtactacgtggacctgaatcaggatctgtacgtgcaagctgagatccttcactccgatgcggtgttgacccttttcgttgatacctgtgtggccagcccctatagtaatgactttacctcactgacatatgatctcataaggagcggctgtgtgagggatgacacctatggcccttattcatccccctcgttgagaattgccaggttcagattccgagcattccactttctgaatagattcccatccgtctacctgcgctgtaagatggtggtgtgccgcgcttacgacccctcaagtcgttgctatcggggttgcgttttgcgaagtaagcgggacgtgggcagctaccaggaaaaagttgacgttgtgttgggtcccattcagctgcaaacaccgcctagacgcgaggaggaaccccgtta

SEQ ID NO: 146103 - DNA, 5357 bp, Artificial Sequence
  derived and/or modified sequence
atgggtatctcaactgtcatcttggaaatgtgccttctttgggggcaggtactttcaacaggtgggtggatccccaggacaacagactatgctagcctgattcctagcgaagtgccactcgacccgactgtggcagaaggttctccgtttccaagcgagtctactctggaaagtaccgtagcggaaggttctccgatctctctggagtctactctcgaatcaaccgtggcagaagggagcctcataccctcagagagtaccctggagtccacagtggcagagggctcagactctggtctcgcgctgcgtcttgtgaacggggacgggaggtgtcaggggcgtgtggaaattctttataggggctcttgggggaccgtgtgtgatgacagttgggatactaatgacgccaacgtggtgtgtagacaactgggctgtggatgggctatgtctgcccctggcaatgcatggttcggccaaggctcaggaccgatcgcgctagacgacgtgagatgtagtggccacgagtcctatctgtggtcctgcccccacaatggttggctctctcacaactgcggacatggcgaagacgccggagttatctgcagcgccgcacagccgcaatctaccctgcgccctgagagctggccggtcaggatttcgccccctgtccccacagaggggagcgaaagcagcctcgctctcaggctggtcaacggcggtgaccgatgtcggggacgcgtggaagtattataccgtgggagttggggtactgtgtgtgatgactactgggacacaaacgatgctaatgtggtatgccggcagcttggatgcggatgggccatgagcgcaccaggcaacgctcagttcggtcaaggatctggccctatagtcctcgacgacgttagatgtagcgggcacgaatcctacttgtggtcatgcccgcacaacggatggttgactcataactgtggacactcggaggacgctggcgtgatttgctcagcaccccaatcacgcccaacccccagccctgatacgtggcctactagtcacgctagtactgcaggacccgagtcatcactggcactccgactggttaatggcggtgatcgttgtcagggcagggtggaggtactgtacaggggatcctggggcactgtctgtgatgattcgtgggacacatccgacgccaatgttgtgtgcaggcagttggggtgcggatgggccacctccgccccaggcaatgccaggttcgggcagggatctggaccaattgtactggacgacgttcgatgtagcggttatgaatcatacctgtggagctgcccccacaacggctggctgagccacaactgtcagcatagcgaggatgctggggtgatctgcagcgccgcacacagctggagcacaccatctcctgacactctgcccaccattacgctccctgcctccaccgtgggtagcgaatcctctctggcactgagactcgtcaatggcggtgaccggtgccagggtcgggtggaggtcctctaccaggggtcctggggcaccgtttgcgacgactcctgggacaccaatgacgcaaatgtcgtgtgtagacaattaggatgcggctgggccatgtcagctcccggtaacgctcgtttcggtcagggtagtggccctattgtgctcgatgatgtcagatgctccgggcatgagagctatttatggagctgtcctcacaacggttggctgtcacacaattgtggccattctgaggatgccggtgtcatttgtagcgccagccagagtagacctacaccaagtccagacacttggccaacctcccatgcttccaccgcagggagtgaatcttctctggccctgcggctcgtgaatgggggtgatcggtgtcaggggagagtcgaggtgctctatagaggaagttgggggacagtgtgcgacgattattgggatacaaatgacgccaatgtggtgtgccgccagctgggttgtgggtgggctatgtccgctccgggaaatgcacgattcggtcagggcagcggacctattgtgttggatgatgtcaggtgttccggccacgaaagctacctgtggagctgtccccataatggatggcttagccacaattgtggccatcacgaggacgcaggcgttatttgctccgccagccagtcccaacccacaccttcgcccgacacatggcctactagtcacgcatctaccgcaggcagcgagtctagcttggctcttcgccttgtgaacggcggagatcgctgccaaggccgtgtcgaagtcctctaccgcggttcctgggggaccgtgtgcgatgattattgggatacaaatgatgcaaatgttgtgtgccggcagctggggtgcggatgggctacgtccgctcccggaaacgccaggttcggccaggggagcggcccaattgtcctagatgatgttagatgttctggacacgaatcttacctttggagttgccctcacaacggatggctctctcataactgcggccaccacgaagacgcaggcgtaatatgctcggccagtcagagccagccaaccccaagtcctgacacctggcccacatcaagagcctctacagctggcagcgaaagcaccctggccctgcgtttggtgaacggcggagacagatgtaggggccgagttgaggttctgtatcagggttcttggggaacagtatgtgatgactactgggataccaacgatgctaatgtagtctgcagacagcttgggtgcggctgggccatgtccgctcccggaaatgctcagttcggacaggggtcgggccctatcgtgctcgacgacgttcgctgctctggccacgagtcctacctgtggtcctgcccccacaacggctggctgagccataattgtggacaccacgaggatgctggcgtcatttgtagcgcagctcaatctcagtcaactcctcgtcccgacacgtggttgaccaccaatctgcctgcgctgacggtgggtagcgagtcgagtcttgcgctgcgtttggttaatgggggtgatcgctgtagagggcgtgtggaggtactctacagggggagttggggtacagtctgcgatgactcttgggatacgaacgatgctaatgtcgtatgtcgccagctcgggtgtggatgggccatgtccgctcccggtaatgcaagatttgggcaaggaagcgggcctattgtcctcgacgatgttcgctgctccggcaacgaatcctatctctggtcatgccctcacaaaggctggctgacccataattgcggccatcacgaagatgcgggagtcatttgttcagctacccagatcaacagcaccactacggattggtggcatccaacaaccaccaccacagccaggccttctagtaactgcgggggattcttgttttacgcgtccggtaccttttcctcaccctcttaccccgcttactatccaaacaacgctaagtgcgtttgggagatagaagtcaactcgggatatcggatcaatctgggcttttctaaccttaagctggaagcccaccataattgttcttttgactacgtagaaatctttgatggatcactaaactcaagtctgctactcggtaagatttgtaatgataccaggcaaatctttacgtcgtcgtacaatcgcatgactatccacttccggagtgacatcagctttcagaatacaggctttctagcatggtataactccttcccttctgatgcgacccttagactggtgaacctgaattcctcttatgggctgtgcgcaggcagagtggaaatttatcacggcggaacatggggcacggtatgtgatgacagctggacaattcaggaggcggaggtggtatgcaggcagttggggtgcgggcgtgctgtgagcgccctgggcaacgcatactttggaagcggttcaggtcccatcaccctggacgacgtagagtgtagcggaacagagtctacactgtggcagtgtaggaatagggggtggttttctcataattgtaatcacagggaggacgctggagtcatctgtagtggcaaccacctcagtacacccgctccgttcttaaacataactcggccaaacacggattatagctgcggaggtttcttgagccaaccttctggtgatttcagttcccctttctaccctggaaactatccaaacaacgcaaaatgcgtctgggacattgaagtgcagaataattaccgggtcacggtgattttcagggacgttcaacttgagggaggatgcaactatgattacatcgaagtgtttgacggtccttataggagttcacccttaatcgcccgtgtgtgcgacggtgcccgtggtagtttcacttccagctcgaacttcatgtcaatcagatttatctcagatcacagcattacaaggagaggattccgggctgagtattattcgtctccgtcgaatgacagcaccaacctcctctgcctgccaaatcatatgcaggcatccgtctctcgatcatacctgcagtctttaggctttagtgcctctgacttggttatttccacctggaatggatactatgaatgcaggcctcagattacaccgaacttagttattttcacaattccctactcaggttgtggaacatttaagcaagcagacaatgatacaatcgactatagcaacttcctcactgccgcagtctcaggaggcattattaagcggagaactgatctgagaattcacgttagctgccggatgctgcagaacacttgggtcgacactatgtacatcgccaacgacacaatccatgtggccaataacaccattcaggtggaggaggttcagtatggcaattttgatgtgaatatatcattttatacttcctcatccttcctttacccagtgacttcccggccatattatgtggatttaaaccaggacctctatgtccaagctgagatcctccattcagatgccgtattgaccctgttcgtagatacatgcgtggcttccccatacagcaatgacttcacatccctgacttatgacttaatacgaagcggttgcgtacgggacgatacttacggaccctacagctcaccttcattgcgtattgccagatttcggtttcgggctttccatttcctgaatcggttcccttctgtgtacctgagatgtaaaatggtggtctgcagagcctacgacccgtcgtccagatgctacagaggctgcgtgctgaggagcaaaagagatgtgggatcatatcaagaaaaagtggacgtggtgctcggcccaatccagcttcagaccccacccaggagggaagaagaacccaggta

SEQ ID NO: 146104 - protein, 513 aa, Artificial Sequence
  derived and/or modified sequence
MKISILLMFLWGLSCALPVTRYQNNESEDSEEWKGHLAQAPTPPLESSESSEGSKVSSEEQANEDPSDSTQSEEGLGSDDHQYIYRLAGGFSRSTGKGGDDKDDDEDDSGDDTFGDDDSGPGPKDRQEGGNSRLGSDEDSDDTIQASEESAPQGQDSAQDTTSESRELDNEDRVDSKPEGGDSTQESESEEHWVGGGSDGESSHGDGSELDDEGMQSDDPESIRSERGNSRMNSAGMKSKESGENSEQANTQDSGGSQLLEHPSRKIFRKSRISEEDDRSELDDNNTMEEVKSDSTENSNSRDTGLSQPRRDSKGDSQEDSKENLSQEESQNVDGPSSESSQEANLSSQENSSESQEEVVSESRGDNPDPTTSYVEDQEDSDSSEEDSSHTLSHSKSESREEQADSESSESLNFSEESPESPEDENSSSQEGLQSHSSSAESQSEESHSEEDDSDSQDSSRSKEDSNSTESKSSSEEDGQLKNIEIESRKLTVDAYHNKPIGDQDDNDCQDGY

SEQ ID NO: 146105 - DNA, 1542 bp, Artificial Sequence
  derived and/or modified sequence
atgaagatttccatcttgttgatgttcttatggggactgagttgcgctctgcctgtgactcgctaccagaataatgaatcagaggattccgaggaatggaagggccatctggctcaggcaccaacaccccctcttgagtcctcagagtcttcagaagggagcaaagtgagctctgaggaacaggctaacgaggacccctccgacagcactcaatctgaagagggacttggaagcgatgaccaccagtacatctatcggctagccggcgggttctctagaagcacagggaaggggggagacgacaaggatgatgatgaagatgattctggcgatgacacattcggagatgacgacagtggaccaggacccaaggatagacaggagggtggaaactcaagactgggaagcgatgaggacagtgacgacaccatacaagcaagtgaggagtccgccccacagggccaggactccgctcaagacactacctccgagagccgagaattggacaacgaagatagagtcgacagtaagcctgagggaggcgatagtacacaggaaagcgaatcagaggaacactgggtgggcggggggtcagatggagagtcctctcatggagacggcagtgagctggacgatgagggcatgcagtccgacgaccctgagagtatccgatctgaacgcggtaactccagaatgaacagtgccggaatgaagtccaaggaatcgggagagaattctgaacaagctaatacacaggatagtggcgggtcccaactgctggagcatccatcgcgaaagatcttccggaagtctagaatctctgaggaggatgatcggtccgagctggatgataacaatacaatggaggaggtgaagtccgactccacagagaacagtaactctagggacactggcttgtcccagcctcggagagattcaaagggagacagtcaggaggacagcaaggagaatttgtcacaggaagaaagtcagaacgtcgacgggcctagcagtgagtcaagccaggaagccaatttgagttcccaggaaaacagctctgaatcccaagaagaagtggtgtcagaatcccggggggacaatccggacccaactacttcctacgttgaggatcaggaagattcagatagctcagaagaagactcctctcacacattatctcactcgaagagtgaaagccgcgaggagcaggccgattccgagtctagcgaatctcttaacttctcagaggagtctcctgagtctcccgaagatgagaattcaagttctcaggaagggctgcagtcccactcctccagcgcagaatctcaatccgaggaatcgcactctgaggaggacgatagtgacagccaggattcttcacgcagcaaggaagacagtaacagtaccgagtctaagtcatcgagtgaggaggatgggcagctgaaaaatattgaaatcgaatctcggaagctgaccgttgacgcatatcacaacaagccaatcggcgaccaggatgataacgactgccaagacggttactag

SEQ ID NO: 146106 - DNA, 1542 bp, Artificial Sequence
  derived and/or modified sequence
atgaagatcagcatcctgctgatgttcctgtggggcctgagctgtgccctgcctgtgacccgctaccagaacaatgaaagtgaggacagcgaggagtggaagggccacctggcccaggcccccaccccacccctggagagcagcgagagcagcgagggcagcaaggtgagcagcgaggagcaggccaatgaagaccccagcgacagcacccagagcgaggagggcctgggcagtgatgaccaccagtacatctaccgcctggccggcggcttcagccgcagcactggaaaaggaggagatgacaaggatgatgatgaagatgattctggagatgacacctttggagatgatgattctggccctggccccaaggaccggcaggagggcggcaacagccggctgggcagtgatgaggacagtgatgacaccatccaggccagcgaggagagcgccccccagggccaggacagcgcccaggacaccaccagcgagagccgggagctggacaatgaagatagagtggacagcaagccagagggcggggacagcacccaggagagcgagagcgaggagcactgggtgggcggcggcagtgatggagagagcagccatggagatggcagcgagctggatgatgagggcatgcagagtgatgatcctgagagcatccgctctgagcggggcaacagcaggatgaacagcgctggcatgaagagcaaggagagcggggagaacagcgagcaggccaacacccaggacagcggcggcagccagctgctggagcaccccagcaggaagatcttcaggaagagccgcatcagcgaggaggatgacagaagtgagctggatgacaacaacaccatggaggaggtgaagagtgacagcacagagaacagcaacagccgggacaccggcctgagccagccccggcgggacagcaagggggacagccaggaggacagcaaagaaaacctgagccaggaggagagccagaatgtggatggccccagcagcgagagcagccaggaggccaacctgagcagccaggagaacagcagcgagagccaggaggaggtggtgtctgagagcagaggagacaacccagaccccaccaccagctatgtggaggaccaggaggacagcgacagcagcgaggaggacagcagccacaccctgagccacagcaagtctgagagccgggaggagcaggccgacagcgagagcagcgagagcctgaacttcagcgaggagagccctgagagcccagaagatgagaacagcagcagccaggagggcctgcagagccacagcagcagcgctgagagccagagcgaggagagccacagtgaagaagatgacagcgacagccaggacagcagccgcagcaaggaggacagcaacagcacagagagcaagagcagcagtgaagaagatggccagctgaagaacatcgagattgagagcaggaagctgactgtggatgcctaccacaacaagcccatcggggaccaggatgacaatgactgccaggacggctactag

SEQ ID NO: 146107 - DNA, 1542 bp, Artificial Sequence
  derived and/or modified sequence
atgaagatcagcatcctgctgatgttcctgtggggcctgagctgcgcactaccagttacaagatatcagaataatgagagtgaagatagcgaagagtggaagggtcatttagcccaggcaccaacacccccgcttgaaagcagtgagtccagcgaagggagcaaagtgtcttctgaggagcaggcaaacgaggaccccagtgatagcacgcagtctgaagaaggcctgggttcagacgaccaccagtacatctatcgactggctggcggattctcccgatccacgggtaaaggtggtgatgataaggatgacgacgaagatgactccggcgacgacacatttggcgatgatgatagcggacctggaccaaaggaccgccaggaaggagggaattcccgccttggctccgacgaagatagcgacgacaccatacaggcctctgaggaaagcgccccccagggacaggactccgcacaagacaccacctctgaatcgagagagctggataatgaggatcgggtggatagtaaaccagaaggaggcgattcaacgcaagagagcgagtctgaagagcactgggttggcggcggctccgacggggagagctcgcatggggacgggtcagagctggacgacgagggcatgcagtccgatgatcccgagtccattcggagtgaacgaggaaactcgcgcatgaacagtgctggaatgaaatccaaggagtccggagaaaacagtgaacaggccaacacgcaggatagtggtgggtcccaacttctcgagcatccttcccggaagatttttaggaaatcccgtatttccgaagaggacgatcgctctgaactggacgacaataatacaatggaggaggtcaagtctgattccacggagaacagcaattctagagacactggactttctcagccgagacgggacagtaagggggacagccaggaggattctaaagagaacctctctcaagaagaaagccagaacgtggatgggcccagcagtgagtcttcccaggaggccaacctgtctagccaggagaattcatccgaaagccaggaggaagttgttagtgagtctcggggagacaatcccgatcccacaaccagttatgttgaagatcaagaggattccgactcctccgaagaggattcaagccacaccctgagtcacagcaaatccgagtcccgagaggagcaggcagatagcgagagtagcgagtctttaaatttctcagaagagtcccctgaatctccagaagacgagaactcatccagccaagaaggtctgcagtcccacagctcctccgcagagtcccaatccgaggagagccacagtgaggaggatgattccgactcccaggattccagcagaagtaaggaggatagtaacagcactgaatccaaaagcagtagcgaggaggatggccagttaaaaaacattgagatcgagtcacgcaagctgaccgtcgacgcctatcataacaaacctataggtgaccaggacgacaatgattgtcaggacggctattag

SEQ ID NO: 146108 - DNA, 1542 bp, Artificial Sequence
  derived and/or modified sequence
atgaaaattagcatcctgctcatgtttctgtggggtctcagttgtgcccttccggttactaggtaccagaataatgaatctgaggacagcgaagagtggaagggccatttagctcaagctccgacacctccactggagtcctctgagtcctctgaaggctcaaaagtaagttccgaagagcaagctaatgaagatccaagtgactccacacagtctgaagagggcctaggatctgatgaccaccagtatatctacagattggcgggtggattttctaggagtacaggaaaagggggtgatgacaaagacgacgacgaggacgactctggagatgacacctttggggatgacgatagcggcccaggcccaaaagatagacaggagggaggcaacagccgtttgggttccgacgaagacagtgatgatacgattcaggcatccgaagagagtgcgcctcagggccaggacagcgctcaggacacgacctccgagtctagagagctggataacgaagatcgggtggactccaagccagaggggggagattcaacgcaagagtccgaatccgaggaacactgggttggcggaggctctgacggggaatctagccacggggacggttctgaactagatgatgagggaatgcagagtgacgaccctgaaagcatccgctccgagcgcggtaatagtcgcatgaattcagctggaatgaaaagtaaagagagcggagagaactccgaacaggcgaatacccaggattctggtggatcacagcttcttgagcacccctcccggaagatatttcgcaaatcgagaatttctgaggaggatgatcggtcagagctcgacgataacaacacaatggaggaagtcaagtctgacagcaccgagaacagtaactccagggacaccggattgtcgcaaccgagaagggattccaagggtgactcacaagaggacagcaaggaaaacctttcccaagaggagagtcagaacgttgatgggccttcgagcgagtcctcccaggaagcaaacctgtcttcccaggaaaatagctcagagtcccaggaggaagttgtctccgaaagtagaggggacaatcccgatcccacgactagctatgtcgaggaccaggaggattccgatagcagtgaggaggactcgtcccacactctgtcccactctaagagcgagtctcgtgaggagcaagccgactctgagagttctgagagcctgaacttttctgaggaatcccctgaaagtcccgaggacgaaaacagcagcagccaggagggcctgcagtcacatagcagcagtgccgaatctcagagtgaagaatcgcactctgaagaggacgatagcgatagtcaggattcgagtagaagcaaggaggacagcaacagtacagagagcaaaagcagtagcgaggaggatggacagctgaagaatattgagatcgagtcccggaaactcacggtggatgcataccacaacaagccgatcggcgaccaagatgacaatgattgccaggacggctattag

SEQ ID NO: 146109 - DNA, 1542 bp, Artificial Sequence
  derived and/or modified sequence
atgaagatcagcatcctgctgatgttcctgtggggcctgagctgcgccctgcccgtgaccagataccagaacaacgagagcgaggacagcgaggagtggaagggccacctggcccaggcccccaccccccccctggagagcagcgagagcagcgagggcagcaaggtgagcagcgaggagcaggccaacgaggaccccagcgacagcacccagagcgaggagggcctgggcagcgacgaccaccagtacatctacagactggccggcggcttcagcagaagcaccggcaagggcggcgacgacaaggacgacgacgaggacgacagcggcgacgacaccttcggcgacgacgacagcggccccggccccaaggacagacaggagggcggcaacagcagactgggcagcgacgaggacagcgacgacaccatccaggccagcgaggagagcgccccccagggccaggacagcgcccaggacaccaccagcgagagcagagagctggacaacgaggacagagtggacagcaagcccgagggcggcgacagcacccaggagagcgagagcgaggagcactgggtgggcggcggcagcgacggcgagagcagccacggcgacggcagcgagctggacgacgagggcatgcagagcgacgaccccgagagcatcagaagcgagagaggcaacagcagaatgaacagcgccggcatgaagagcaaggagagcggcgagaacagcgagcaggccaacacccaggacagcggcggcagccagctgctggagcaccccagcagaaagatcttcagaaagagcagaatcagcgaggaggacgacagaagcgagctggacgacaacaacaccatggaggaggtgaagagcgacagcaccgagaacagcaacagcagagacaccggcctgagccagcccagaagagacagcaagggcgacagccaggaggacagcaaggagaacctgagccaggaggagagccagaacgtggacggccccagcagcgagagcagccaggaggccaacctgagcagccaggagaacagcagcgagagccaggaggaggtggtgagcgagagcagaggcgacaaccccgaccccaccaccagctacgtggaggaccaggaggacagcgacagcagcgaggaggacagcagccacaccctgagccacagcaagagcgagagcagagaggagcaggccgacagcgagagcagcgagagcctgaacttcagcgaggagagccccgagagccccgaggacgagaacagcagcagccaggagggcctgcagagccacagcagcagcgccgagagccagagcgaggagagccacagcgaggaggacgacagcgacagccaggacagcagcagaagcaaggaggacagcaacagcaccgagagcaagagcagcagcgaggaggacggccagctgaagaacatcgagatcgagagcagaaagctgaccgtggacgcctaccacaacaagcccatcggcgaccaggacgacaacgactgccaggacggctactag

SEQ ID NO: 146110 - protein, 156 aa, Artificial Sequence
  derived and/or modified sequence
MATPPAPGAGTAAPSAPRPPPPRPSWLRLDPAARGARLPFPGSPGTTRRAPRESAPLAPALRSDPGQPLAACNGPPGEPRADPGVSTRCAATMIPQGKLTGGRSCGSRPRMGRGERAELSFPAAAPRLKRGLGFWFFFCGNSSVEILLACHTTHPF

SEQ ID NO: 146111 - protein, 864 aa, Artificial Sequence
  derived and/or modified sequence
MGNRGMEDLIPLVNRLQDAFSAIGQNADLDLPQIAVVGGQSAGKSSVLENFVGRDFLPRGSGIVTRRPLVLQLVNATTEYAEFLHCKGKKFTDFEEVRLEIEAETDRVTGTNKGISPVPINLRVYSPHVLNLTLVDLPGMTKVPVGDQPPDIEFQIRDMLMQFVTKENCLILAVSPANSDLANSDALKVAKEVDPQGQRTIGVITKLDLMDEGTDARDVLENKLLPLRRGYIGVVNRSQKDIDGKKDITAALAAERKFFLSHPSYRHLADRMGTPYLQKVLNQQLTNHIRDTLPGLRNKLQSQLLSIEKEVEEYKNFRPDDPARKTKALLQMVQQFAVDFEKRIEGSGDQIDTYELSGGARINRIFHERFPFELVKMEFDEKELRREISYAIKNIHGIRTGLFTPDMAFETIVKKQVKKIREPCLKCVDMVISELISTVRQCTKKLQQYPRLREEMERIVTTHIREREGRTKEQVMLLIDIELAYMNTNHEDFIGFANAQQRSNQMNKKKTSGNQDEILVIRKGWLTINNIGIMKGGSKEYWFVLTAENLSWYKDDEEKEKKYMLSVDNLKLRDVEKGFMSSKHIFALFNTEQRNVYKDYRQLELACETQEEVDSWKASFLRAGVYPERVGDKEKASETEENGSDSFMHSMDPQLERQVETIRNLVDSYMAIVNKTVRDLMPKTIMHLMINNTKEFIFSELLANLYSCGDQNTLMEESAEQAQRRDEMLRMYHALKEALSIIGDINTTTVSTPMPPPVDDSWLQVQSVPAGRRSPTSSPTPQRRAPAVPPARPGSRGPAPGPPPAGSALGGAPPVPSRPGASPDPFGPPPQVPSRPNRAPPGVPSRSGQASPSRPESPRPPFDL

SEQ ID NO: 146112 - DNA, 2595 bp, Artificial Sequence
  derived and/or modified sequence
atgggcaaccgcgggatggaagacttaatccccctggttaataggctgcaggatgccttcagtgcaataggacagaatgctgacctggatctccctcagatcgctgtggtcggtggccagtctgctggaaagtcctcggtccttgaaaacttcgtggggcgggattttctgccccgcgggtccgggattgtaaccagaagacccctggtcctgcagctagtgaatgctaccacagaatatgctgaatttctccactgtaaggggaaaaaatttactgactttgaggaagtccggttggaaatcgaggctgagacagaccgtgtaacgggcacgaataagggaatctctccagttcctatcaatctcagggtttacagcccccatgtgctgaatctaacattagtagacttgcccgggatgacaaaggtcccagtaggtgaccaaccgccggacatagagttccagattcgggacatgttgatgcagtttgtgacaaaagagaactgcctgattttggctgtgagccctgcaaattctgacctcgcaaacagcgacgccctgaaggtggccaaagaggtggatcctcaaggtcaaaggaccatcggagtgattaccaagctggatctcatggatgagggtacagacgctcgggatgtgctcgaaaataagttactgcctcttcggagaggatacattggagtggtgaatcgatctcagaaagacattgacggtaaaaaggatatcactgcagccttggcagcagagaggaagttcttcctgagtcacccctcatatcggcacctggccgatcggatggggacgccttatttacagaaggtcctgaatcagcagctcacaaaccatatccgcgataccctaccaggcctccggaacaagctgcagagccagttgctgtcaattgagaaggaggtcgaggaatataagaatttccggcctgacgatcccgcacgaaagacgaaagcccttttgcagatggtgcagcagttcgcggttgacttcgaaaagagaatcgaggggtctggggaccagatagacacttacgaactctcggggggcgccagaatcaacaggatcttccacgaaagattcccatttgaactagtcaaaatggaattcgatgagaaggagctgcgccgggagatcagctatgctatcaaaaatatccacggaatccgtacaggactgtttactccagatatggccttcgaaaccatcgtcaaaaagcaggtcaagaaaataagagagccatgcctcaagtgtgtggacatggtgatcagtgaactgatctccactgttaggcaatgtactaagaagctccaacagtacccaaggctgagagaagagatggaaaggatagtgacaacccacatccgcgagcgcgagggtaggactaaggaacaggtgatgctcctgattgacatcgagcttgcctatatgaacactaaccacgaggacttcatcgggtttgccaatgcccagcagcgaagcaaccagatgaacaagaagaagacaagcggtaatcaggacgagatcttagtaatccgtaagggctggctgaccattaataacattggaattatgaagggtgggtctaaggaatattggtttgttctcactgcagaaaatttgagttggtataaggatgacgaggaaaaggagaagaagtatatgttaagcgtggataatcttaagcttcgtgatgtggagaaggggtttatgagtagcaagcatatctttgcgctgttcaatacggaacagagaaacgtatataaagattaccgccaactggagctagcctgcgaaacacaggaggaagtcgattcttggaaagccagctttttgcgagcaggggtttaccctgagagggtaggggataaggagaaggcctcagaaaccgaggaaaacggctccgacagttttatgcactcaatggatcctcagcttgagcggcaggtggagacaatcaggaatctggtggattcatatatggccatcgtgaataaaaccgtgagagatctgatgcccaagaccatcatgcatcttatgatcaataacaccaaggagtttatattttcagagctccttgccaatctgtacagctgtggggatcaaaacaccctgatggaggaaagcgccgagcaggcgcaaaggagagatgaaatgctcagaatgtatcatgcactgaaggaggcactgagtatcataggggatattaacactaccacagtgtctactcctatgccgccccctgtggacgattcttggttacaggtgcaatctgtaccagctgggcggcgttctcctacctcctcccctactccacaaaggcgcgcacccgccgtgcctcccgcaaggcccggttctaggggcccggcgccggggcctccaccggctggaagtgctctcggtggggcccctcccgttccaagccgacctggggcctcgccagaccccttcggccctccaccacaagtcccgtctcgacctaaccgtgcaccaccaggcgtgccgtcccggagcggccaggcgtctccatcccgccctgagtcgccccggccaccatttgatctgtag

SEQ ID NO: 146113 - DNA, 1989 bp, Artificial Sequence
  derived and/or modified sequence
atggaggacttaataccattggtcaaccgtctgcaggatgctttcagtgccatcggtcaaaacgcagatctggacctgcctcagattgctgtggtaggcggacagagcgccgggaaatccagcgtgttggagaatttcgtgggtcgagacttcttgcctcgggggtccggtatagtcacaaggcgacccctcgtgctgcagttagtcaatgcaactactgaatacgccgagtttctccactgtaagggaaagaagtttacggattttgaggaggtgaggttggagattgaggcagaaacggatcgtgttactggtactaataagggtatcagtcccgttccaattaacctcagagtgtactctccgcacgttctcaacttgacattggtggacctgcccgggatgacgaaggtaccagttggcgaccaacccccagacatagagtttcaaatcagggatatgctcatgcaatttgtgacgaaggaaaactgcctcattttagcagtgtccccagccaactcagatttggctaactccgatgctcttaaggtagcaaaagaggtggaccctcaggggcagcggaccataggggtaatcactaaactggacctcatggatgagggtactgacgcccgggatgtgctcgagaataagctgttacccctgagacgcggttacattggagtagtgaaccgctctcagaaagatatagacggcaaaaaagacataacggcagccttggccgctgagagaaagttttttctctcacatcctagctaccgacatctggcagacaggatgggaaccccctacctgcaaaaagttctgaatcagcagctgaccaaccacattagggataccctccccgggctgcgcaataagcttcagtctcagctattgtccatagaaaaggaagtggaagagtacaagaatttccgccccgacgaccctgctaggaaaaccaaggcattactgcaaatggtccaacagtttgccgtggactttgaaaagcgtatcgaggggagtggtgatcaaatcgacacctatgagctgagtgggggcgctagaatcaaccgtatattccatgagcgcttcccgtttgagctggtaaaaatggagtttgacgagaaagagcttcgtcgggagattagttatgctattaagaatatacatggaatccgtacgggcttatttacgcctgacatggctttcgaaaccatcgttaaaaaacaggtgaagaagatccgggagccatgcctcaagtgtgtggacatggttataagcgaactcatttcaaccgtccgccagtgtaccaagaaactccagcagtatcctaggctccgcgaagagatggagcgaatcgtaactacccacattcgggaacgtgaggggaggacgaaagagcaagtcatgctactcatcgacatagaactagcatacatgaacactaaccatgaggatttcattgggtttgcaaatgcacagcagcggagtaaccagatgaacaagaagaagacatcagggaaccagatcacgctgcaagtaatccgtaaaggatggttgaccatcaacaacattggcataatgaaagggggatcaaaggaatactggttcgtgctcacggccgaaaacctgtcatggtacaaggatgatgaggagaaagaaaagaagtatatgctctccgttgacaatctcaagttaagggacgtggaaaaagggtttatgtcctctaagcatatcttcgcattgtttaacactgagcagcggaatgtgtataaagattacaggcaattagagcttgcctgcgagacccaggaggaggttgattcctggaaggccagttttcttagagctggcgtatacccggaacgggttggcgataaggaaaaggtgtctgtcccattttcatgtctcctgccaggaatctgctctcttgcacccgctccagctcgattctccagcaaaggacctggcgacgtgctgttctag

SEQ ID NO: 146114 - DNA, 2595 bp, Artificial Sequence
  derived and/or modified sequence
atgggcaacagaggcatggaggacctgatccccctggtgaaccggctgcaggatgccttcagcgccatcggccagaatgctgacctggacctgccccagattgctgtggtgggcggccagagcgctgggaagagctctgtgctggagaactttgtgggccgggacttcctgccccggggcagcggcatcgtgacccggcggcccctggtgctgcagctggtgaatgccaccacagaatatgcagagttcctgcactgcaagggcaagaagttcacagactttgaggaggtgcggctggagattgaagctgagacagacagagtgacaggcaccaacaagggcatcagccctgtgcccatcaacctgcgggtgtacagcccccacgtgctgaacctgaccctggtggacctgcccggcatgaccaaggtgcctgtgggggaccagcccccagacatcgagttccagatccgggacatgctgatgcagtttgtgaccaaggagaactgcctgatcctggccgtgtccccagccaacagcgacctggccaacagtgatgccctgaaggtggccaaggaggtggacccccagggccagaggaccatcggggtcatcaccaagctggacctgatggatgagggcacagatgccagagatgtgctggagaacaagctgctgcccctgcggcggggctacatcggcgtggtgaacagaagccagaaggacattgatggcaagaaggacatcacagctgccctggccgctgagaggaagttcttcctgagccaccccagctaccgccacctggccgacaggatgggcaccccctacctgcagaaggtgctgaaccagcagctgaccaaccacatccgggacaccctgcccggcctgaggaacaagctgcagagccagctgctgagcattgagaaggaggtggaggagtacaagaacttccggccagatgatcctgccaggaagaccaaggccctgctgcagatggtgcagcagtttgctgtggactttgagaagagaattgagggcagcggggaccagattgacacctatgagctgtctggaggagcccgcatcaaccgcatcttccacgagcgcttcccctttgagctggtgaagatggagtttgatgagaaggagctgcggcgggagatctcctatgccatcaagaacatccacggcatcagaacaggcctcttcaccccagacatggcctttgagaccatcgtgaagaagcaggtgaagaagatccgggagccctgcctgaagtgtgtggacatggtgatcagcgagctgatcagcacagtgcggcagtgcaccaagaagctgcagcagtacccccggctgcgggaggagatggagagaattgtgaccacccacatccgggagcgggagggccgcaccaaggagcaggtgatgctgctgattgatattgagctggcctacatgaacaccaaccacgaggacttcatcggctttgccaatgcccagcagaggagcaaccagatgaacaagaagaagaccagcggcaaccaggatgagatcctggtgatcaggaagggctggctgaccatcaacaacatcggcatcatgaagggcggcagcaaggagtactggtttgtgctgacagctgagaacctgtcctggtacaaggatgatgaggagaaggagaagaagtacatgctgtctgtggacaacctgaagctgagagatgtggagaagggcttcatgagcagcaagcacatctttgccctcttcaacacagagcagagaaatgtgtacaaggactaccggcagctggagctggcctgtgagacccaggaggaggtggacagctggaaggccagcttcctgcgggccggcgtgtacccagagcgggtgggggacaaggagaaggccagcgagacagaagaaaatggaagtgacagcttcatgcacagcatggacccccagctggagcggcaggtggagaccatccggaacctggtggacagctacatggccatcgtgaacaagacagtgcgggacctgatgcccaagaccatcatgcacctgatgatcaacaacaccaaggagttcatcttcagcgagctgctggccaacctgtacagctgtggggaccagaacaccctgatggaggagagcgctgagcaggcccagaggagagatgagatgctgaggatgtaccacgccctgaaggaggccctgagcatcatcggggacatcaacaccaccaccgtgtccacccccatgcctcctcctgtggatgacagctggctgcaggtgcagagcgtgcctgctggccgccgcagccccaccagcagccccaccccccagaggcgggccccagctgtgcccccagcccggcccggcagccggggccctgcccctggccccccacctgctggcagcgccctgggcggggcccctcctgtgcccagcaggcctggggccagcccagaccccttcggccccccaccccaggtgcccagccggcccaacagagcccctcctggggtgcccagccgcagcggccaggccagccccagcaggcctgagagcccccggcccccatttgacctgtag

SEQ ID NO: 146115 - DNA, 1989 bp, Artificial Sequence
  derived and/or modified sequence
atggaggacctgatccccctggtgaaccggctgcaggatgccttcagcgccatcggccagaatgctgacctggacctgccccagattgctgtggtgggcggccagagcgctgggaagagctctgtgctggagaactttgtgggccgggacttcctgccccggggcagcggcatcgtgacccggcggcccctggtgctgcagctggtgaatgccaccacagaatatgcagagttcctgcactgcaagggcaagaagttcacagactttgaggaggtgcggctggagattgaggccgagacagacagagtgacaggcaccaacaagggcatcagccctgtgcccatcaacctgcgggtgtacagcccccacgtgctgaacctgaccctggtggacctgcccggcatgaccaaggtgcctgtgggggaccagcccccagacatcgagttccagatccgggacatgctgatgcagtttgtgaccaaggagaactgcctgatcctggccgtgtccccagccaacagcgacctggccaacagtgatgccctgaaggtggccaaggaggtggacccccagggccagaggaccatcggggtcatcaccaagctggacctgatggatgagggcacagatgccagagatgtgctggagaacaagctgctgcccctgcggcggggctacatcggcgtggtgaacagaagccagaaggacattgatggcaagaaggacatcacagctgccctggccgctgagaggaagttcttcctgagccaccccagctaccgccacctggccgacaggatgggcaccccctacctgcagaaggtgctgaaccagcagctgaccaaccacatccgggacaccctgcccggcctgaggaacaagctgcagagccagctgctgagcattgagaaggaggtggaggagtacaagaacttccggccagatgatcctgccaggaagaccaaggccctgctgcagatggtgcagcagtttgctgtggactttgagaagagaattgagggcagcggggaccagattgacacctatgagctgagcggcggggcccgcatcaaccgcatcttccacgagcgcttcccctttgagctggtgaagatggagtttgatgagaaggagctgcggcgggagatctcctatgccatcaagaacatccacggcatcagaacaggcctcttcaccccagacatggcctttgagaccatcgtgaagaagcaggtgaagaagatccgggagccctgcctgaagtgtgtggacatggtgatcagcgagctgatcagcacagtgcggcagtgcaccaagaagctgcagcagtacccccggctgcgggaggagatggagcgcatcgtgaccacccacatccgggagcgggagggccgcaccaaggagcaggtgatgctgctgattgacatcgagctggcctacatgaacaccaaccacgaggacttcatcggctttgccaatgcccagcagaggagcaaccagatgaacaagaagaagaccagcggcaaccagatcaccctgcaggtgatcaggaagggctggctgaccatcaacaacatcggcatcatgaagggcggcagcaaggagtactggtttgtgctgacagctgagaacctgtcctggtacaaggatgatgaggagaaggagaagaagtacatgctgtctgtggacaacctgaagctgagagatgtggagaagggcttcatgagcagcaagcacatctttgccctcttcaacacagagcagagaaatgtgtacaaggactaccggcagctggagctggcctgtgagacccaggaggaggtggacagctggaaggccagcttcctgcgggccggcgtgtacccagagcgggtgggggacaaggagaaggtgtctgtgcccttcagctgcctgctgcccggcatctgcagcctggccccagccccagcccgcttcagcagcaaaggacctggagatgtgctcttctag

SEQ ID NO: 146116 - DNA, 134 bp, Artificial Sequence
  derived and/or modified sequence
caggagcggccatgaagaagctgatggtggtgctgagtctgattgctgcaggaatcttcaggtcttcctggggaagcataaccttcggcaaagggagagttcccaggagcagagttctgttgtccgggctgtga

SEQ ID NO: 146117 - DNA, 2595 bp, Artificial Sequence
  derived and/or modified sequence
atgggcaaccggggcatggaggacctgatccccctggtgaaccggctacaagatgcattctctgctatagggcaaaacgctgacctggacctcccgcaaatcgctgtggtcggggggcaaagtgcagggaaatccagtgtccttgaaaacttcgtagggagagactttcttcccaggggaagcggcattgtcacccgacgcccgcttgttcttcaactggtgaatgcaaccactgaatacgccgagttcctacactgcaagggcaagaaattcacagacttcgaggaggtgcggctagagatcgaagcagaaactgaccgcgtgacgggcaccaacaagggtatttctcccgtccctattaatctgagggtgtactccccccatgtgctgaatttgaccttggtggatctccctgggatgacaaaggtccccgtcggtgaccaaccaccagacatagaatttcagatccgagatatgttaatgcagtttgtcactaaggagaactgcctcatcctagccgtgagtcccgctaatagcgatttagccaacagtgacgccttgaaggtcgctaaagaagtggacccgcagggccagcggacaataggcgtcattaccaagctggatctgatggacgagggcacagatgctcgcgacgttctggagaataaactacttccccttagacgaggctacattggggtagtgaacagatctcagaaagatatcgacggcaagaaggatattaccgccgcactcgccgccgagcggaaattctttctatcccacccgagctaccggcatctggccgaccggatgggcaccccctacctgcagaaggttttgaaccaacagctgaccaaccacattagagataccctgccaggcctaaggaataaacttcagtcacagctattgagtatcgagaaggaggtggaggagtacaaaaatttccgtccagatgaccctgcacggaaaaccaaggcattgttacaaatggttcaacagttcgccgttgatttcgagaagagaatcgaaggatccggcgaccagattgatacgtacgaactgtctggaggggctagaattaaccggatatttcacgagagattccctttcgaactggtcaagatggagtttgatgaaaaagaactcaggcgggaaatttcatacgctattaaaaacatccacggcatccgaactggtctctttacgcccgacatggctttcgaaacaatcgttaaaaagcaggttaagaaaatccgcgaaccctgccttaagtgcgtggatatggtaattagcgaactgattagtactgtccgacagtgtactaaaaaactgcaacagtacccccgcctccgggaggagatggaacgcatcgtgactacccacattcgcgagcgggagggacgaaccaaggaacaagtcatgttgttaatcgacatcgagctggcttacatgaacaccaaccacgaggactttatcggctttgccaacgctcaacagaggtcaaatcagatgaataagaagaagacatctgggaaccaggatgagatactcgtcatacgcaaggggtggcttacaataaacaatatcggcataatgaaagggggtagcaaggagtactggtttgtgctcacagccgaaaacctgagctggtataaagatgacgaagaaaaggaaaagaagtacatgctatctgtggataaccttaagttaagagatgttgagaagggctttatgtcgtcaaaacatatcttcgccctattcaatactgagcagcgcaacgtgtataaagactacagacagctcgaattagcatgtgagacacaagaagaggtggactcctggaaggcgtcgtttttgcgagcaggagtgtatcctgagagagtcggtgacaaggagaaagcttcggagacagaagagaatggctctgactcatttatgcattcaatggaccctcaactggagaggcaggtggaaaccatcaggaacctggttgactcctatatggccattgtcaacaagaccgttcgggacctgatgcccaaaaccattatgcatctcatgattaataacactaaagaattcatcttctctgagctgttagccaatctttacagttgcggtgaccagaatacacttatggaggagagcgcggaacaggctcagcggcgcgatgagatgctcagaatgtatcacgcgctgaaggaggccctatctattattggagatattaacacaaccaccgtcagcactcccatgcccccccctgtggatgacagctggctccaggtacagagtgtccccgcgggaagacggtctccgacctcatctcctaccccccagcgccgcgccccagctgtgccccccgcccgtccaggttcgagaggcccagctcctggacccccgcccgctgggtctgcattgggcggagcgccacctgtcccgtccagaccaggagccagtcctgatccattcggaccacctcctcaggtccccagccgcccaaacagggcaccgcctggagtaccgtctcgttctggacaggcatccccaagccggcctgaatctcctagacctccattcgacctgtag

SEQ ID NO: 146118 - DNA, 1989 bp, Artificial Sequence
  derived and/or modified sequence
atggaggacctgatccccctggtgaaccggctgcaggacgccttctcagcaatcggccagaacgccgacctagatctgcctcaaattgcagtggtaggcggacagagcgccggcaaatcctcagtattggaaaatttcgttggtagagactttctcccacgcggatcagggatcgtgacccgtcgcccactcgtactgcagctggtcaacgccactaccgagtatgctgaattcttacactgcaaaggcaagaagtttaccgactttgaagaagtgcgactggagatagaagccgaaacagaccgagtgactgggacaaacaaagggatctctcccgtcccaattaacctgagagtgtatagcccacatgtgctcaatctaaccctggttgatctgccagggatgacaaaggttccagttggtgatcagcctccagatattgagttccaaatcagagacatgttaatgcaattcgtgacaaaggagaattgcctcatcctggctgtctcaccagctaatagcgacttagcaaactctgacgctctaaaggtggctaaagaggtggatccacagggccagcggacaatcggagtcataaccaagctggatctcatggacgaaggtactgacgccagagacgtactggaaaacaagttattaccacttcgcagggggtacatcggcgtcgtaaaccggagccaaaaagacattgatggtaaaaaggacattactgcagcattagcggctgaaaggaagttctttctctcccatccttcatatcggcatctagccgaccgtatggggactccttacctgcaaaaagtgctgaaccagcagttgacaaatcatatccgtgataccctcccagggctcaggaataagctccagtcccagctgctcagcattgagaaagaagtcgaggaatacaagaattttcgacctgatgaccccgcacggaagacaaaggcactcctgcagatggtccaacaatttgcagtcgatttcgaaaagcgcatagaggggagcggcgaccaaatcgacacctatgagctctcgggcggtgcgaggataaaccgaatctttcacgagcggttcccctttgagttagtcaaaatggagtttgacgagaaggaacttaggcgggagatctcgtatgcgatcaaaaacatccacggaattagaactgggctatttacccccgacatggccttcgaaactatcgtgaagaagcaggtcaagaagatcagagaaccttgtttgaagtgcgtggatatggtgataagtgagttgatcagcaccgtaaggcaatgtacaaaaaagctccagcagtaccccagattgcgggaagagatggagaggatcgtgacaacacacatccgagaaagagagggccgcaccaaggagcaggtcatgctcctgattgatatcgagctggcttacatgaacacgaatcatgaggacttcatcgggttcgccaatgctcagcagaggtctaaccagatgaataagaagaaaacgtctggcaaccagattacactccaggttatccgaaaaggctggctcacaatcaacaacatcggaataatgaaggggggatctaaagagtattggttcgttcttacggccgaaaacctctcatggtacaaggacgacgaggaaaaggaaaagaaatatatgctaagcgtcgataacttgaaactgcgtgacgttgagaagggattcatgtcttcaaaacacatctttgccttgtttaataccgaacagcggaatgtctacaaggactataggcagctggagctggcttgcgagacacaagaggaggtggactcctggaaggcctcatttctacgcgctggggtataccccgagagggtcggagacaaggagaaagtgagtgtccctttttcgtgcctgctaccgggcatctgcagcctagcccccgcccctgcgcggtttagctccaaaggacctggagatgtgctgttctag

SEQ ID NO: 146119 - DNA, 2595 bp, Artificial Sequence
  derived and/or modified sequence
atgggtaatagaggcatggaagacctgatcccgctggtgaaccggctgcaggacgcgttttcagccatcggccagaatgccgaccttgatctgccgcaaatcgctgtggtcggaggtcagagtgctgggaagagctccgtcctggagaatttcgtcgggagggacttcctccccagagggtccggcatcgtcacgaggagacccctcgtccttcagctggttaacgccaccactgaatacgcagaattcctccattgcaagggcaaaaaatttactgatttcgaagaggtccgtctcgagatagaagctgagaccgatcgcgtgacgggtactaataaagggataagccccgtgcccataaacttgagagtttacagtcctcatgtcctgaacttgaccttagtggacctccctgggatgaccaaagtgcccgtaggggatcagccccctgacattgagtttcagatacgggatatgttaatgcagttcgtcaccaaagagaactgcctgatactcgctgtttcgcccgctaactccgacctcgcaaactcagatgctctgaaagtcgcaaaggaggtggatccacaaggccagcggacaatcggagtgatcactaagctggacctaatggacgaaggaacagacgctagagatgtattagaaaacaaactcctgcccctccgccgtggttatatcggagtggtcaacagatcccagaaggatatcgacggcaaaaaggacataaccgccgctttggcggctgaacgtaagttctttctgagccaccccagctaccgtcatctggcagataggatgggaaccccatatctacagaaggtgctcaaccaacagctcaccaaccatatacgcgacacactgccagggttaagaaacaaactgcaatcccaattgctgtctatcgagaaagaagttgaggagtacaagaattttcggccagacgatcctgctcggaaaactaaagcattattgcagatggtacaacagtttgccgttgattttgagaaaaggattgaaggatccggagatcaaattgatacatatgaactcagcggaggggcacgcattaaccggatctttcatgagcgctttccattcgaattagtgaagatggaattcgatgagaaagagcttcgccgagaaatttcctatgccatcaaaaatatacacggaatccgcaccggcctcttcacacctgacatggcatttgagaccatcgtgaaaaagcaggtcaagaagattagagagccatgccttaaatgcgttgatatggtgatctctgaactgattagtaccgtacgacagtgcacgaagaaactgcagcaatatccgcgacttcgcgaggaaatggagagaatcgtcaccacccacatacgtgaaagggagggacgcacaaaggaacaagtgatgctgcttattgatatagagctggcatacatgaacaccaaccatgaggatttcataggctttgctaatgcccagcagagatcgaaccagatgaataagaaaaagactagtggcaaccaggacgagattctggtgatcagaaaggggtggcttaccatcaacaacatcggaatcatgaaaggaggaagtaaggaatactggtttgtcttaacggctgagaatctaagctggtacaaagatgacgaggagaaggaaaagaaatacatgctgtccgtggacaacctgaagctgagagacgttgaaaaaggatttatgagtagtaaacacatcttcgccttgtttaacaccgagcagcgaaatgtttataaggattatagacagttggaacttgcctgcgagactcaggaagaggtggattcatggaaagcctcattcctgcgcgctggggtataccctgagcgcgtgggcgacaaggaaaaagcatcagagactgaggagaatggttccgattctttcatgcactcaatggacccacagttggaaaggcaggttgaaacaattcgcaacctggtcgatagttatatggccatcgtgaataaaactgtgagagacctgatgccaaaaactataatgcacctaatgattaacaacacaaaggaattcattttctccgagcttctggcgaatctgtacagctgtggcgatcagaatacccttatggaggagagtgcagaacaagcgcaacgccgagacgagatgcttcgcatgtatcacgcactgaaggaagccctgtccataatcggcgacatcaatactaccactgtctcaacacccatgcctccccctgtcgacgactcatggctccaggttcagagcgtcccggcaggcaggagatcccctacttcatccccaacgccccagcgacgcgctcccgctgtgccgccagctcgtcctggtagcagggggcctgctccaggcccaccccctgccggaagcgctctcggaggcgcaccccctgtgccttccagacccggtgcctcccctgacccattcggtcctccccctcaggtgccatctagacccaatagagcgcctcctggggtgccatccaggagtgggcaggcctctccttctcgacctgagtctccaagacccccattcgacctgtag

SEQ ID NO: 146120 - DNA, 1989 bp, Artificial Sequence
  derived and/or modified sequence
atggaggaccttataccccttgttaataggcttcaggatgctttctcagcgattgggcaaaacgcagatctggatctgcctcagatcgctgtcgtggggggtcagtctgctgggaaaagctccgtcttagaaaattttgttggcagagatttcttacccaggggttccgggattgtgacaagacggccactagtccttcagctggttaatgccactactgaatacgcagagttcctgcattgtaagggaaaaaagttcaccgattttgaggaggtcagacttgagatcgaggccgaaacggatagagtcactggaaccaacaaagggatctctccagtacccattaatctgcgcgtttattcgcctcacgtgcttaatcttaccttggttgacttaccaggaatgacgaaggtccctgtgggcgaccagcctccggacatcgaattccagatcagagacatgctgatgcagttcgttaccaaggaaaattgcctgatactggctgtgagtccggcaaacagcgacttggcaaactctgacgccctgaaggtcgctaaagaagttgacccacagggccagcgaaccatcggtgtgattactaagctcgatctaatggacgaggggacagatgcccgagacgtgctggaaaataagctcctccctctcaggcgagggtacattggcgtcgtgaatcggagccagaaagatatcgatggaaagaaagatataacggccgctctcgctgcagagaggaagttctttctaagccatccttcatacagacacctcgccgaccgaatggggacaccatacctgcagaaggtgctgaatcagcagttgactaatcacattagggatacactgcccggactgagaaacaagttgcagtcacagcttctgagtattgagaaagaggtcgaagagtataagaacttccggcctgatgatcccgctcgtaaaacgaaggctttactgcagatggtgcagcagtttgctgtagacttcgaaaaacgaatagaaggtagtggtgatcagatcgacacctacgaattaagtggtggtgcaagaattaaccgcatttttcacgagcgctttccatttgaattagtcaaaatggagtttgacgagaaagaattgcggcgtgagatatcctacgcgatcaaaaatatccatggcattaggaccggcttgttcactcccgatatggccttcgagacaatagtgaagaaacaagtgaaaaaaatccgcgagccgtgcctcaagtgcgtggacatggtcattagcgaattaatttcaaccgtccgacagtgcacgaaaaagctgcagcagtatccgaggctgcgcgaagagatggagagaattgtgactacccacattcgggaacgcgaaggacgaactaaagagcaggtgatgctgctgattgacattgagctggcttatatgaacacaaaccatgaagacttcatcgggttcgctaacgcacaacaacgatcaaatcagatgaacaagaagaagacttctgggaaccaaatcacactgcaggtaatccgcaaaggatggctgaccatcaacaacatcggtataatgaagggcggaagtaaagaatactggttcgttctcaccgccgagaatctgtcatggtacaaggatgatgaggaaaaggagaagaaatatatgctgtctgttgacaaccttaagttgagggatgtcgaaaaggggttcatgtcttcaaagcatatttttgcccttttcaacactgagcagcgaaacgtgtataaggactaccggcaactggagctggcatgtgagacccaggaggaggtggattcctggaaggcctcatttctgcgtgccggagtctatcccgaacgcgttggggataaggagaaggtttctgtgcctttctcttgtctgttgccagggatctgttcccttgccccagcgccagcacgtttttctagcaaagggccaggggacgtccttttctag

SEQ ID NO: 146121 - DNA, 2595 bp, Artificial Sequence
  derived and/or modified sequence
atgggcaacagaggcatggaggacctgatccccctggtgaacagactgcaggacgccttcagcgccatcggccagaacgccgacctggacctgccccagatcgccgtggtgggcggccagagcgccggcaagagcagcgtgctggagaacttcgtgggcagagacttcctgcccagaggcagcggcatcgtgaccagaagacccctggtgctgcagctggtgaacgccaccaccgagtacgccgagttcctgcactgcaagggcaagaagttcaccgacttcgaggaggtgagactggagatcgaggccgagaccgacagagtgaccggcaccaacaagggcatcagccccgtgcccatcaacctgagagtgtacagcccccacgtgctgaacctgaccctggtggacctgcccggcatgaccaaggtgcccgtgggcgaccagccccccgacatcgagttccagatcagagacatgctgatgcagttcgtgaccaaggagaactgcctgatcctggccgtgagccccgccaacagcgacctggccaacagcgacgccctgaaggtggccaaggaggtggacccccagggccagagaaccatcggcgtgatcaccaagctggacctgatggacgagggcaccgacgccagagacgtgctggagaacaagctgctgcccctgagaagaggctacatcggcgtggtgaacagaagccagaaggacatcgacggcaagaaggacatcaccgccgccctggccgccgagagaaagttcttcctgagccaccccagctacagacacctggccgacagaatgggcaccccctacctgcagaaggtgctgaaccagcagctgaccaaccacatcagagacaccctgcccggcctgagaaacaagctgcagagccagctgctgagcatcgagaaggaggtggaggagtacaagaacttcagacccgacgaccccgccagaaagaccaaggccctgctgcagatggtgcagcagttcgccgtggacttcgagaagagaatcgagggcagcggcgaccagatcgacacctacgagctgagcggcggcgccagaatcaacagaatcttccacgagagattccccttcgagctggtgaagatggagttcgacgagaaggagctgagaagagagatcagctacgccatcaagaacatccacggcatcagaaccggcctgttcacccccgacatggccttcgagaccatcgtgaagaagcaggtgaagaagatcagagagccctgcctgaagtgcgtggacatggtgatcagcgagctgatcagcaccgtgagacagtgcaccaagaagctgcagcagtaccccagactgagagaggagatggagagaatcgtgaccacccacatcagagagagagagggcagaaccaaggagcaggtgatgctgctgatcgacatcgagctggcctacatgaacaccaaccacgaggacttcatcggcttcgccaacgcccagcagagaagcaaccagatgaacaagaagaagaccagcggcaaccaggacgagatcctggtgatcagaaagggctggctgaccatcaacaacatcggcatcatgaagggcggcagcaaggagtactggttcgtgctgaccgccgagaacctgagctggtacaaggacgacgaggagaaggagaagaagtacatgctgagcgtggacaacctgaagctgagagacgtggagaagggcttcatgagcagcaagcacatcttcgccctgttcaacaccgagcagagaaacgtgtacaaggactacagacagctggagctggcctgcgagacccaggaggaggtggacagctggaaggccagcttcctgagagccggcgtgtaccccgagagagtgggcgacaaggagaaggccagcgagaccgaggagaacggcagcgacagcttcatgcacagcatggacccccagctggagagacaggtggagaccatcagaaacctggtggacagctacatggccatcgtgaacaagaccgtgagagacctgatgcccaagaccatcatgcacctgatgatcaacaacaccaaggagttcatcttcagcgagctgctggccaacctgtacagctgcggcgaccagaacaccctgatggaggagagcgccgagcaggcccagagaagagacgagatgctgagaatgtaccacgccctgaaggaggccctgagcatcatcggcgacatcaacaccaccaccgtgagcacccccatgcccccccccgtggacgacagctggctgcaggtgcagagcgtgcccgccggcagaagaagccccaccagcagccccaccccccagagaagagcccccgccgtgccccccgccagacccggcagcagaggccccgcccccggccccccccccgccggcagcgccctgggcggcgccccccccgtgcccagcagacccggcgccagccccgaccccttcggcccccccccccaggtgcccagcagacccaacagagccccccccggcgtgcccagcagaagcggccaggccagccccagcagacccgagagccccagaccccccttcgacctgtag

SEQ ID NO: 146122 - DNA, 1989 bp, Artificial Sequence
  derived and/or modified sequence
atggaggacctgatccccctggtgaacagactgcaggacgccttcagcgccatcggccagaacgccgacctggacctgccccagatcgccgtggtgggcggccagagcgccggcaagagcagcgtgctggagaacttcgtgggcagagacttcctgcccagaggcagcggcatcgtgaccagaagacccctggtgctgcagctggtgaacgccaccaccgagtacgccgagttcctgcactgcaagggcaagaagttcaccgacttcgaggaggtgagactggagatcgaggccgagaccgacagagtgaccggcaccaacaagggcatcagccccgtgcccatcaacctgagagtgtacagcccccacgtgctgaacctgaccctggtggacctgcccggcatgaccaaggtgcccgtgggcgaccagccccccgacatcgagttccagatcagagacatgctgatgcagttcgtgaccaaggagaactgcctgatcctggccgtgagccccgccaacagcgacctggccaacagcgacgccctgaaggtggccaaggaggtggacccccagggccagagaaccatcggcgtgatcaccaagctggacctgatggacgagggcaccgacgccagagacgtgctggagaacaagctgctgcccctgagaagaggctacatcggcgtggtgaacagaagccagaaggacatcgacggcaagaaggacatcaccgccgccctggccgccgagagaaagttcttcctgagccaccccagctacagacacctggccgacagaatgggcaccccctacctgcagaaggtgctgaaccagcagctgaccaaccacatcagagacaccctgcccggcctgagaaacaagctgcagagccagctgctgagcatcgagaaggaggtggaggagtacaagaacttcagacccgacgaccccgccagaaagaccaaggccctgctgcagatggtgcagcagttcgccgtggacttcgagaagagaatcgagggcagcggcgaccagatcgacacctacgagctgagcggcggcgccagaatcaacagaatcttccacgagagattccccttcgagctggtgaagatggagttcgacgagaaggagctgagaagagagatcagctacgccatcaagaacatccacggcatcagaaccggcctgttcacccccgacatggccttcgagaccatcgtgaagaagcaggtgaagaagatcagagagccctgcctgaagtgcgtggacatggtgatcagcgagctgatcagcaccgtgagacagtgcaccaagaagctgcagcagtaccccagactgagagaggagatggagagaatcgtgaccacccacatcagagagagagagggcagaaccaaggagcaggtgatgctgctgatcgacatcgagctggcctacatgaacaccaaccacgaggacttcatcggcttcgccaacgcccagcagagaagcaaccagatgaacaagaagaagaccagcggcaaccagatcaccctgcaggtgatcagaaagggctggctgaccatcaacaacatcggcatcatgaagggcggcagcaaggagtactggttcgtgctgaccgccgagaacctgagctggtacaaggacgacgaggagaaggagaagaagtacatgctgagcgtggacaacctgaagctgagagacgtggagaagggcttcatgagcagcaagcacatcttcgccctgttcaacaccgagcagagaaacgtgtacaaggactacagacagctggagctggcctgcgagacccaggaggaggtggacagctggaaggccagcttcctgagagccggcgtgtaccccgagagagtgggcgacaaggagaaggtgagcgtgcccttcagctgcctgctgcccggcatctgcagcctggcccccgcccccgccagattcagcagcaagggccccggcgacgtgctgttctag

SEQ ID NO: 146123 - DNA, 3221 bp, Artificial Sequence
  derived and/or modified sequence
agtctgggcgcgcggctgcagcggcggagccggagtcggagccgggagcgctagcggcagccggatcgcagcctgcggggcccgccgcagccatgggcaaccgcggcatggaagatctcatcccgctggtcaaccggctgcaagacgccttctctgccatcggccagaacgcggacctcgacctgccgcagatcgctgtggtgggcggccagagcgccggcaagagctcggtgctcgagaatttcgtaggcagggacttcttgcctcgaggatctggcattgtcacccgacgtcccctggtcttgcagctggtcaatgcaaccacagaatatgccgagttcctgcactgcaagggaaagaaattcaccgacttcgaggaggtgcgccttgagatcgaggccgagaccgacagggtcaccggcaccaacaagggcatctcgccggtgcctatcaacctccgcgtctactcgccgcacgtgctgaacctgaccctggtggacctgcccggaatgaccaaggtcccggtgggggaccaacctcccgacatcgagttccagatccgagacatgcttatgcagtttgtcaccaaggagaactgcctcatcctggccgtgtcccccgccaactctgacctggccaattctgacgccctcaaggtcgccaaggaggtggacccccagggccagcgcaccatcggggtcatcaccaagctggacctgatggacgagggcacagatgcccgtgatgtgctggagaacaagctgctccccctgcgcagaggctacattggagtggtgaaccggagccagaaggacattgatggcaagaaggacattaccgccgccttggctgctgaacgaaagttcttcctctcccatccatcttatcgccacttggctgaccgtatgggcacgccctacctgcagaaggtcctcaatcagcaactgacgaaccacatccgggacacactgccggggctgcggaacaagctgcagagccagctactgtccattgagaaggaggtggaggaatacaagaacttccgccctgatgacccagctcgcaagaccaaggccctgctgcagatggtccagcagttcgccgtagactttgagaagcgcattgagggctcaggagatcagatcgacacctacgaactgtcagggggagcccgcattaaccgaatcttccacgagcgcttccctttcgagctggtcaagatggagtttgatgagaaggaactccgaagggagatcagctatgctatcaagaatatccatggcattagaacggggctgtttaccccagacatggcctttgagaccattgtgaaaaagcaggtgaagaagatccgagaaccgtgtctcaagtgtgtggacatggttatctcggagctaatcagcaccgttagacagtgcaccaagaagctccagcagtacccgcggctacgggaggagatggagcgcatcgtgaccacccacatccgggagcgcgagggccgcactaaggagcaggtcatgcttctcatcgatatcgagctggcttacatgaacaccaaccatgaggacttcataggctttgccaatgctcagcagaggagcaaccagatgaacaagaagaagacttcagggaaccaggatgagattctggtcatccgcaagggctggctgactatcaataatattggcatcatgaaagggggctccaaggagtactggtttgtgctgactgctgagaatctgtcctggtacaaggatgatgaggagaaagagaagaaatacatgctgtctgtggacaacctcaagctgcgggacgtggagaagggctttatgtcgagcaagcatatctttgccctctttaacacggagcagaggaatgtctacaaggattatcggcagctggagctagcctgtgagacacaggaggaggtggacagctggaaggcctccttcctgagggctggcgtgtaccctgagcgtgttggggacaaagagaaagccagcgagaccgaggagaatggctccgacagcttcatgcattccatggacccacagctggaacggcaagtggagaccatccggaatcttgtggactcatacatggccattgtcaacaagaccgtgagggacctcatgcccaagaccatcatgcacctcatgattaacaataccaaggagttcatcttctcggagctgctggccaacctgtactcgtgtggggaccagaacacgctgatggaggagtcggcggagcaggcacagcggcgcgacgagatgctgcgcatgtaccacgcactgaaggaggcgctcagcatcatcggcgacatcaacacgaccaccgtcagcacgcccatgcccccgcccgtggacgactcctggctgcaggtgcagagcgtaccggccggacgcaggtcgcccacgtccagccccacgccgcagcgccgagcccccgccgtgcccccagcccggcccgggtcgcggggccctgctcctgggcctccgcctgctgggtccgccctggggggggcgccccccgtgccctccaggccgggggcttcccctgaccctttcggccctccccctcaggtgccctcgcgccccaaccgcgccccgcccggggtccccagccgatcgggtcaggcaagtccatcccgtcctgagagccccaggccccccttcgacctctaaacagatccctcctcttctcggagacctccctttccaagcctgcctggacggctgttctgtgacttgacagtggctcccccagccccaaagccagcccccttcatctgtgacttaatctgttgtagtggtgagctgatacattcaggtgtgaccgttggtgaaaacttgtgccccttctgtggtatgcccttgccctgttctataaatatctataaatactcatatatatacacacctacacatggccaaccgcctcgcctctagcgctgggaatcagtcactgtgctatccttgtggagtcttgtggcccaactaccagagaacgctgtcccccgacatcccactccaaagtgtgccacctccagtgagcctccttgtcatgcccggcctgtggacagccagcccccgccatccctcccaccccctaccaagcatgggggtgctgtgcaggcagccgtgtggcctgacagtttctaccagtcctgctgtccctcggctgagaataaaacccatttctggatgatggggaatgtc

SEQ ID NO: 146124 - DNA, 2096 bp, Artificial Sequence
  derived and/or modified sequence
agtctgggcgcgcggctgcagcggcggagccggagtcggagccgggagcgctagcggcagccggatcgcagcctgcggggcccgccgcagccatgggcaaccgcggcatggaagatctcatcccgctggtcaaccggctgcaagacgccttctctgccatcggccagaacgcggacctcgacctgccgcagatcgctgtggtgggcggccagagcgccggcaagagctcggtgctcgagaatttcgtaggcagggacttcttgcctcgaggatctggcattgtcacccgacgtcccctggtcttgcagctggtcaatgcaaccacagaatatgccgagttcctgcactgcaagggaaagaaattcaccgacttcgaggaggtgcgccttgagatcgaggccgagaccgacagggtcaccggcaccaacaagggcatctcgccggtgcctatcaacctccgcgtctactcgccgcacgtgctgaacctgaccctggtggacctgcccggaatgaccaaggtcccggtgggggaccaacctcccgacatcgagttccagatccgagacatgcttatgcagtttgtcaccaaggagaactgcctcatcctggccgtgtcccccgccaactctgacctggccaattctgacgccctcaaggtcgccaaggaggtggacccccagggccagcgcaccatcggggtcatcaccaagctggacctgatggacgagggcacagatgcccgtgatgtgctggagaacaagctgctccccctgcgcagaggctacattggagtggtgaaccggagccagaaggacattgatggcaagaaggacattaccgccgccttggctgctgaacgaaagttcttcctctcccatccatcttatcgccacttggctgaccgtatgggcacgccctacctgcagaaggtcctcaatcagcaactgacgaaccacatccgggacacactgccggggctgcggaacaagctgcagagccagctactgtccattgagaaggaggtggaggaatacaagaacttccgccctgatgacccagctcgcaagaccaaggccctgctgcagatggtccagcagttcgccgtagactttgagaagcgcattgagggctcaggagatcagatcgacacctacgaactgtcagggggagcccgcattaaccgaatcttccacgagcgcttccctttcgagctggtcaagatggagtttgatgagaaggaactccgaagggagatcagctatgctatcaagaatatccatggcattagaacggggctgtttaccccagacatggcctttgagaccattgtgaaaaagcaggtgaagaagatccgagaaccgtgtctcaagtgtgtggacatggttatctcggagctaatcagcaccgttagacagtgcaccaagaagctccagcagtacccgcggctacgggaggagatggagcgcatcgtgaccacccacatccgggagcgcgagggccgcactaaggagcaggtcatgcttctcatcgatatcgagctggcttacatgaacaccaaccatgaggacttcataggctttgccaatgctcagcagaggagcaaccagatgaacaagaagaagacttcagggaaccagatcaccctccaggtcatccgcaagggctggctgactatcaataatattggcatcatgaaagggggctccaaggagtactggtttgtgctgactgctgagaatctgtcctggtacaaggatgatgaggagaaagagaagaaatacatgctgtctgtggacaacctcaagctgcgggacgtggagaagggctttatgtcgagcaagcatatctttgccctctttaacacggagcagaggaatgtctacaaggattatcggcagctggagctagcctgtgagacacaggaggaggtggacagctggaaggcctccttcctgagggctggcgtgtaccctgagcgtgttggggacaaagagaaagtgagtgtgcccttctcttgcctcctgccaggcatctgcagcctggcaccagctccagccaggttttcaagcaagggacctggagatgttcttttctaa

SEQ ID NO: 146125 - protein, 629 aa, Artificial Sequence
  derived and/or modified sequence
MSAEVRLRRLQQLVLDPGFLGLEPLLDLLLGVHQELGASELAQDKYVADFLQWAEPIVVRLKEVRLQRDDFEILKVIGRGAFSEVAVVKMKQTGQVYAMKIMNKWDMLKRGEVSCFREERDVLVNGDRRWITQLHFAFQDENYLYLVMEYYVGGDLLTLLSKFGERIPAEMARFYLAEIVMAIDSVHRLGYVHRDIKPDNILLDRCGHIRLADFGSCLKLRADGTVRSLVAVGTPDYLSPEILQAVGGGPGTGSYGPECDWWALGVFAYEMFYGQTPFYADSTAETYGKIVHYKEHLSLPLVDEGVPEEARDFIQRLLCPPETRLGRGGAGDFRTHPFFFGLDWDGLRDSVPPFTPDFEGATDTCNFDLVEDGLTAMVSGGGETLSDIREGAPLGVHLPFVGYSYSCMALRDSEVPGPTPMELEAEQLLEPHVQAPSLEPSVSPQDETAEVAVPAAVPAAEAEAEVTLRELQEALEEEVLTRQSLSREMEAIRTDNQNFASQLREAEARNRDLEAHVRQLQERMELLQAEGATAVTGVPSPRATDPPSHLDGPPAVAVGQCPLVGPGPMHRRHLLLPARVPRPGLSEALSLLLFAVVLSRAAALGCIGLVAHAGQLTAVWRRPGAARAP

SEQ ID NO: 146126 - DNA, 1890 bp, Artificial Sequence
  derived and/or modified sequence
atgtcggccgaagtgcgactgagaagactgcagcaactcgtccttgaccctggctttctggggctggagcctcttctggacttactgctgggagtgcatcaggagttgggcgcatcagagctagcacaagacaagtatgttgctgatttccttcagtgggcggagccaatcgttgtcagactcaaggaagtgaggctgcagagagacgacttcgaaattctaaaggttatcggaagaggggcattctcagaggttgcagttgtgaagatgaagcagacgggacaggtttatgctatgaaaattatgaacaagtgggacatgctaaagagaggagaggtgagttgttttagggaagagagggacgtgttagtgaacggcgaccgcaggtggataactcaactgcactttgcattccaggatgagaattatctctatctcgtgatggaatattacgtgggcggggatctcctcacccttttgtcgaaattcggagagcgcatacctgcggaaatggcgcggttctatttggccgagatagttatggccatagacagtgtgcatagactgggatatgtgcacagggacatcaaaccagataacatcttactcgatcggtgcggtcatattcgactggcagatttcgggtcatgtctgaaactacgtgccgacgggaccgtgcgatcgctggtggccgtgggcacgcccgactacctgagccccgaaatcctccaggcagtcggcggaggcccgggaaccggaagctatgggcccgagtgtgactggtgggcactcggcgtattcgcctatgagatgttctatgggcagacccccttttatgcggactccacagccgagacctatgggaagatcgtgcattacaaggaacacctgtccctgcccctcgtagacgagggagtgcctgaggaagcccgcgactttattcagcgactgctttgcccacccgagacgaggctgggcagggggggagcaggggattttcgtactcatcctttcttcttcggactggattgggacggacttagagactccgtccccccattcactccagattttgagggggcaaccgacacctgcaactttgacctggtggaggatgggctgaccgcaatggtgagcggcggaggtgaaacactgagcgatattagggagggagcaccgctgggcgttcaccttccctttgtcgggtattcttatagttgcatggcattgagagacagcgaagtccccggaccaactccaatggagcttgaagccgaacagctgctcgagccccatgtgcaagccccttctctcgagccatctgtatctcctcaggacgaaacggcagaggtggcagtcccggctgcagtgcctgcggcagaagcagaggcagaggtaacgctcagagaattgcaggaagcccttgaagaagaagtcttgacgcggcagagcctttcaagagaaatggaggctatacgcacagacaaccagaactttgctagtcagctgcgcgaggccgaggcgcggaatcgcgatctggaggcccacgttagacaattacaagaaaggatggagttactccaagctgagggtgcaacagcagtgactggggtaccgagcccccgagcaactgatcctcccagtcatttagatggccctcctgccgtcgccgtcgggcaatgtcccctagttggaccagggccaatgcataggcgccacctgttgctacctgccagagtcccacggcctggactgtctgaagctttatctctgctgctgttcgccgtggtgctttcacgggcggccgcactgggctgcattggcttggtggctcatgccggacagcttacagcagtttggcggaggccaggcgccgcccgagcgccctag

SEQ ID NO: 146127 - DNA, 1890 bp, Artificial Sequence
  derived and/or modified sequence
atgtctgctgaggtgcggctgcggcggctgcagcagctggtgctggaccccggcttcctgggcctggagcccctgctggacctgctgctgggcgtgcaccaggagctgggcgccagcgagctggcccaggacaagtatgtggccgacttcctgcagtgggccgagcccatcgtggtgcggctgaaggaggtgcggctgcagagagatgactttgagatcctgaaggtgattggccgcggggccttcagcgaggtggccgtggtgaagatgaagcagacaggccaggtgtatgccatgaagatcatgaacaagtgggacatgctgaagagaggagaggtgtcctgcttccgggaggagagagatgtgctggtgaatggagaccggcgctggatcacccagctgcactttgccttccaggatgagaactacctgtacctggtgatggagtactacgtgggcggggacctgctgaccctgctgagcaagtttggagagcgcatcccagctgagatggcccgcttctacctggccgagatcgtgatggccattgattctgtgcaccggctgggctacgtgcaccgggacatcaagccagacaacatcctgctggacagatgtggccacatccggctggccgactttggcagctgcctgaagctgcgggcagatggcaccgtgcgcagcctggtggccgtgggcaccccagactacctgagccctgagatcctgcaggccgtgggcggcggccctggcaccggcagctatggcccagaatgtgactggtgggccctgggcgtgtttgcctatgagatgttttatggccagacccccttctacgccgacagcacagctgagacctacggcaagatcgtgcactacaaggagcacctgagcctgcccctggtggatgaaggagtgcctgaggaggcccgggacttcatccagaggctgctgtgccccccagagacccggctgggccggggcggggccggggacttccgcacccaccccttcttcttcggcctggactgggatggcctgcgggacagcgtgccccccttcaccccagactttgagggcgccacagacacctgcaactttgacctggtggaggatggcctgacagccatggtgtctgggggcggggagaccctgagtgacatccgggagggcgcccccctgggcgtgcacctgccctttgtgggctacagctacagctgcatggccctgcgggacagcgaggtgcccggccccacccccatggagctggaggccgagcagctgctggagccccacgtgcaggcccccagcctggagcccagcgtgagcccccaggatgaaacagctgaggtggccgtgcctgctgctgtgcctgctgctgaggccgaggccgaggtgaccctgcgggagctgcaggaggccctggaggaggaggtgctgacccggcagagcctgagccgggagatggaggccatcagaacagacaaccagaactttgccagccagctgcgggaggccgaggccaggaacagagacctggaggcccacgtgcggcagctgcaggagaggatggagctgctgcaggccgagggcgccacagctgtgactggagtgcccagcccccgggccacagacccccccagccacctggatggccccccagctgtggccgtgggccagtgccccctggtgggccctggccccatgcacagaagacacctgctgctgcctgcccgggtgcccaggcctggcctgtctgaggccctgagcctgctgctgtttgctgtggtgctgagcagagctgctgccctgggctgcatcggcctggtggcccatgctggccagctgacagctgtgtggaggaggcctggagctgcccgggccccctag

SEQ ID NO: 146128 - DNA, 1890 bp, Artificial Sequence
  derived and/or modified sequence
atgagcgccgaggtgcggctgcggcggctgcagcagctggtgctggaccctgggttcctgggtttagaaccactgttggacttattgctgggcgtccaccaagagcttggagccagcgagctggcgcaggataagtatgtggccgactttctgcaatgggcagaacctatcgtcgtgcgattaaaggaagtgcgactgcagagagatgactttgagatcctgaaggtgattggaaggggcgccttctccgaggtggctgtcgtgaaaatgaaacagactggccaggtgtacgctatgaagattatgaacaaatgggatatgttgaagagaggtgaagtcagctgcttcagggaggagagggatgtgttagtgaatggggacagaaggtggattacacaactgcacttcgctttccaggacgagaattacctgtatctggtgatggaatactatgtgggtggcgacttgctcactttactgtctaagttcggagagcgaattcctgccgaaatggcacgcttctaccttgccgaaatagttatggcaatcgattctgtacaccgactgggttacgtgcatcgggacatcaaaccagacaatatcctactggatagatgtggccatataagactcgcggacttcgggagctgcttaaagctccgggctgatggcacagtgaggtctctcgtcgccgtgggtacacccgactatctgagtccagagattcttcaggctgtcggaggggggcccggcactggctcttacggccccgaatgcgattggtgggctctgggtgtgttcgcgtatgagatgttttatggccaaactcctttttacgctgactcaaccgccgagacgtacggtaagattgtgcattacaaggagcacctatcattgcctttagttgatgagggggtcccggaggaagccagagattttatccaacgactgctgtgtcccccagagacccgactggggcggggaggagcaggcgatttccggacacaccctttcttctttggacttgactgggacggcctgagagacagtgttccaccctttacccccgacttcgaaggcgccaccgatacatgtaacttcgatctggtggaggatggactgactgctatggtgtccggcggaggagagaccctgtcagatatccgcgagggcgcacctcttggcgtgcatctcccttttgtggggtactcgtactcttgtatggctctcagagattctgaggtacccggacctactcctatggagctcgaggcagagcaactccttgaaccacacgtgcaggcaccctctctggaaccttcagtgagcccacaggatgaaacagcagaagttgctgtcccggccgccgtcccagccgccgaggcagaggctgaagttacccttcgggagctgcaggaggctctggaagaagaggtcctcacccggcaatccctctctcgggaaatggaagccatcaggactgataatcaaaattttgcttctcaactgcgggaggccgaagctcgtaaccgtgatctggaggcccatgtgcgccagctacaagagcggatggagttattgcaggcggagggagcaaccgctgtaaccggcgtgccgtcaccccgagcaaccgacccacctagtcatttggacggccccccagctgtggctgtgggtcagtgccccctggtaggtcccggcccgatgcaccgccgccatctgcttctgccagccagagttccacgacctggactgtctgaggccctgtctcttctccttttcgccgtggttcttagcagagccgcagctctaggctgtatcggacttgttgcccacgcagggcagctgactgccgtgtggcgtaggcccggagctgctcgagcgccatag

SEQ ID NO: 146129 - DNA, 1890 bp, Artificial Sequence
  derived and/or modified sequence
atgtccgccgaagtacgcctgaggcgccttcagcagttggtactcgaccccggttttctgggcttagaacccttgctggacctgttattgggagttcaccaggagctgggggcttcggagctagcccaggataaatacgtggctgatttcctgcagtgggcagagcccattgtggtgcgactgaaggaagtacgcctgcaacgggacgacttcgagatcctgaaggtgattggcagaggggctttcagtgaagtcgctgtggtaaagatgaagcagactgggcaagtgtatgcgatgaaaatcatgaataagtgggatatgctcaaaaggggtgaggtaagctgcttcagagaggaacgcgatgtcttggtcaacggggaccgacggtggatcacccagctgcactttgctttccaggacgaaaactacctatatctggtgatggagtactacgttgggggtgatctgctgactttgctgagtaaattcggcgagcggatccccgctgagatggcaagattctatttagccgagatcgtcatggccatcgactctgtgcaccgtttaggctacgtccaccgggacatcaagcctgataatatattgctggaccgatgtgggcacataaggcttgccgactttgggtcctgtcttaaactccgtgcagatggaacagtccgtagcttagtggccgtaggtaccccagattatctcagtccagagattttgcaagccgtgggtggcggacctggaaccggctcttacggcccagagtgcgactggtgggctctgggtgtgtttgcctatgaaatgttctacgggcaaacacccttttacgcagatagcacagctgagacttatggcaaaatagtccactacaaagagcatctcagccttcctttagtcgatgagggagtgcctgaagaagctcgggattttatccagcgcttgctgtgtcccccagagacgaggctggggaggggcggagctggcgacttccgcacccacccttttttcttcggtctcgactgggatggtcttcgggacagcgtcccacccttcacaccagacttcgaaggggcaactgatacctgtaatttcgatctcgttgaggatggtctgaccgcaatggtgagtggcggtggagagacacttagtgatatcagagagggggctccactgggtgtacacctccctttcgttggatacagctacagctgtatggccctcagagatagcgaagtacctggacccactccaatggaactagaagccgagcagctcttagagccccacgtccaggccccatcactagaaccatccgtgagcccgcaggacgagacagctgaagtcgctgtgccagcggctgtgcccgcagccgaggccgaagctgaagttaccctaagggagctgcaggaagcccttgaagaggaggttttgacacgtcagagcttgagcagggaaatggaggcaatccgaaccgataatcagaatttcgcaagccagcttcgtgaggccgaggccagaaatcgagatctagaggcgcatgtgagacaactgcaggaacgaatggaactcctccaggcagagggagccaccgcagtaacaggagtgccctccccgagggctactgaccctcccagtcacctcgacggtccaccggctgtagccgtgggccagtgccctttggtcggcccaggtcctatgcaccgcaggcacctgttgttgccagccagagtgcccagacccggactgagcgaggcgttgagcttactcctctttgcagtggtactttcccgcgctgcggctctggggtgcatcggattggtggctcacgctggccagctgaccgccgtgtggcgtcgacccggagcagctcgcgctccttag

SEQ ID NO: 146130 - DNA, 1887 bp, Artificial Sequence
  derived and/or modified sequence
atgagcgccgaggtgcgcctgcgccgcctgcagcagctggtgctggaccccggcttcctgggcctggagcccctgctggacctgctgctgggcgtgcaccaggagctgggcgccagcgagctggcccaggacaagtacgtggccgacttcctgcagtgggccgagcccatcgtggtgcgcctgaaggaggtgcgcctgcagcgcgacgacttcgagatcctgaaggtgatcggccgcggcgccttcagcgaggtggccgtggtgaagatgaagcagaccggccaggtgtacgccatgaagatcatgaacaagtgggacatgctgaagcgcggcgaggtgagctgcttccgcgaggagcgcgacgtgctggtgaacggcgaccgccgctggatcacccagctgcacttcgccttccaggacgagaactacctgtacctggtgatggagtactacgtgggcggcgacctgctgaccctgctgagcaagttcggcgagcgcatccccgccgagatggcccgcttctacctggccgagatcgtgatggccatcgacagcgtgcaccgcctgggctacgtgcaccgcgacatcaagcccgacaacatcctgctggaccgctgcggccacatccgcctggccgacttcggcagctgcctgaagctgcgcgccgacggcaccgtgcgcagcctggtggccgtgggcacccccgactacctgagccccgagatcctgcaggccgtgggcggcggccccggcaccggcagctacggccccgagtgcgactggtgggccctgggcgtgttcgcctacgagatgttctacggccagacccccttctacgccgacagcaccgccgagacctacggcaagatcgtgcactacaaggagcacctgagcctgcccctggtggacgagggcgtgcccgaggaggcccgcgacttcatccagcgcctgctgtgcccccccgagacccgcctgggccgcggcggcgccggcgacttccgcacccaccccttcttcttcggcctggactgggacggcctgcgcgacagcgtgccccccttcacccccgacttcgagggcgccaccgacacctgcaacttcgacctggtggaggacggcctgaccgccatggtgagcggcggcggcgagaccctgagcgacatccgcgagggcgcccccctgggcgtgcacctgcccttcgtgggctacagctacagctgcatggccctgcgcgacagcgaggtgcccggccccacccccatggagctggaggccgagcagctgctggagccccacgtgcaggcccccagcctggagcccagcgtgagcccccaggacgagaccgccgaggtggccgtgcccgccgccgtgcccgccgccgaggccgaggccgaggtgaccctgcgcgagctgcaggaggccctggaggaggaggtgctgacccgccagagcctgagccgcgagatggaggccatccgcaccgacaaccagaacttcgccagccagctgcgcgaggccgaggcccgcaaccgcgacctggaggcccacgtgcgccagctgcaggagcgcatggagctgctgcaggccgagggcgccaccgccgtgaccggcgtgcccagcccccgcgccaccgacccccccagccacctggacggcccccccgccgtggccgtgggccagtgccccctggtgggccccggccccatgcaccgccgccacctgctgctgcccgcccgcgtgccccgccccggcctgagcgaggccctgagcctgctgctgttcgccgtggtgctgagccgcgccgccgccctgggctgcatcggcctggtggcccacgccggccagctgaccgccgtgtggcgccgccccggcgccgcccgcgccccc

SEQ ID NO: 146131 - DNA, 1890 bp, Artificial Sequence
  derived and/or modified sequence
atgagcgccgaggtgagactgagaagactgcagcagctggtgctggaccccggcttcctgggcctggagcccctgctggacctgctgctgggcgtgcaccaggagctgggcgccagcgagctggcccaggacaagtacgtggccgacttcctgcagtgggccgagcccatcgtggtgagactgaaggaggtgagactgcagagagacgacttcgagatcctgaaggtgatcggcagaggcgccttcagcgaggtggccgtggtgaagatgaagcagaccggccaggtgtacgccatgaagatcatgaacaagtgggacatgctgaagagaggcgaggtgagctgcttcagagaggagagagacgtgctggtgaacggcgacagaagatggatcacccagctgcacttcgccttccaggacgagaactacctgtacctggtgatggagtactacgtgggcggcgacctgctgaccctgctgagcaagttcggcgagagaatccccgccgagatggccagattctacctggccgagatcgtgatggccatcgacagcgtgcacagactgggctacgtgcacagagacatcaagcccgacaacatcctgctggacagatgcggccacatcagactggccgacttcggcagctgcctgaagctgagagccgacggcaccgtgagaagcctggtggccgtgggcacccccgactacctgagccccgagatcctgcaggccgtgggcggcggccccggcaccggcagctacggccccgagtgcgactggtgggccctgggcgtgttcgcctacgagatgttctacggccagacccccttctacgccgacagcaccgccgagacctacggcaagatcgtgcactacaaggagcacctgagcctgcccctggtggacgagggcgtgcccgaggaggccagagacttcatccagagactgctgtgcccccccgagaccagactgggcagaggcggcgccggcgacttcagaacccaccccttcttcttcggcctggactgggacggcctgagagacagcgtgccccccttcacccccgacttcgagggcgccaccgacacctgcaacttcgacctggtggaggacggcctgaccgccatggtgagcggcggcggcgagaccctgagcgacatcagagagggcgcccccctgggcgtgcacctgcccttcgtgggctacagctacagctgcatggccctgagagacagcgaggtgcccggccccacccccatggagctggaggccgagcagctgctggagccccacgtgcaggcccccagcctggagcccagcgtgagcccccaggacgagaccgccgaggtggccgtgcccgccgccgtgcccgccgccgaggccgaggccgaggtgaccctgagagagctgcaggaggccctggaggaggaggtgctgaccagacagagcctgagcagagagatggaggccatcagaaccgacaaccagaacttcgccagccagctgagagaggccgaggccagaaacagagacctggaggcccacgtgagacagctgcaggagagaatggagctgctgcaggccgagggcgccaccgccgtgaccggcgtgcccagccccagagccaccgacccccccagccacctggacggcccccccgccgtggccgtgggccagtgccccctggtgggccccggccccatgcacagaagacacctgctgctgcccgccagagtgcccagacccggcctgagcgaggccctgagcctgctgctgttcgccgtggtgctgagcagagccgccgccctgggctgcatcggcctggtggcccacgccggccagctgaccgccgtgtggagaagacccggcgccgccagagccccctag

SEQ ID NO: 146132 - DNA, 2863 bp, Artificial Sequence
  derived and/or modified sequence
aggggggctggaccaaggggtggggagaaggggaggaggcctcggccggccgcagagagaagtggccagagaggcccaggggacagccagggacaggcagacatgcagccagggctccagggcctggacaggggctgccaggccctgtgacaggaggaccccgagcccccggcccggggaggggccatggtgctgcctgtccaacatgtcagccgaggtgcggctgaggcggctccagcagctggtgttggacccgggcttcctggggctggagcccctgctcgaccttctcctgggcgtccaccaggagctgggcgcctccgaactggcccaggacaagtacgtggccgacttcttgcagtgggcggagcccatcgtggtgaggcttaaggaggtccgactgcagagggacgacttcgagattctgaaggtgatcggacgcggggcgttcagcgaggtagcggtagtgaagatgaagcagacgggccaggtgtatgccatgaagatcatgaacaagtgggacatgctgaagaggggcgaggtgtcgtgcttccgtgaggagagggacgtgttggtgaatggggaccggcggtggatcacgcagctgcacttcgccttccaggatgagaactacctgtacctggtcatggagtattacgtgggcggggacctgctgacactgctgagcaagtttggggagcggattccggccgagatggcgcgcttctacctggcggagattgtcatggccatagactcggtgcaccggcttggctacgtgcacagggacatcaaacccgacaacatcctgctggaccgctgtggccacatccgcctggccgacttcggctcttgcctcaagctgcgggcagatggaacggtgcggtcgctggtggctgtgggcaccccagactacctgtcccccgagatcctgcaggctgtgggcggtgggcctgggacaggcagctacgggcccgagtgtgactggtgggcgctgggtgtattcgcctatgaaatgttctatgggcagacgcccttctacgcggattccacggcggagacctatggcaagatcgtccactacaaggagcacctctctctgccgctggtggacgaaggggtccctgaggaggctcgagacttcattcagcggttgctgtgtcccccggagacacggctgggccggggtggagcaggcgacttccggacacatcccttcttctttggcctcgactgggatggtctccgggacagcgtgcccccctttacaccggatttcgaaggtgccaccgacacatgcaacttcgacttggtggaggacgggctcactgccatggtgagcgggggcggggagacactgtcggacattcgggaaggtgcgccgctaggggtccacctgccttttgtgggctactcctactcctgcatggccctcagggacagtgaggtcccaggccccacacccatggaactggaggccgagcagctgcttgagccacacgtgcaagcgcccagcctggagccctcggtgtccccacaggatgaaacagctgaagtggcagttccagcggctgtccctgcggcagaggctgaggccgaggtgacgctgcgggagctccaggaagccctggaggaggaggtgctcacccggcagagcctgagccgggagatggaggccatccgcacggacaaccagaacttcgccagtcaactacgcgaggcagaggctcggaaccgggacctagaggcacacgtccggcagttgcaggagcggatggagttgctgcaggcagagggagccacagctgtcacgggggtccccagtccccgggccacggatccaccttcccatctagatggccccccggccgtggctgtgggccagtgcccgctggtggggccaggccccatgcaccgccgccacctgctgctccctgccagggtccctaggcctggcctatcggaggcgctttccctgctcctgttcgccgttgttctgtctcgtgccgccgccctgggctgcattgggttggtggcccacgccggccaactcaccgcagtctggcgccgcccaggagccgcccgcgctccctgaaccctagaactgtcttcgactccggggccccgttggaagactgagtgcccggggcacggcacagaagccgcgcccaccgcctgccagttcacaaccgctccgagcgtgggtctccgcccagctccagtcctgtgatccgggcccgccccctagcggccggggagggaggggccgggtccgcggccggcgaacggggctcgaagggtccttgtagccgggaatgctgctgctgctgctgctgctgctgctgctgctgctgctgctgctgctgctgctgctgctggggggatcacagaccatttctttctttcggccaggctgaggccctgacgtggatgggcaaactgcaggcctgggaaggcagcaagccgggccgtccgtgttccatcctccacgcacccccacctatcgttggttcgcaaagtgcaaagctttcttgtgcatgacgccctgctctggggagcgtctggcgcgatctctgcctgcttactcgggaaatttgcttttgccaaacccgctttttcggggatcccgcgcccccctcctcacttgcgctgctctcggagccccagccggctccgcccgcttcggcggtttggatatttattgacctcgtcctccgactcgctgacaggctacaggacccccaacaaccccaatccacgttttggatgcactgagaccccgacattcctcggtatttattgtctgtccccacctaggacccccacccccgaccctcgcgaataaaaggccctccatctgccc

SEQ ID NO: 146133 - protein, 391 aa, Artificial Sequence
  derived and/or modified sequence
MEPLRVLELYSGVGGMHHALRESCIPAQVVAAIDVNTVANEVYKYNFPHTQLLAKTIEGITLEEFDRLSFDMILMSPPCQPFTRIGRQGDMTDSRTNSFLHILDILPRLQKLPKYILLENVKGFEVSSTRDLLIQTIENCGFQYQEFLLSPTSLGIPNSRLRYFLIAKLQSEPLPFQAPGQVLMEFPKIESVHPQKYAMDVENKIQEKNVEPNISFDGSIQCSGKDAILFKLETAEEIHRKNQQDSDLSVKMLKDFLEDDTDVNQYLLPPKSLLRYALLLDIVQPTCRRSVCFTKGYGSYIEGTGSVLQTAEDVQVENIYKSLTNLSQEEQITKLLILKLRYFTPKEIANLLGFPPEFGFPEKITVKQRYRLLGNSLNVHVVAKLIKILYE

SEQ ID NO: 146134 - protein, 367 aa, Artificial Sequence
  derived and/or modified sequence
MEPLRVLELYSGVGGMHHALRESCIPAQVVAAIDVNTVANEVYKYNFPHTQLLAKTIEGITLEEFDRLSFDMILMSPPCQPFTRLQKLPKYILLENVKGFEVSSTRDLLIQTIENCGFQYQEFLLSPTSLGIPNSRLRYFLIAKLQSEPLPFQAPGQVLMEFPKIESVHPQKYAMDVENKIQEKNVEPNISFDGSIQCSGKDAILFKLETAEEIHRKNQQDSDLSVKMLKDFLEDDTDVNQYLLPPKSLLRYALLLDIVQPTCRRSVCFTKGYGSYIEGTGSVLQTAEDVQVENIYKSLTNLSQEEQITKLLILKLRYFTPKEIANLLGFPPEFGFPEKITVKQRYRLLGNSLNVHVVAKLIKILYE

SEQ ID NO: 146135 - DNA, 1176 bp, Artificial Sequence
  derived and/or modified sequence
atggagcccctgagagtgctggagctgtacagcggcgtgggcggcatgcaccacgccctgagagagagctgcatccccgcccaggtggtggccgccatcgacgtgaacaccgtggccaacgaggtgtacaagtacaacttcccccacacccagctgctggccaagaccatcgagggcatcaccctggaggagttcgacagactgagcttcgacatgatcctgatgagccccccctgccagcccttcaccagaatcggcagacagggcgacatgaccgacagcagaaccaacagcttcctgcacatcctggacatcctgcccagactgcagaagctgcccaagtacatcctgctggagaacgtgaagggcttcgaggtgagcagcaccagagacctgctgatccagaccatcgagaactgcggcttccagtaccaggagttcctgctgagccccaccagcctgggcatccccaacagcagactgagatacttcctgatcgccaagctgcagagcgagcccctgcccttccaggcccccggccaggtgctgatggagttccccaagatcgagagcgtgcacccccagaagtacgccatggacgtggagaacaagatccaggagaagaacgtggagcccaacatcagcttcgacggcagcatccagtgcagcggcaaggacgccatcctgttcaagctggagaccgccgaggagatccacagaaagaaccagcaggacagcgacctgagcgtgaagatgctgaaggacttcctggaggacgacaccgacgtgaaccagtacctgctgccccccaagagcctgctgagatacgccctgctgctggacatcgtgcagcccacctgcagaagaagcgtgtgcttcaccaagggctacggcagctacatcgagggcaccggcagcgtgctgcagaccgccgaggacgtgcaggtggagaacatctacaagagcctgaccaacctgagccaggaggagcagatcaccaagctgctgatcctgaagctgagatacttcacccccaaggagatcgccaacctgctgggcttcccccccgagttcggcttccccgagaagatcaccgtgaagcagagatacagactgctgggcaacagcctgaacgtgcacgtggtggccaagctgatcaagatcctgtacgagtag

SEQ ID NO: 146136 - DNA, 1104 bp, Artificial Sequence
  derived and/or modified sequence
atggagcccctgagagtgctggagctgtacagcggcgtgggcggcatgcaccacgccctgagagagagctgcatccccgcccaggtggtggccgccatcgacgtgaacaccgtggccaacgaggtgtacaagtacaacttcccccacacccagctgctggccaagaccatcgagggcatcaccctggaggagttcgacagactgagcttcgacatgatcctgatgagccccccctgccagcccttcaccagactgcagaagctgcccaagtacatcctgctggagaacgtgaagggcttcgaggtgagcagcaccagagacctgctgatccagaccatcgagaactgcggcttccagtaccaggagttcctgctgagccccaccagcctgggcatccccaacagcagactgagatacttcctgatcgccaagctgcagagcgagcccctgcccttccaggcccccggccaggtgctgatggagttccccaagatcgagagcgtgcacccccagaagtacgccatggacgtggagaacaagatccaggagaagaacgtggagcccaacatcagcttcgacggcagcatccagtgcagcggcaaggacgccatcctgttcaagctggagaccgccgaggagatccacagaaagaaccagcaggacagcgacctgagcgtgaagatgctgaaggacttcctggaggacgacaccgacgtgaaccagtacctgctgccccccaagagcctgctgagatacgccctgctgctggacatcgtgcagcccacctgcagaagaagcgtgtgcttcaccaagggctacggcagctacatcgagggcaccggcagcgtgctgcagaccgccgaggacgtgcaggtggagaacatctacaagagcctgaccaacctgagccaggaggagcagatcaccaagctgctgatcctgaagctgagatacttcacccccaaggagatcgccaacctgctgggcttcccccccgagttcggcttccccgagaagatcaccgtgaagcagagatacagactgctgggcaacagcctgaacgtgcacgtggtggccaagctgatcaagatcctgtacgagtag

SEQ ID NO: 146137 - DNA, 1176 bp, Artificial Sequence
  derived and/or modified sequence
atggaacctctgcgcgtgctggaattgtactcaggcgtgggtgggatgcaccacgctctgcgcgagagttgtatacccgcccaagtggttgcagccatcgatgttaataccgttgccaacgaggtgtataagtacaacttcccccacactcaattattagcaaaaactatcgagggcatcacgttggaagagtttgaccggctctcttttgacatgatcctcatgagtcctccttgccaacccttcacaaggattgggcggcagggtgacatgactgatagcaggaccaacagctttcttcacatcctggacatcctaccacggctgcagaagctgcccaaatacatactcctcgagaacgtcaaaggtttcgaggtgtcatcaacaagagatctcttgatacagacaatagagaactgtggttttcagtatcaggagtttctgctctcgcccacttctctgggaattccaaatagtaggttgaggtactttctcattgccaagttgcagagtgagccactacccttccaagcccctggtcaggtgctgatggagttcccaaagatcgaaagtgtccacccccagaagtacgccatggacgtcgagaataagatacaggaaaagaacgtcgaacccaacattagttttgatggctctatacagtgcagcgggaaagatgcaatcctctttaagctggagactgccgaggagattcatagaaagaaccagcaagattctgacctcagcgtaaagatgctgaaagactttctggaagacgacacagacgtgaatcagtatctgctaccgccaaagtctctgctgcgttatgccttacttctagacatcgttcagcccacttgtcgccgttcagtttgttttaccaaggggtatggtagctatatcgagggcacaggctccgtgttgcagacggcggaggatgtgcaggtggagaatatttacaagagtctcactaacttatcgcaggaggagcaaatcacaaaactcctaatcctgaaactcagatatttcacacccaaggagatcgccaacctcctgggttttccacccgaattcggctttccagagaaaatcactgtgaaacagcgatatcgccttttgggtaactccctgaatgtgcacgtggttgcaaagctgattaaaatcttatacgagtag

SEQ ID NO: 146138 - DNA, 1104 bp, Artificial Sequence
  derived and/or modified sequence
atggagcctctcagggttctggaattatatagcggcgtcggaggtatgcatcacgctttgcgtgagtcctgtattcctgcacaggtcgtcgcagcaattgatgtgaatactgtcgcgaatgaggtgtataagtataacttccctcatacgcagctcctggcaaagacgatcgagggcatcacactcgaggaattcgacaggctctccttcgacatgatactaatgtcgcctccttgccaaccttttactcgcctgcagaaactgcctaagtatattctccttgaaaatgtgaaaggtttcgaggtgtcttcaaccagagatttacttatccaaacaattgaaaactgcggcttccagtaccaagagttcctactgtcaccaacctccctgggtatcccaaactcacgcctgcgctacttcttaatcgcaaagctccagtccgaaccactgccatttcaagccccaggacaggtactgatggaatttcccaaaattgaaagtgtgcatccacagaaatatgctatggacgtggagaacaagatccaggagaagaacgttgaacctaatatttcttttgacgggagcattcaatgttccggtaaagacgcaatcctgttcaagctggagacagccgaggagatacaccgaaagaaccaacaagattccgatctgagtgtcaagatgctgaaagacttcctcgaagatgacaccgatgtgaatcagtacctgctgcctccaaaatctctgctgaggtacgcactcttgttagatatagtgcagcctacctgcaggcgttcggtgtgttttaccaagggttacggatcctacatcgaagggacgggaagtgtgctgcagactgccgaagatgtacaggttgagaacatttacaagagtctgactaatctgtcacaggaggagcagatcaccaaattgttaatcctcaaactaaggtatttcactcccaaggaaattgccaacctgctgggcttcccccccgaatttggctttcccgagaaaatcacagtgaagcagcgctacagactcctcggtaattcattgaatgtgcacgttgttgctaaattaatcaagatcctgtatgagtag

SEQ ID NO: 146139 - DNA, 1176 bp, Artificial Sequence
  derived and/or modified sequence
atggagcccctgcgggtgctggagctgtacagcggcgtgggcggcatgcaccacgccctgcgggagagctgcatcccagcccaggtggtggccgccattgatgtgaacacagtggccaatgaggtgtacaagtacaacttcccccacacccagctgctggccaagaccatcgagggcatcaccctggaggagtttgaccggctgagctttgacatgatcctgatgagccccccctgccagcccttcaccagaattggccggcagggcgacatgacagacagcaggaccaacagcttcctgcacatcctggacatcctgccccggctgcagaagctgcccaagtacatcctgctggagaatgtgaagggctttgaggtgagcagcacccgggacctgctgatccagaccatcgagaactgtggcttccagtaccaggagttcctgctgagccccaccagcctgggcatccccaacagccggctgcgctacttcctgattgccaagctgcagagcgagcccctgcccttccaggcccctggccaggtgctgatggagttccccaagattgaatctgtgcacccccagaagtatgccatggatgtggagaacaagatccaggagaagaatgtggagcccaacatcagctttgatggcagcatccagtgcagcggcaaggatgccatcctcttcaagctggagacagctgaggagatccacaggaagaaccagcaggacagcgacctgtctgtgaagatgctgaaggacttcctggaggatgacacagatgtgaaccagtacctgctgccccccaagagcctgctgcgctatgccctgctgctggacatcgtgcagcccacctgccgccgctctgtgtgcttcaccaagggctacggcagctacatcgagggcaccggctctgtgctgcagacagcagaagatgtgcaggtggagaacatctacaagagcctgaccaacctgagccaggaggagcagatcaccaagctgctgatcctgaagctgcgctacttcacccccaaggagatcgccaacctgctgggcttccccccagagtttggcttccctgagaagatcaccgtgaagcagcgctaccgcctgctgggcaacagcctgaatgtgcacgtggtggccaagctgatcaagatcctgtatgaatag

SEQ ID NO: 146140 - DNA, 1104 bp, Artificial Sequence
  derived and/or modified sequence
atggagcccctgcgggtgctggagctgtacagcggcgtgggcggcatgcaccacgccctgcgggagagctgcatcccagcccaggtggtggccgccattgatgtgaacacagtggccaatgaggtgtacaagtacaacttcccccacacccagctgctggccaagaccatcgagggcatcaccctggaggagtttgaccggctgagctttgacatgatcctgatgagccccccctgccagcccttcacccggctgcagaagctgcccaagtacatcctgctggagaatgtgaagggctttgaggtgagcagcacccgggacctgctgatccagaccatcgagaactgtggcttccagtaccaggagttcctgctgagccccaccagcctgggcatccccaacagccggctgcgctacttcctgattgccaagctgcagagcgagcccctgcccttccaggcccctggccaggtgctgatggagttccccaagattgaatctgtgcacccccagaagtatgccatggatgtggagaacaagatccaggagaagaatgtggagcccaacatcagctttgatggcagcatccagtgcagcggcaaggatgccatcctcttcaagctggagacagctgaggagatccacaggaagaaccagcaggacagcgacctgtctgtgaagatgctgaaggacttcctggaggatgacacagatgtgaaccagtacctgctgccccccaagagcctgctgcgctatgccctgctgctggacatcgtgcagcccacctgccgccgctctgtgtgcttcaccaagggctacggcagctacatcgagggcaccggctctgtgctgcagacagcagaagatgtgcaggtggagaacatctacaagagcctgaccaacctgagccaggaggagcagatcaccaagctgctgatcctgaagctgcgctacttcacccccaaggagatcgccaacctgctgggcttccccccagagtttggcttccctgagaagatcaccgtgaagcagcgctaccgcctgctgggcaacagcctgaatgtgcacgtggtggccaagctgatcaagatcctgtatgaatag

SEQ ID NO: 146141 - DNA, 1176 bp, Artificial Sequence
  derived and/or modified sequence
atggagcccctgcgggtgctggagctgtacagcggcgtgggcggcatgcatcacgctctcagagagagttgtatccccgctcaggtggtagctgccatagacgtaaataccgtggcgaatgaagtgtacaagtataactttccccatacacagctcctcgctaagactatagaggggatcactcttgaggagtttgaccggctctcttttgacatgatcctgatgtcccccccctgtcaaccattcactagaataggtcggcaaggtgacatgaccgactcccgcacgaacagcttcctacacatacttgatatcctgccccgcctccagaaactaccaaagtacattcttctagagaacgtgaaagggttcgaagtatcgtctactcgtgatttgctgattcaaaccatcgaaaactgcggttttcagtatcaggagttcctgttgtcgccaacttcgttgggaattcccaatagccgccttcggtattttttgatcgctaaactgcagtcagagccactcccctttcaagcacccgggcaggtgctgatggagttccctaagattgaatccgttcaccctcagaagtacgcaatggacgtggagaacaaaattcaggagaagaacgtcgagccaaacattagttttgatggatccattcagtgtagcggtaaagatgcgatactctttaaactggaaactgccgaggagatccatcgtaagaaccagcaggacagcgacttgtcagtgaagatgctgaaggacttcctggaggacgacactgacgtcaaccaatacttgttgcctcccaaatctttgcttcgctacgctttgttactggacatcgttcagcccacttgccgacgctctgtttgctttacaaaggggtacggatcatacattgagggcaccggcagtgtgctgcaaactgctgaagatgtgcaggtcgaaaatatttacaagtctctgaccaatctgtcacaggaggaacagatcactaagctgctgattttaaaactcaggtatttcacccctaaggagattgccaatctgctggggttcccaccagaattcggatttccagagaagataacagtgaagcagcggtatagactgctgggtaatagtttaaatgtgcacgtggtcgccaaattaatcaaaattctctacgaatag

SEQ ID NO: 146142 - DNA, 1104 bp, Artificial Sequence
  derived and/or modified sequence
atggagcccctgcgggtgctggagctgtacagcggcgtgggcggcatgcatcatgcacttcgagagtcctgtattcctgctcaggtcgttgctgctatcgatgtgaacaccgtggctaatgaagtctataaatataacttcccacacacccagctcttggcgaaaacaatcgagggaatcacactggaagagttcgaccgcttgtccttcgacatgatactaatgtcccccccatgccagccttttacacggctgcaaaagttgcccaagtacatcctcctcgagaatgtgaaaggcttcgaagtttcgtcaacgcgcgaccttctcattcagacgattgagaactgtggattccagtaccaggaattcctgctaagtccgacctctctaggcattcctaacagcagattgcgctacttcctcattgccaagttacaatctgaacccctgccgttccaagcaccagggcaggtgcttatggagtttccaaagatcgaatcagtgcacccacaaaagtacgccatggacgttgagaataagattcaggagaaaaatgtggaacccaatattagctttgacggttcaatccagtgctctggaaaggatgcgattctattcaagttagagactgcggaggagatacacagaaagaatcagcaggactcggatttaagcgtcaagatgctaaaagatttcttggaggatgataccgacgtaaaccaatacctgctcccgccaaagtctctgctgagatacgcgctacttttagacattgtgcaacccacatgcaggcggtcggtgtgttttactaagggttacgggtcttatatcgaagggactggaagcgtgctacagaccgcagaagatgtgcaggtggaaaacatctacaagtcacttaccaacctgagccaagaggagcagatcaccaagctgctgattttgaaactgcggtacttcactccgaaggagatcgcaaatctcctcggtttcccaccggagttcggcttccccgagaagatcacggtgaagcaacgatataggctgttgggcaatagcctcaatgttcatgtggtagcaaagttgattaagattctctacgagtag

SEQ ID NO: 146143 - DNA, 1176 bp, Artificial Sequence
  derived and/or modified sequence
atggagccgcttagggttctggaattatattcgggtgtgggcggaatgcatcacgccctccgggagtcctgtatcccagcgcaagtcgttgccgcaattgatgtaaacacagtagcaaacgaagtatataaatacaacttcccccacactcagttactcgcgaaaactatcgagggcattacattagaggagttcgaccgtcttagcttcgacatgattctgatgtcacctccgtgtcagccttttacccgcataggtagacagggagatatgaccgacagccgaaccaatagttttctgcatattctggacatcctgcctagactgcaaaagttgcccaaatatatccttctcgagaacgtgaagggatttgaggtatcaagtacgcgtgatctgcttatacagaccatagagaactgcggattccaatatcaagagtttcttctatcacctactagtctgggcatcccaaactccagattgcgctacttcctaattgcaaaactccaatctgagcccctgcccttccaggccccagggcaggtgctcatggagtttcccaagatcgagtctgtccaccctcagaagtacgccatggacgtagagaacaagattcaggaaaaaaatgtggaacctaatatcagcttcgatgggagcattcagtgctcagggaaggacgcgatcctgttcaagcttgagacagccgaggaaattcatcgcaaaaatcagcaagactctgatctcagcgtgaaaatgttgaaggactttttagaggacgacacagatgtaaaccagtatctgctgcctcccaaatctttgctgagatacgccctcctgctggatattgttcagcccacttgccgaagatcggtctgttttactaagggatacggcagttacatagaggggacagggagcgtgctgcaaaccgccgaagatgttcaggttgagaacatctataagtcactgacaaacttgtcgcaggaagaacagattactaagctgctgattctgaaactacggtactttactcccaaggaaatcgccaatctgctgggttttcctccagagttcggatttcctgagaaaatcactgttaagcaacgataccgtctacttggtaactccttgaatgtgcacgtggtcgccaaattgatcaaaatcctgtacgaatag

SEQ ID NO: 146144 - DNA, 1104 bp, Artificial Sequence
  derived and/or modified sequence
atggagccgctgagggttctggaactgtatagtggcgtcggtggcatgcatcatgctttgagagaatcttgtatcccggctcaggttgtggccgcaatcgacgtcaacactgtcgcaaacgaggtgtacaagtataacttcccacatacgcagttgcttgccaagacaattgagggaattacattggaggaattcgaccggcttagcttcgacatgatattaatgagccccccatgtcagccattcacgcggttgcaaaaattgcccaaatacatactactggaaaatgtgaagggattcgaggtgagcagtacgcgggacttacttatccagactatcgagaactgcggttttcagtaccaagaatttctgctctcccctacctcactcgggatcccaaactctcgcctgcgctatttccttattgcaaaattgcagtccgagcccctcccattccaggcccctggacaggtgttaatggagtttcccaaaattgaatctgttcacccccagaaatatgctatggatgtggagaacaagatccaggagaagaacgtcgagccaaatatcagttttgacggctcaattcaatgcagtggaaaagacgcaattttgttcaaactggaaacagcagaagagatccaccgtaaaaaccagcaggatagcgatctgtcagttaagatgttaaaggacttcctggaggatgataccgatgttaaccagtacttattgccacccaagtccctcctcagatatgctttgctattggatatagtccagcccacctgccgacgaagcgtctgcttcacaaaggggtatggtagttacatcgaaggcaccggatcagtattacagactgcagaagacgttcaggtcgaaaatatatataaatcacttacaaacttgtcccaagaggagcagattacaaagcttttaatccttaaactgcgctacttcacgcccaaagaaatagctaacctgctggggtttcctcctgaatttggtttcccagaaaaaatcacagttaagcagcgttaccgtctcctgggcaatagcctgaatgtgcacgttgttgcaaaattaatcaaaatcctgtatgaatag

SEQ ID NO: 146145 - DNA, 3527 bp, Artificial Sequence
  derived and/or modified sequence
acggaccggcaggcctagctccggggctgcggcggctgaggcgcggggatggagcccctgcgggtgctggagctatacagcggcgtgggcggcatgcaccacgcgctgagagaaagctgtatacctgcacaagtggtggctgccattgatgtcaacactgtcgctaatgaagtatacaagtataattttcctcacacacagttacttgccaagacgattgaaggcattacactcgaagagtttgacagattatcttttgatatgattttaatgagccctccctgccagccattcacaaggattggccggcagggtgatatgactgattcaaggacgaatagcttcttacatattctagatattctcccaagattacaaaaattaccaaagtatattcttttggaaaatgttaaaggttttgaagtatcttctacaagagacctcttgatacaaacaatagaaaattgtggctttcagtaccaagagtttctattatctccaacctctcttggcattccaaattcaaggctacgatattttcttattgcaaagcttcagtcagagccattaccctttcaagcccctggtcaggtactgatggagttccccaaaattgaatctgtacatccacaaaaatatgcaatggatgtagaaaataaaattcaagaaaagaacgttgaaccaaatattagctttgatggcagcatacagtgttctggaaaagatgccattctttttaagcttgaaactgcagaagaaattcacaggaaaaatcaacaagatagtgatctctctgtgaaaatgctaaaagattttcttgaagatgacactgacgtgaaccagtatcttttaccaccaaagtcattgctgcgatatgctcttctgttagacattgttcagcccacttgtagaaggtccgtgtgctttaccaaaggatatggaagctacatagaagggacagggtctgtgttacagactgcagaggatgtgcaggttgagaatatctacaaatcccttaccaatttgtcacaagaagaacagataacaaagctgttaatacttaaactgcgatatttcactcctaaagaaatagcaaatctccttggatttcctccagagttcggatttcctgagaagataacagtgaaacagcgttatcgcctacttggaaatagtctcaacgtgcatgtagtagctaaactaatcaaaatcttatatgaataattttgaaataactctgaaagatggtcatatgatattccttcattttcagagagtaattctgaaattctgttttgaactaattctggtgaaatttaactaaattattttaatctgtccttattaagaaatttggattttattaaaaaaatccatgtgtttcatcaaatttatattactgtattttataaaatacgaactattgttatgctttatggagagtatattttcatatgaaactgataaatatatatgtggaatattctttttaaaaacaattttataaacaaatcaaggagcactagagctttagtgtctacatgagtatcttgtgaagtgtcataacaggcataacatatttttatgttaattaaagaagttttttatttctaattttaaaataatgattctaattctagcccattgaatgttttacttaatttccaatcctgtaaatatttctttatttcatctaaacaaatgcatatgatatgtaaaccaaattatcatcattcagtttatacagcagactgaagaatatgtcaggaaaaataatcctaaatgtttgattacctctccatgaagcggccacagaaactgttggtgcacattatctacattttcctcagcctctatctgaaggacaaaactcatttttccttcttcattttgtatgtactttcctttagttgactattatcaaagcttgtttttgtcttctcagcttctgagttgaatttgcctttgcacgctgaggaatgtagcatgacgttaagatttcagggaggaagctgccctctgatcccatgtcatatgacagtactcccctccccccagttgttctttattgtagcaacatacactctcaatgaacttttatgacttttaactttctctgtctctcttcctcagcagacctcttggaattagggtttctaatcaaactaagtcttgcatcataaattctatggtttgtgataaaagcaagtgacaaagagaagagagatgaaaagaaacaagtccagaaatcatattacaagattttaattcaaatttttcttcttaaaaatcagctatttagaggtggataaattggaagtttgtgcattgcttgtgggaacgtaaaatggttcagctgctgttggaaaacgctatggaggttcgtcacaaaattcaacatagaattaccctatgattcagcgattccacctctggctatagatccaaaagaattgaaagcagggacttgaacagatatttgtacaccagcgtttataacaccattatttacagtagccaaaaggtagaagcagcccaagtgtcatcccattcacccatgaatggatgcaggaattgtgttccgtgcatgcagtggaatagtaccagccttccgcaggaaggaaattctgacatatgcggtgacatggatgaaccttgagtacattatgcgaagtgaaataagccaccctgtggggatggagaatgggtagttagtgcataatggatacaaagtttctgattggggtgatgagaaagttctggaggtggatggggaggatggttgcacaacagtgtgagtgtacttaatgccactgcaactgtatatttaaaaatagttaaaatgataaattttacattatgtatattttactgcaattgaaaaaatcatactctattaccaatttttcagaactcatagataaatatgaatgtagggaagctgtaagccagcccatatacagaaactatcactatctacatttttcatatgtgttcagacagagcctattacaagtctcataaatttcagtaaacaatcacaaattattttggcacactttcatgtaggttctgttcactgctgaaatattctaaataaaatggtttagagttttactgtaactatgaataattatgctataattatagtatcccacattcggttgagcaacattatacaaaataagtgtcgagttactgtgcaccaactataaatacttgaaaggtctgtagagacatttgcttacaaactggtagacagaatgtagcttagtggaattcttaaattatgggaatgtattcacaggaagacggtgattcttgcccttaattcataattgaaaatatgcagtaacaagcataaaactcacatcttaatgaagatgtatctaccagtgtcattcaattagcagatgtatatgtatgcataattaatttggaaaatgttattttatggaatgtctgctatatgcttttggtaataatgctgtatataaaatttgcactggaaattctgtttcctgata

SEQ ID NO: 146146 - DNA, 1274 bp, Artificial Sequence
  derived and/or modified sequence
cgcggggatggagcccctgcgggtgctggagctatacagcggcgtgggcggcatgcaccacgcgctgagagaaagctgtatacctgcacaagtggtggctgccattgatgtcaacactgtcgctaatgaagtatacaagtataattttcctcacacacagttacttgccaagacgattgaaggcattacactcgaagagtttgacagattatcttttgatatgattttaatgagccctccctgccagccattcacaagattacaaaaattaccaaagtatattcttttggaaaatgttaaaggttttgaagtatcttctacaagagacctcttgatacaaacaatagaaaattgtggctttcagtaccaagagtttctattatctccaacctctcttggcattccaaattcaaggctacgatattttcttattgcaaagcttcagtcagagccattaccctttcaagcccctggtcaggtactgatggagttccccaaaattgaatctgtacatccacaaaaatatgcaatggatgtagaaaataaaattcaagaaaagaacgttgaaccaaatattagctttgatggcagcatacagtgttctggaaaagatgccattctttttaagcttgaaactgcagaagaaattcacaggaaaaatcaacaagatagtgatctctctgtgaaaatgctaaaagattttcttgaagatgacactgacgtgaaccagtatcttttaccaccaaagtcattgctgcgatatgctcttctgttagacattgttcagcccacttgtagaaggtccgtgtgctttaccaaaggatatggaagctacatagaagggacagggtctgtgttacagactgcagaggatgtgcaggttgagaatatctacaaatcccttaccaatttgtcacaagaagaacagataacaaagctgttaatacttaaactgcgatatttcactcctaaagaaatagcaaatctccttggatttcctccagagttcggatttcctgagaagataacagtgaaacagcgttatcgcctacttggaaatagtctcaacgtgcatgtagtagctaaactaatcaaaatcttatatgaataattttgaaataactctgaaagatggtcatatgatattccttcattttcagagagtaattctgaaattctgttttgaactaattctggtgaaatttaactaaattattttaatctgtccttattaagaaatttggattttattaaaaaaatccatgtgtttcatc

SEQ ID NO: 146147 - protein, 252 aa, Artificial Sequence
  derived and/or modified sequence
MEDGVAGPQLGAAAEAAEAAEARARPGVTLRPFAPLSGAAEADEGGGDWSFIDCEMEEVDLQDLPSATIACHLDPRVFVDGLCRAKFESLFRTYDKDITFQYFKSFKRVRINFSNPFSAADARLQLHKTEFLGKEMKLYFAQTLHIGSSHLAPPNPDKQFLISPPASPPVGWKQVEDATPVINYDLLYAISKLGPGEKYELHAATDTTPSVVVHVCESDQEKEEEEEMERMRRPKPKIIQTRRPEYTPIHLS

SEQ ID NO: 146148 - DNA, 759 bp, Artificial Sequence
  derived and/or modified sequence
atggaggacggtgtcgcgggtccacagttaggcgccgccgctgaggccgcagaggctgccgaggcacgggctaggcctggagttacacttaggcctttcgcaccactgtctggtgccgccgaagcagatgagggagggggagattggagctttattgactgcgaaatggaggaggttgatctgcaagacttgcccagtgccactatcgcatgtcacctcgacccacgagtgttcgtcgatggcctctgtcgtgcgaagtttgaatcccttttcagaacctatgacaaggacatcacattccagtacttcaagtctttcaagcgggtgcggattaatttcagcaaccccttttcagctgccgacgctcgccttcagctgcataagaccgaatttttgggaaaggaaatgaaactatatttcgcgcagacacttcacattgggtcctcacacttggcgccacctaaccccgacaaacagtttctgatatccccccccgcttccccccctgtgggatggaaacaggtggaagacgccacacctgtgattaattatgaccttctgtacgctataagtaaactggggccaggagaaaagtacgaactccatgccgctaccgatacaacccccagtgtggtagtgcatgtgtgtgaatcagaccaggaaaaggaagaagaagaggagatggagcggatgcgccgtccaaagcctaaaatcattcagactcgccgaccagagtatactcctattcatctaagttag

SEQ ID NO: 146149 - DNA, 759 bp, Artificial Sequence
  derived and/or modified sequence
atggaggatggagtggccggcccccagctgggcgctgctgctgaggccgctgaggccgctgaggcccgggcccggcctggggtgaccctgcggccctttgcccccctgtctggagctgctgaggctgatgaaggaggaggagactggagcttcatcgactgtgagatggaggaggtggacctgcaggacctgcccagcgccaccatcgcctgccacctggacccccgggtgtttgtggatggcctgtgccgggccaagtttgagagcctcttccgcacctatgacaaggacatcaccttccagtacttcaagagcttcaagagggtgcgcatcaacttcagcaaccccttctctgctgctgatgcccggctgcagctgcacaagacagagttcctgggcaaggagatgaagctgtactttgcccagaccctgcacatcggcagcagccacctggccccacccaacccagacaagcagttcctgatcagccccccagccagcccccctgtgggctggaagcaggtggaggatgccacccctgtgatcaactatgacctgctgtatgccatcagcaagctgggccctggagagaagtatgagctgcatgctgccacagacaccacccccagcgtggtggtgcacgtgtgtgagagtgaccaggagaaggaggaggaggaggagatggagaggatgaggcggcccaagcccaagatcatccagacccggcggcctgagtacacccccatccacctgtcctag

SEQ ID NO: 146150 - DNA, 759 bp, Artificial Sequence
  derived and/or modified sequence
atggaggacggcgtggccggcccccagctgggcgccgccgccgaggccgcggaggcggctgaggctcgtgccagaccgggagtgacattaaggcccttcgcccccctatccggagcagcagaagccgacgaaggggggggggactggtccttcatagactgcgagatggaggaggtggaccttcaggatttgccctcggccacaatcgcctgccacctggacccccgtgtatttgttgacggcctgtgccgtgctaaatttgagagtctgtttaggacatacgataaagacatcacttttcagtatttcaaatcctttaaacgggttagaattaatttttcaaatccgttttccgctgcagacgccaggttacagttacataaaacagaatttctgggaaaggagatgaagctttattttgcacagaccctgcatatcggcagttcgcacctagcccccccaaaccccgataagcaattccttatttctccaccagctagtccgcccgttggctggaagcaagttgaagacgccacccccgtcattaattatgacctgctctacgctatttccaagctgggaccaggcgagaaatatgagctgcatgctgccacagacacaacaccctcagttgtggttcacgtatgcgagtctgatcaggagaaggaggaagaggaggagatggaaagaatgcggcgcccaaaaccaaagattattcaaacgcgccgccccgaatatacccccatacacctctcatag

SEQ ID NO: 146151 - DNA, 759 bp, Artificial Sequence
  derived and/or modified sequence
atggaagacggagtcgccggacctcagcttggcgctgcagcggaggcagccgaagctgccgaagcacgggctaggcccggagtaacgttacgcccttttgccccactgtcaggtgccgcagaggcggatgaggggggtggcgactggtcattcatcgactgcgaaatggaggaagtggatttgcaggatcttccatcggcaactattgcttgtcatcttgatccccgagtatttgtggatggcctctgcagggccaagtttgaaagcctctttcgaacatatgataaagatattacattccaatattttaagtcttttaaacgggtgcggattaacttcagtaatccattctcagcggctgacgctcgcctgcaactgcataagactgaatttttgggaaaggaaatgaagctctacttcgctcaaaccttacacatcggaagtagtcacctcgccccaccgaatcctgacaagcagttccttatcagcccgccagccagcccaccagtgggctggaagcaagtggaagacgcaacaccagtgataaactatgatttactgtacgctatttcaaagctggggcctggggagaaatacgagctccacgccgctactgacaccaccccctctgtggttgtgcatgtgtgtgagtccgatcaagaaaaggaagaagaggaagaaatggagcgcatgaggcgaccgaaacctaagataatacagacaagaagacccgaatatacccctatccatctgagttag

SEQ ID NO: 146152 - DNA, 2490 bp, Artificial Sequence
  derived and/or modified sequence
gcctgccgccgcgcgattccgagggggttaacggcggagccgccggccgggcgcggaccggagcgcgtgaggctccggcgcgcaagcccggagcagcccgctggggcgcacagggtcgcgcgggcgcggggatggaggacggcgtggccggtccccagctcggggccgcggcggaggcggcggaggcggccgaggcgcgagcgcggcccggggtgacgctgcggcccttcgcgcccctctcgggggcggccgaggcggacgagggcggcggcgactggagcttcattgactgcgagatggaggaggtggacctgcaggacctgcccagcgccaccatcgcctgtcacctggacccgcgcgtgttcgtggacggcctgtgccgggccaaatttgagtccctctttaggacgtatgacaaggacatcacctttcagtattttaagagcttcaaacgagtcagaataaacttcagcaaccccttctccgcagcagatgccaggctccagctgcataagactgagtttctgggaaaggaaatgaagttatattttgctcagaccttacacataggaagctcacacctggctccgccaaatccagacaagcagtttctgatctcccctcccgcctctccgccagtgggatggaaacaagtggaagatgcgaccccagtcataaactatgatctcttatatgccatctccaagctggggccaggggaaaagtatgaattgcacgcagcgactgacaccactcccagcgtggtggtccatgtatgtgagagtgatcaagagaaggaggaagaagaggaaatggaaagaatgaggagacctaagccaaaaattatccagaccaggaggccggagtacacgccgatccacctcagctgaactggcacgcgacgaggacgcattccaaatcatactcacgggaggaatcttttactgtggaggtggctggtcacgacttcttcggaggtggcagccgagatcggggtggcagaaatcccagttcatgttgctcagaagagaatcaaggccgtgtccccttgttctaatgctgcacaccagttactgttcatggcacccgggaatgacttgggccaatcactgagtttgtggtgatcgcacaaggacatttgggactgtcttgagaaaacagataatgatagtgttttgtacttgttcttttctggtaggttctgtctgtgccaagggcaggttgatcagtgagctcaggagagagcttcctgtttctaagtggcctgcaggggccactctctactggtaggaagaggtaccacaggaagccgcctagtgcagagaggttgtgaaaacagcagcaatgcaatgtggaaattgtagcgtttcctttcttccctcatgttctcatgtttgtgcatgtatattactgatttacaagactaacctttgttcgtatataaagttacaccgttgttgttttacatcttttgggaagccaggaaagcgtttggaaaacgtatcacctttcccagattctcggattctcgactctttgcaacagcacttgcttgcggaactcttcctggaatgcattcactcagcatccccaaccgtgcaacgtgtaacttgtgcttttgcaaaagaagttgatctgaaattcctctgtagaatttagcttatacaattcagagaatagcagtttcactgccaacttttagtgggtgagaaattttagtttaggtgtttgggatcggacctcagtttctgttgtttcttttatgtggtggtttctatacatgaatcatagccaaaaacttttttggaaactgttggttgagatagttggttcttttaccccacgaagacatcaagatacacttgtaaataaagctgatagcatatattcatacctgttgtacacttgggtgaaaagtatggcagtgggagactaagatgtattaacctacctgtgaatcatatgttgtaggaaaagctgttcccatgtctaacaggacttgaattcaaagcatgtcaagtggatagtagatctgtggcgatatgagagggatgcagtgcctttccccattcattcctgatggaattgttatactaggttaacatttgtaatttttttctagttgtaatgtgtatgtctggtaaataggtattatattttggccttacaataccgtaacaatgtttgtcattttgaaatacttaatgccaagtaacaatgcatgctttggaaatttggaagatggttttattctttgagaagcaaatatgtttgcattaaatgctttgattgttcatatcaagaaattgattgaacgttctcaaaccctgtttacggtacttggtaagagggagccggtttgggagagaccattgcatcgctgtccaagtgtttcttgttaagtgcttttaaactggagaggctaacctcaaaatattttttttaactgcattctataataaatgggcacagtatgctccttacagaaaa

SEQ ID NO: 146153 - DNA, 759 bp, Artificial Sequence
  derived and/or modified sequence
atggaggacggcgtggccggcccccagctgggcgccgccgccgaggccgccgaggccgccgaggccagagccagacccggcgtgaccctgagacccttcgcccccctgagcggcgccgccgaggccgacgagggcggcggcgactggagcttcatcgactgcgagatggaggaggtggacctgcaggacctgcccagcgccaccatcgcctgccacctggaccccagagtgttcgtggacggcctgtgcagagccaagttcgagagcctgttcagaacctacgacaaggacatcaccttccagtacttcaagagcttcaagagagtgagaatcaacttcagcaaccccttcagcgccgccgacgccagactgcagctgcacaagaccgagttcctgggcaaggagatgaagctgtacttcgcccagaccctgcacatcggcagcagccacctggccccccccaaccccgacaagcagttcctgatcagcccccccgccagcccccccgtgggctggaagcaggtggaggacgccacccccgtgatcaactacgacctgctgtacgccatcagcaagctgggccccggcgagaagtacgagctgcacgccgccaccgacaccacccccagcgtggtggtgcacgtgtgcgagagcgaccaggagaaggaggaggaggaggagatggagagaatgagaagacccaagcccaagatcatccagaccagaagacccgagtacacccccatccacctgagctag

SEQ ID NO: 146154 - protein, 2871 aa, Artificial Sequence
  derived and/or modified sequence
MSCNGGSHPRINTLGRMIRAESGPDLRYEVTSGGGGTSRMYYSRRGVITDQNSDGYCQTGTMSRHQNQNTIQELLQNCSDCLMRAELIVQPELKYGDGIQLTRSRELDECFAQANDQMEILDSLIREMRQMGQPCDAYQKRLLQLQEQMRALYKAISVPRVRRASSKGGGGYTCQSGSGWDEFTKHVTSECLGWMRQQRAEMDMVAWGVDLASVEQHINSHRGIHNSIGDYRWQLDKIKADLREKSAIYQLEEEYENLLKASFERMDHLRQLQNIIQATSREIMWINDCEEEELLYDWSDKNTNIAQKQEAFSIRMSQLEVKEKELNKLKQESDQLVLNQHPASDKIEAYMDTLQTQWSWILQITKCIDVHLKENAAYFQFFEEAQSTEAYLKGLQDSIRKKYPCDKNMPLQHLLEQIKELEKEREKILEYKRQVQNLVNKSKKIVQLKPRNPDYRSNKPIILRALCDYKQDQKIVHKGDECILKDNNERSKWYVTGPGGVDMLVPSVGLIIPPPNPLAVDLSCKIEQYYEAILALWNQLYINMKSLVSWHYCMIDIEKIRAMTIAKLKTMRQEDYMKTIADLELHYQEFIRNSQGSEMFGDDDKRKIQSQFTDAQKHYQTLVIQLPGYPQHQTVTTTEITHHGTCQDVNHNKVIETNRENDKQETWMLMELQKIRRQIEHCEGRMTLKNLPLADQGSSHHITVKINELKSVQNDSQAIAEVLNQLKDMLANFRGSEKYCYLQNEVFGLFQKLENINGVTDGYLNSLCTVRALLQAILQTEDMLKVYEARLTEEETVCLDLDKVEAYRCGLKKIKNDLNLKKSLLATMKTELQKAQQIHSQTSQQYPLYDLDLGKFGEKVTQLTDRWQRIDKQIDFRLWDLEKQIKQLRNYRDNYQAFCKWLYDAKRRQDSLESMKFGDSNTVMRFLNEQKNLHSEISGKRDKSEEVQKIAELCANSIKDYELQLASYTSGLETLLNIPIKRTMIQSPSGVILQEAADVHARYIELLTRSGDYYRFLSEMLKSLEDLKLKNTKIEVLEEELRLARDANSENCNKNKFLDQNLQKYQAECSQFKAKLASLEELKRQAELDGKSAKQNLDKCYGQIKELNEKITRLTYEIEDEKRRRKSVEDRFDQQKNDYDQLQKARQCEKENLGWQKLESEKAIKEKEYEIERLRVLLQEEGTRKREYENELAKVRNHYNEEMSNLRNKYETEINITKTTIKEISMQKEDDSKNLRNQLDRLSRENRDLKDEIVRLNDSILQATEQRRRAEENALQQKACGSEIMQKKQHLEIELKQVMQQRSEDNARHKQSLEEAAKTIQDKNKEIERLKAEFQEEAKRRWEYENELSKVRNNYDEEIISLKNQFETEINITKTTIHQLTMQKEEDTSGYRAQIDNLTRENRSLSEEIKRLKNTLTQTTENLRRVEEDIQQQKATGSEVSQRKQQLEVELRQVTQMRTEESVRYKQSLDDAAKTIQDKNKEIERLKQLIDKETNDRKCLEDENARLQRVQYDLQKANSSATETINKLKVQEQELTRLRIDYERVSQERTVKDQDITRFQNSLKELQLQKQKVEEELNRLKRTASEDSCKRKKLEEELEGMRRSLKEQAIKITNLTQQLEQASIVKKRSEDDLRQQRDVLDGHLREKQRTQEELRRLSSEVEALRRQLLQEQESVKQAHLRNEHFQKAIEDKSRSLNESKIEIERLQSLTENLTKEHLMLEEELRNLRLEYDDLRRGRSEADSDKNATILELRSQLQISNNRTLELQGLINDLQRERENLRQEIEKFQKQALEASNRIQESKNQCTQVVQERESLLVKIKVLEQDKARLQRLEDELNRAKSTLEAETRVKQRLECEKQQIQNDLNQWKTQYSRKEEAIRKIESEREKSEREKNSLRSEIERLQAEIKRIEERCRRKLEDSTRETQSQLETERSRYQREIDKLRQRPYGSHRETQTECEWTVDTSKLVFDGLRKKVTAMQLYECQLIDKTTLDKLLKGKKSVEEVASEIQPFLRGAGSIAGASASPKEKYSLVEAKRKKLISPESTVMLLEAQAATGGIIDPHRNEKLTVDSAIARDLIDFDDRQQIYAAEKAITGFDDPFSGKTVSVSEAIKKNLIDRETGMRLLEAQIASGGVVDPVNSVFLPKDVALARGLIDRDLYRSLNDPRDSQKNFVDPVTKKKVSYVQLKERCRIEPHTGLLLLSVQKRSMSFQGIRQPVTVTELVDSGILRPSTVNELESGQISYDEVGERIKDFLQGSSCIAGIYNETTKQKLGIYEAMKIGLVRPGTALELLEAQAATGFIVDPVSNLRLPVEEAYKRGLVGIEFKEKLLSAERAVTGYNDPETGNIISLFQAMNKELIEKGHGIRLLEAQIATGGIIDPKESHRLPVDIAYKRGYFNEELSEILSDPSDDTKGFFDPNTEENLTYLQLKERCIKDEETGLCLLPLKEKKKQVQTSQKNTLRKRRVVIVDPETNKEMSVQEAYKKGLIDYETFKELCEQECEWEEITITGSDGSTRVVLVDRKTGSQYDIQDAIDKGLVDRKFFDQYRSGSLSLTQFADMISLKNGVGTSSSMGSGVSDDVFSSSRHESVSKISTISSVRNLTIRSSSFSDTLEESSPIAAIFDTENLEKISITEGIERGIVDSITGQRLLEAQACTGGIIHPTTGQKLSLQDAVSQGVIDQDMATRLKPAQKAFIGFEGVKGKKKMSAAEAVKEKWLPYEAGQRFLEFQYLTGGLVDPEVHGRISTEEAIRKGFIDGRAAQRLQDTSSYAKILTCPKTKLKISYKDAINRSMVEDITGLRLLEAASVSSKGLPSPYNMSSAPGSRSGSRSGSRSGSRSGSRSGSRRGSFDATGNSSYSYSYSFSSSSIGH

SEQ ID NO: 146155 - protein, 953 aa, Artificial Sequence
  derived and/or modified sequence
QQQRAEMDMVAWGVDLASVEQHINSHRGIHNSIGDYRWQLDKIKADLREKSAIYQLEEEYENLLKASFERMDHLRQLQNIIQATSREIMWINDCEEEELLYDWSDKNTNIAQKQEAFSIRMSQLEVKEKELNKLKQESDQLVLNQHPASDKIEAYMDTLQTQWSWILQITKCIDVHLKENAAYFQFFEEAQSTEAYLKGLQDSIRKKYPCDKNMPLQHLLEQIKELEKEREKILEYKRQVQNLVNKSKKIVQLKPRNPDYRSNKPIILRALCDYKQDQKIVHKGDECILKDNNERSKWYVTGPGGVDMLVPSVGLIIPPPNPLAVDLSCKIEQYYEAILALWNQLYINMKSLVSWHYCMIDIEKIRAMTIAKLKTMRQEDYMKTIADLELHYQEFIRNSQGSEMFGDDDKRKIQSQFTDAQKHYQTLVIQLPGYPQHQTVTTTEITHHGTCQDVNHNKVIETNRENDKQETWMLMELQKIRRQIEHCEGRMTLKNLPLADQGSSHHITVKINELKSVQNDSQAIAEVLNQLKDMLANFRGSEKYCYLQNEVFGLFQKLENINGVTDGYLNSLCTVRALLQAILQTEDMLKVYEARLTEEETVCLDLDKVEAYRCGLKKIKNDLNLKKSLLATMKTELQKAQQIHSQTSQQYPLYDLDLGKFGEKVTQLTDRWQRIDKQIDFRLWDLEKQIKQLRNYRDNYQAFCKWLYDAKRRQDSLESMKFGDSNTVMRFLNEQKNLHSEISGKRDKSEEVQKIAELCANSIKDYELQLASYTSGLETLLNIPIKRTMIQSPSGVILQEAADVHARYIELLTRSGDYYRFLSEMLKSLEDLKLKNTKIEVLEEELRLARDANSENCNKNKFLDQNLQKYQAECSQFKAKLASLEELKRQAELDGKSAKQNLDKCYGQIKELNEKITRLTYEIEDEKRRRKSVEDRFDQQKNDYDQLQKARQC

SEQ ID NO: 146156 - DNA, 8616 bp, Artificial Sequence
  derived and/or modified sequence
atgagctgcaacggcggcagccaccccagaatcaacaccctgggcagaatgatcagagccgagagcggccccgacctgagatacgaggtgaccagcggcggcggcggcaccagcagaatgtactacagcagaagaggcgtgatcaccgaccagaacagcgacggctactgccagaccggcaccatgagcagacaccagaaccagaacaccatccaggagctgctgcagaactgcagcgactgcctgatgagagccgagctgatcgtgcagcccgagctgaagtacggcgacggcatccagctgaccagaagcagagagctggacgagtgcttcgcccaggccaacgaccagatggagatcctggacagcctgatcagagagatgagacagatgggccagccctgcgacgcctaccagaagagactgctgcagctgcaggagcagatgagagccctgtacaaggccatcagcgtgcccagagtgagaagagccagcagcaagggcggcggcggctacacctgccagagcggcagcggctgggacgagttcaccaagcacgtgaccagcgagtgcctgggctggatgagacagcagagagccgagatggacatggtggcctggggcgtggacctggccagcgtggagcagcacatcaacagccacagaggcatccacaacagcatcggcgactacagatggcagctggacaagatcaaggccgacctgagagagaagagcgccatctaccagctggaggaggagtacgagaacctgctgaaggccagcttcgagagaatggaccacctgagacagctgcagaacatcatccaggccaccagcagagagatcatgtggatcaacgactgcgaggaggaggagctgctgtacgactggagcgacaagaacaccaacatcgcccagaagcaggaggccttcagcatcagaatgagccagctggaggtgaaggagaaggagctgaacaagctgaagcaggagagcgaccagctggtgctgaaccagcaccccgccagcgacaagatcgaggcctacatggacaccctgcagacccagtggagctggatcctgcagatcaccaagtgcatcgacgtgcacctgaaggagaacgccgcctacttccagttcttcgaggaggcccagagcaccgaggcctacctgaagggcctgcaggacagcatcagaaagaagtacccctgcgacaagaacatgcccctgcagcacctgctggagcagatcaaggagctggagaaggagagagagaagatcctggagtacaagagacaggtgcagaacctggtgaacaagagcaagaagatcgtgcagctgaagcccagaaaccccgactacagaagcaacaagcccatcatcctgagagccctgtgcgactacaagcaggaccagaagatcgtgcacaagggcgacgagtgcatcctgaaggacaacaacgagagaagcaagtggtacgtgaccggccccggcggcgtggacatgctggtgcccagcgtgggcctgatcatccccccccccaaccccctggccgtggacctgagctgcaagatcgagcagtactacgaggccatcctggccctgtggaaccagctgtacatcaacatgaagagcctggtgagctggcactactgcatgatcgacatcgagaagatcagagccatgaccatcgccaagctgaagaccatgagacaggaggactacatgaagaccatcgccgacctggagctgcactaccaggagttcatcagaaacagccagggcagcgagatgttcggcgacgacgacaagagaaagatccagagccagttcaccgacgcccagaagcactaccagaccctggtgatccagctgcccggctacccccagcaccagaccgtgaccaccaccgagatcacccaccacggcacctgccaggacgtgaaccacaacaaggtgatcgagaccaacagagagaacgacaagcaggagacctggatgctgatggagctgcagaagatcagaagacagatcgagcactgcgagggcagaatgaccctgaagaacctgcccctggccgaccagggcagcagccaccacatcaccgtgaagatcaacgagctgaagagcgtgcagaacgacagccaggccatcgccgaggtgctgaaccagctgaaggacatgctggccaacttcagaggcagcgagaagtactgctacctgcagaacgaggtgttcggcctgttccagaagctggagaacatcaacggcgtgaccgacggctacctgaacagcctgtgcaccgtgagagccctgctgcaggccatcctgcagaccgaggacatgctgaaggtgtacgaggccagactgaccgaggaggagaccgtgtgcctggacctggacaaggtggaggcctacagatgcggcctgaagaagatcaagaacgacctgaacctgaagaagagcctgctggccaccatgaagaccgagctgcagaaggcccagcagatccacagccagaccagccagcagtaccccctgtacgacctggacctgggcaagttcggcgagaaggtgacccagctgaccgacagatggcagagaatcgacaagcagatcgacttcagactgtgggacctggagaagcagatcaagcagctgagaaactacagagacaactaccaggccttctgcaagtggctgtacgacgccaagagaagacaggacagcctggagagcatgaagttcggcgacagcaacaccgtgatgagattcctgaacgagcagaagaacctgcacagcgagatcagcggcaagagagacaagagcgaggaggtgcagaagatcgccgagctgtgcgccaacagcatcaaggactacgagctgcagctggccagctacaccagcggcctggagaccctgctgaacatccccatcaagagaaccatgatccagagccccagcggcgtgatcctgcaggaggccgccgacgtgcacgccagatacatcgagctgctgaccagaagcggcgactactacagattcctgagcgagatgctgaagagcctggaggacctgaagctgaagaacaccaagatcgaggtgctggaggaggagctgagactggccagagacgccaacagcgagaactgcaacaagaacaagttcctggaccagaacctgcagaagtaccaggccgagtgcagccagttcaaggccaagctggccagcctggaggagctgaagagacaggccgagctggacggcaagagcgccaagcagaacctggacaagtgctacggccagatcaaggagctgaacgagaagatcaccagactgacctacgagatcgaggacgagaagagaagaagaaagagcgtggaggacagattcgaccagcagaagaacgactacgaccagctgcagaaggccagacagtgcgagaaggagaacctgggctggcagaagctggagagcgagaaggccatcaaggagaaggagtacgagatcgagagactgagagtgctgctgcaggaggagggcaccagaaagagagagtacgagaacgagctggccaaggtgagaaaccactacaacgaggagatgagcaacctgagaaacaagtacgagaccgagatcaacatcaccaagaccaccatcaaggagatcagcatgcagaaggaggacgacagcaagaacctgagaaaccagctggacagactgagcagagagaacagagacctgaaggacgagatcgtgagactgaacgacagcatcctgcaggccaccgagcagagaagaagagccgaggagaacgccctgcagcagaaggcctgcggcagcgagatcatgcagaagaagcagcacctggagatcgagctgaagcaggtgatgcagcagagaagcgaggacaacgccagacacaagcagagcctggaggaggccgccaagaccatccaggacaagaacaaggagatcgagagactgaaggccgagttccaggaggaggccaagagaagatgggagtacgagaacgagctgagcaaggtgagaaacaactacgacgaggagatcatcagcctgaagaaccagttcgagaccgagatcaacatcaccaagaccaccatccaccagctgaccatgcagaaggaggaggacaccagcggctacagagcccagatcgacaacctgaccagagagaacagaagcctgagcgaggagatcaagagactgaagaacaccctgacccagaccaccgagaacctgagaagagtggaggaggacatccagcagcagaaggccaccggcagcgaggtgagccagagaaagcagcagctggaggtggagctgagacaggtgacccagatgagaaccgaggagagcgtgagatacaagcagagcctggacgacgccgccaagaccatccaggacaagaacaaggagatcgagagactgaagcagctgatcgacaaggagaccaacgacagaaagtgcctggaggacgagaacgccagactgcagagagtgcagtacgacctgcagaaggccaacagcagcgccaccgagaccatcaacaagctgaaggtgcaggagcaggagctgaccagactgagaatcgactacgagagagtgagccaggagagaaccgtgaaggaccaggacatcaccagattccagaacagcctgaaggagctgcagctgcagaagcagaaggtggaggaggagctgaacagactgaagagaaccgccagcgaggacagctgcaagagaaagaagctggaggaggagctggagggcatgagaagaagcctgaaggagcaggccatcaagatcaccaacctgacccagcagctggagcaggccagcatcgtgaagaagagaagcgaggacgacctgagacagcagagagacgtgctggacggccacctgagagagaagcagagaacccaggaggagctgagaagactgagcagcgaggtggaggccctgagaagacagctgctgcaggagcaggagagcgtgaagcaggcccacctgagaaacgagcacttccagaaggccatcgaggacaagagcagaagcctgaacgagagcaagatcgagatcgagagactgcagagcctgaccgagaacctgaccaaggagcacctgatgctggaggaggagctgagaaacctgagactggagtacgacgacctgagaagaggcagaagcgaggccgacagcgacaagaacgccaccatcctggagctgagaagccagctgcagatcagcaacaacagaaccctggagctgcagggcctgatcaacgacctgcagagagagagagagaacctgagacaggagatcgagaagttccagaagcaggccctggaggccagcaacagaatccaggagagcaagaaccagtgcacccaggtggtgcaggagagagagagcctgctggtgaagatcaaggtgctggagcaggacaaggccagactgcagagactggaggacgagctgaacagagccaagagcaccctggaggccgagaccagagtgaagcagagactggagtgcgagaagcagcagatccagaacgacctgaaccagtggaagacccagtacagcagaaaggaggaggccatcagaaagatcgagagcgagagagagaagagcgagagagagaagaacagcctgagaagcgagatcgagagactgcaggccgagatcaagagaatcgaggagagatgcagaagaaagctggaggacagcaccagagagacccagagccagctggagaccgagagaagcagataccagagagagatcgacaagctgagacagagaccctacggcagccacagagagacccagaccgagtgcgagtggaccgtggacaccagcaagctggtgttcgacggcctgagaaagaaggtgaccgccatgcagctgtacgagtgccagctgatcgacaagaccaccctggacaagctgctgaagggcaagaagagcgtggaggaggtggccagcgagatccagcccttcctgagaggcgccggcagcatcgccggcgccagcgccagccccaaggagaagtacagcctggtggaggccaagagaaagaagctgatcagccccgagagcaccgtgatgctgctggaggcccaggccgccaccggcggcatcatcgacccccacagaaacgagaagctgaccgtggacagcgccatcgccagagacctgatcgacttcgacgacagacagcagatctacgccgccgagaaggccatcaccggcttcgacgaccccttcagcggcaagaccgtgagcgtgagcgaggccatcaagaagaacctgatcgacagagagaccggcatgagactgctggaggcccagatcgccagcggcggcgtggtggaccccgtgaacagcgtgttcctgcccaaggacgtggccctggccagaggcctgatcgacagagacctgtacagaagcctgaacgaccccagagacagccagaagaacttcgtggaccccgtgaccaagaagaaggtgagctacgtgcagctgaaggagagatgcagaatcgagccccacaccggcctgctgctgctgagcgtgcagaagagaagcatgagcttccagggcatcagacagcccgtgaccgtgaccgagctggtggacagcggcatcctgagacccagcaccgtgaacgagctggagagcggccagatcagctacgacgaggtgggcgagagaatcaaggacttcctgcagggcagcagctgcatcgccggcatctacaacgagaccaccaagcagaagctgggcatctacgaggccatgaagatcggcctggtgagacccggcaccgccctggagctgctggaggcccaggccgccaccggcttcatcgtggaccccgtgagcaacctgagactgcccgtggaggaggcctacaagagaggcctggtgggcatcgagttcaaggagaagctgctgagcgccgagagagccgtgaccggctacaacgaccccgagaccggcaacatcatcagcctgttccaggccatgaacaaggagctgatcgagaagggccacggcatcagactgctggaggcccagatcgccaccggcggcatcatcgaccccaaggagagccacagactgcccgtggacatcgcctacaagagaggctacttcaacgaggagctgagcgagatcctgagcgaccccagcgacgacaccaagggcttcttcgaccccaacaccgaggagaacctgacctacctgcagctgaaggagagatgcatcaaggacgaggagaccggcctgtgcctgctgcccctgaaggagaagaagaagcaggtgcagaccagccagaagaacaccctgagaaagagaagagtggtgatcgtggaccccgagaccaacaaggagatgagcgtgcaggaggcctacaagaagggcctgatcgactacgagaccttcaaggagctgtgcgagcaggagtgcgagtgggaggagatcaccatcaccggcagcgacggcagcaccagagtggtgctggtggacagaaagaccggcagccagtacgacatccaggacgccatcgacaagggcctggtggacagaaagttcttcgaccagtacagaagcggcagcctgagcctgacccagttcgccgacatgatcagcctgaagaacggcgtgggcaccagcagcagcatgggcagcggcgtgagcgacgacgtgttcagcagcagcagacacgagagcgtgagcaagatcagcaccatcagcagcgtgagaaacctgaccatcagaagcagcagcttcagcgacaccctggaggagagcagccccatcgccgccatcttcgacaccgagaacctggagaagatcagcatcaccgagggcatcgagagaggcatcgtggacagcatcaccggccagagactgctggaggcccaggcctgcaccggcggcatcatccaccccaccaccggccagaagctgagcctgcaggacgccgtgagccagggcgtgatcgaccaggacatggccaccagactgaagcccgcccagaaggccttcatcggcttcgagggcgtgaagggcaagaagaagatgagcgccgccgaggccgtgaaggagaagtggctgccctacgaggccggccagagattcctggagttccagtacctgaccggcggcctggtggaccccgaggtgcacggcagaatcagcaccgaggaggccatcagaaagggcttcatcgacggcagagccgcccagagactgcaggacaccagcagctacgccaagatcctgacctgccccaagaccaagctgaagatcagctacaaggacgccatcaacagaagcatggtggaggacatcaccggcctgagactgctggaggccgccagcgtgagcagcaagggcctgcccagcccctacaacatgagcagcgcccccggcagcagaagcggcagcagaagcggcagcagaagcggcagcagaagcggcagcagaagcggcagcagaagaggcagcttcgacgccaccggcaacagcagctacagctacagctacagcttcagcagcagcagcatcggccactag

SEQ ID NO: 146157 - DNA, 9796 bp, Artificial Sequence
  derived and/or modified sequence
aagaaaccggccaggtgtggcctaggcgcccagtgccagcggggaggagactcgctccgccgccgaccaacaccaacacccagctccgacgcagctcctctgcgcccttgccgccctccgagccacagctttcctcccgctcctgcccccggcccgtcgccgtctccgcgctcgcagcggcctcgggagggcccaggtagcgagcagcgacctcgcgagccttccgcactcccgcccggttccccggccgtccgcctatccttggccccctccgctttctccgcgccggcccgcctcgcttatgcctcggcgctgagccgctctcccgattgcccgccgacatgagctgcaacggaggctcccacccgcggatcaacactctgggccgcatgatccgcgccgagtctggcccggacctgcgctacgaggtgaccagcggcggcgggggcaccagcaggatgtactattctcggcgcggcgtgatcaccgaccagaactcggacggctactgtcaaaccggcacgatgtccaggcaccagaaccagaacaccatccaggagctgctgcagaactgctccgactgcttgatgcgagcagagctcatcgtgcagcctgaattgaagtatggagatggaatacaactgactcggagtcgagaattggatgagtgttttgcccaggccaatgaccaaatggaaatcctcgacagcttgatcagagagatgcggcagatgggccagccctgtgatgcttaccagaaaaggcttcttcagctccaagagcaaatgcgagccctttataaagccatcagtgtccctcgagtccgcagggccagctccaagggtggtggaggctacacttgtcagagtggctctggctgggatgagttcaccaaacatgtcaccagtgaatgtttggggtggatgaggcagcaaagggcggagatggacatggtggcctggggtgtggacctggcctcagtggagcagcacattaacagccaccggggcatccacaactccatcggcgactatcgctggcagctggacaaaatcaaagccgacctgcgcgagaaatctgctatctaccagttggaggaggagtatgaaaacctgctgaaagcgtcctttgagaggatggatcacctgcgacagctgcagaacatcattcaggccacgtccagggagatcatgtggatcaatgactgcgaggaggaggagctgctgtacgactggagcgacaagaacaccaacatcgctcagaaacaggaggccttctccatacgcatgagtcaactggaagttaaagaaaaagagctcaataagctgaaacaagaaagtgaccaacttgtcctcaatcagcatccagcttcagacaaaattgaggcctatatggacactctgcagacgcagtggagttggattcttcagatcaccaagtgcattgatgttcatctgaaagaaaatgctgcctactttcagttttttgaagaggcgcagtctactgaagcatacctgaaggggctccaggactccatcaggaagaagtacccctgcgacaagaacatgcccctgcagcacctgctggaacagatcaaggagctggagaaagaacgagagaaaatccttgaatacaagcgtcaggtgcagaacttggtaaacaagtctaagaagattgtacagctgaagcctcgtaacccagactacagaagcaataaacccattattctcagagctctctgtgactacaaacaagatcagaaaatcgtgcataagggggatgagtgtatcctgaaggacaacaacgagcgcagcaagtggtacgtgacgggcccgggaggcgttgacatgcttgttccctctgtggggctgatcatccctcctccgaacccactggccgtggacctctcttgcaagattgagcagtactacgaagccatcttggctctgtggaaccagctctacatcaacatgaagagcctggtgtcctggcactactgcatgattgacatagagaagatcagggccatgacaatcgccaagctgaaaacaatgcggcaggaagattacatgaagacgatagccgaccttgagttacattaccaagagttcatcagaaatagccaaggctcagagatgtttggagatgatgacaagcggaaaatacagtctcagttcaccgatgcccagaagcattaccagaccctggtcattcagctccctggctatccccagcaccagacagtgaccacaactgaaatcactcatcatggaacctgccaagatgtcaaccataataaagtaattgaaaccaacagagaaaatgacaagcaagaaacatggatgctgatggagctgcagaagattcgcaggcagatagagcactgcgagggcaggatgactctcaaaaacctccctctagcagaccagggatcttctcaccacatcacagtgaaaattaacgagcttaagagtgtgcagaatgattcacaagcaattgctgaggttctcaaccagcttaaagatatgcttgccaacttcagaggttctgaaaagtactgctatttacagaatgaagtatttggactatttcagaaactggaaaatatcaatggtgttacagatggctacttaaatagcttatgcacagtaagggcactgctccaggctattctccaaacagaagacatgttaaaggtttatgaagccaggctcactgaggaggaaactgtctgcctggacctggataaagtggaagcttaccgctgtggactgaagaaaataaaaaatgacttgaacttgaagaagtcgttgttggccactatgaagacagaactacagaaagcccagcagatccactctcagacttcacagcagtatccactttatgatctggacttgggcaagttcggtgaaaaagtcacacagctgacagaccgctggcaaaggatagataaacagatcgactttaggttatgggacctggagaaacaaatcaagcaattgaggaattatcgtgataactatcaggctttctgcaagtggctctatgatgctaaacgccgccaggattccttagaatccatgaaatttggagattccaacacagtcatgcggtttttgaatgagcagaagaacttgcacagtgaaatatctggcaaacgagacaaatcagaggaagtacaaaaaattgctgaactttgcgccaattcaattaaggattatgagctccagctggcctcatacacctcaggactggaaactctgctgaacatacctatcaagaggaccatgattcagtccccttctggggtgattctgcaagaggctgcagatgttcatgctcggtacattgaactacttacaagatctggagactattacaggttcttaagtgagatgctgaagagtttggaagatctgaagctgaaaaataccaagatcgaagttttggaagaggagctcagactggcccgagatgccaactcggaaaactgtaataagaacaaattcctggatcagaacctgcagaaataccaggcagagtgttcccagttcaaagcgaagcttgcgagcctggaggagctgaagagacaggctgagctggatgggaagtcggctaagcaaaatctagacaagtgctacggccaaataaaagaactcaatgagaagatcacccgactgacttatgagattgaagatgaaaagagaagaagaaaatctgtggaagacagatttgaccaacagaagaatgactatgaccaactgcagaaagcaaggcaatgtgaaaaggagaaccttggttggcagaaattagagtctgagaaagccatcaaggagaaggagtacgagattgaaaggttgagggttctactgcaggaagaaggcacccggaagagagaatatgaaaatgagctggcaaaggtaagaaaccactataatgaggagatgagtaatttaaggaacaagtatgaaacagagattaacattacgaagaccaccatcaaggagatatccatgcaaaaagaggatgattccaaaaatcttagaaaccagcttgatagactttcaagggaaaatcgagatctgaaggatgaaattgtcaggctcaatgacagcatcttgcaggccactgagcagcgaaggcgagctgaagaaaacgcccttcagcaaaaggcctgtggctctgagataatgcagaagaagcagcatctggagatagaactgaagcaggtcatgcagcagcgctctgaggacaatgcccggcacaagcagtccctggaggaggctgccaagaccattcaggacaaaaataaggagatcgagagactcaaagctgagtttcaggaggaggccaagcgccgctgggaatatgaaaatgaactgagtaaggtaagaaacaattatgatgaggagatcattagcttaaaaaatcagtttgagaccgagatcaacatcaccaagaccaccatccaccagctcaccatgcagaaggaagaggataccagtggctaccgggctcagatagacaatctcacccgagaaaacaggagcttatctgaagaaataaagaggctgaagaacactctaacccagaccacagagaatctcaggagggtggaagaagacatccaacagcaaaaggccactggctctgaggtgtctcagaggaaacagcagctggaggttgagctgagacaagtcactcagatgcgaacagaggagagcgtaagatataagcaatctcttgatgatgctgccaaaaccatccaggataaaaacaaggagatagaaaggttaaaacaactgatcgacaaagaaacaaatgaccggaaatgcctggaagatgaaaacgcgagattacaaagggtccagtatgacctgcagaaagcaaacagtagtgcgacggagacaataaacaaactgaaggttcaggagcaagaactgacacgcctgaggatcgactatgaaagggtttcccaggagaggactgtgaaggaccaggatatcacgcggttccagaactctctgaaagagctgcagctgcagaagcagaaggtggaagaggagctgaatcggctgaagaggaccgcgtcagaagactcctgcaagaggaagaagctggaggaagagctggaaggcatgaggaggtcgctgaaggagcaagccatcaaaatcaccaacctgacccagcagctggagcaggcatccattgttaagaagaggagtgaggatgacctccggcagcagagggacgtgctggatggccacctgagggaaaagcagaggacccaggaagagctgaggaggctctcttctgaggtcgaggccctgaggcggcagttactccaggaacaggaaagtgtcaaacaagctcacttgaggaatgagcatttccagaaggcgatagaagataaaagcagaagcttaaatgaaagcaaaatagaaattgagaggctgcagtctctcacagagaacctgaccaaggagcacttgatgttagaagaagaactgcggaacctgaggctggagtacgatgacctgaggagaggacgaagcgaagcggacagtgataaaaatgcaaccatcttggaactaaggagccagctgcagatcagcaacaaccggaccctggaactgcaggggctgattaatgatttacagagagagagggaaaatttgagacaggaaattgagaaattccaaaagcaggctttagaggcatctaataggattcaggaatcaaagaatcagtgtactcaggtggtacaggaaagagagagccttctggtgaaaatcaaagtcctggagcaagacaaggcaaggctgcagaggctggaggatgagctgaatcgtgcaaaatcaactctagaggcagaaaccagggtgaaacagcgcctggagtgtgagaaacagcaaattcagaatgacctgaatcagtggaagactcaatattcccgcaaggaggaggctattaggaagatagaatcggaaagagaaaagagtgagagagagaagaacagtcttaggagtgagatcgaaagactccaagcagagatcaagagaattgaagagaggtgcaggcgtaagctggaggattctaccagggagacacagtcacagttagaaacagaacgctcccgatatcagagggagattgataaactcagacagcgcccatatgggtcccatcgagagacccagactgagtgtgagtggaccgttgacacctccaagctggtgtttgatgggctgaggaagaaggtgacagcaatgcagctctatgagtgtcagctgatcgacaaaacaaccttggacaaactattgaaggggaagaagtcagtggaagaagttgcttctgaaatccagccattccttcggggtgcaggatctatcgctggagcatctgcttctcctaaggaaaaatactctttggtagaggccaagagaaagaaattaatcagcccagaatccacagtcatgcttctggaggcccaggcagctacaggtggtataattgatccccatcggaatgagaagctgactgtcgacagtgccatagctcgggacctcattgacttcgatgaccgtcagcagatatatgcagcagaaaaagctatcactggttttgatgatccattttcaggcaagacagtatctgtttcagaagccatcaagaaaaatttgattgatagagaaaccggaatgcgcctgctggaagcccagattgcttcagggggtgtagtagaccctgtgaacagtgtctttttgccaaaagatgtcgccttggcccgggggctgattgatagagatttgtatcgatccctgaatgatccccgagatagtcagaaaaactttgtggatccagtcaccaaaaagaaggtcagttacgtgcagctgaaggaacggtgcagaatcgaaccacatactggtctgctcttgctttcagtacagaagagaagcatgtccttccaaggaatcagacaacctgtgaccgtcactgagctagtagattctggtatattgagaccgtccactgtcaatgaactggaatctggtcagatttcttatgacgaggttggtgagagaattaaggacttcctccagggttcaagctgcatagcaggcatatacaatgagaccacaaaacagaagcttggcatttatgaggccatgaaaattggcttagtccgacctggtactgctctggagttgctggaagcccaagcagctactggctttatagtggatcctgttagcaacttgaggttaccagtggaggaagcctacaagagaggtctggtgggcattgagttcaaagagaagctcctgtctgcagaacgagctgtcactgggtataatgatcctgaaacaggaaacatcatctctttgttccaagccatgaataaggaactcatcgaaaagggccacggtattcgcttattagaagcacagatcgcaaccggggggatcattgacccaaaggagagccatcgtttaccagttgacatagcatataagaggggctatttcaatgaggaactcagtgagattctctcagatccaagtgatgataccaaaggattttttgaccccaacactgaagaaaatcttacctatctgcaactaaaagaaagatgcattaaggatgaggaaacagggctctgtcttctgcctctgaaagaaaagaagaaacaggtgcagacatcacaaaagaataccctcaggaagcgtagagtggtcatagttgacccagaaaccaataaagaaatgtctgttcaggaggcctacaagaagggcctaattgattatgaaaccttcaaagaactgtgtgagcaggaatgtgaatgggaagaaataaccatcacgggatcagatggctccaccagggtggtcctggtagatagaaagacaggcagtcagtatgatattcaagatgctattgacaagggccttgttgacaggaagttctttgatcagtaccgatccggcagcctcagcctcactcaatttgctgacatgatctccttgaaaaatggtgtcggcaccagcagcagcatgggcagtggtgtcagcgatgatgtttttagcagctcccgacatgaatcagtaagtaagatttccaccatatccagcgtcaggaatttaaccataaggagcagctctttttcagacaccctggaagaatcgagccccattgcagccatctttgacacagaaaacctggagaaaatctccattacagaaggtatagagcggggcatcgttgacagcatcacgggtcagaggcttctggaggctcaggcctgcacaggtggcatcatccacccaaccacgggccagaagctgtcacttcaggacgcagtctcccagggtgtgattgaccaagacatggccaccaggctgaagcctgctcagaaagccttcataggcttcgagggtgtgaagggaaagaagaagatgtcagcagcagaggcagtgaaagaaaaatggctcccgtatgaggctggccagcgcttcctggagttccagtacctcacgggaggtcttgttgacccggaagtgcatgggaggataagcaccgaagaagccatccggaaggggttcatagatggccgcgccgcacagaggctgcaagacaccagcagctatgccaaaatcctgacctgccccaaaaccaaattaaaaatatcctataaggatgccataaatcgctccatggtagaagatatcactgggctgcgccttctggaagccgcctccgtgtcgtccaagggcttacccagcccttacaacatgtcttcggctccggggtcccgctccggctcccgctcgggatctcgctccggatctcgctccgggtcccgcagtgggtcccggagaggaagctttgacgccacagggaattcttcctactcttattcctactcatttagcagtagttctattgggcactagtagtcagttgggagtggttgctataccttgacttcatttatatgaatttccactttattaaataatagaaaagaaaatcccggtgcttgcagtagagtgataggacattctatgcttacagaaaatatagccatgattgaaatcaaatagtaaaggctgttctggctttttatcttcttagctcatcttaaataagcagtacacttggatgcagtgcgtctgaagtgctaatcagttgtaacaatagcacaaatcgaacttaggatttgtttcttctcttctgtgtttcgatttttgatcaattctttaattttggaagcctataatacagttttctattcttggagataaaaattaaatggatcactgatattttagtcattctgcttctcatctaaatatttccatattctgtattaggagaaaattaccctcccagcaccagcccccctctcaaacccccaacccaaaaccaagcattttggaatgagtctcctttagtttcagagtgtggattgtataacccatatactcttcgatgtacttgtttggtttggtattaatttgactgtgcatgacagcggcaatcttttctttggtcaaagttttctgtttattttgcttgtcatattcgatgtactttaaggtgtctttatgaagtttgctattctggcaataaacttttagacttttgaagtgtttgtgttttaatttaatatgtttataagcatgtataaacatttagcatatttttatcataggtctaaaaatatttgtttactaaatacctgtgaagaaataccattaaaaaactatttggttctgaattcttactagaa

SEQ ID NO: 146158 - DNA, 8616 bp, Artificial Sequence
  derived and/or modified sequence
atgagttgtaatggcggctcacacccccgcataaacacattaggacgtatgatcagggccgagtccgggcctgacctgaggtacgaagtgacgtccggcggaggggggacctcccgcatgtactattcccgcagaggcgtcatcacagatcagaatagtgacggatactgccagacaggaaccatgagccgccaccagaatcagaacactattcaggagctactgcagaattgctcggattgcctgatgcgggccgaactgatcgtgcaaccagagctcaagtacggtgacggcatacaattaacacgatcacgggagctggatgagtgctttgcccaggccaacgatcagatggagatcctggacagtttgattcgggaaatgcgccagatgggccagccctgtgacgcgtaccagaagcgtctgttgcagctgcaagagcaaatgagagccctgtataaggctatctccgttccaagagtccggcgggcctcaagcaagggaggcggcgggtatacctgtcagtctggttccggatgggacgagtttacaaaacatgttacaagcgagtgtctgggctggatgcggcaacagcgcgccgagatggacatggtcgcttggggcgtggacttggcctccgtggagcaacacatcaactcccatcgaggcattcacaactccattggcgactacaggtggcagcttgacaaaatcaaggccgacctgcgcgaaaagtccgcgatctaccaactggaagaggagtatgagaacctgttgaaagccagctttgagcgaatggaccacttaaggcagttgcagaatatcatacaggccacttctagggagataatgtggattaatgattgtgaggaggaagagctcctgtacgattggagcgataagaacactaacatcgctcagaaacaagaggccttcagcatcaggatgtcacagctcgaagttaaggaaaaggagttgaataagctgaaacaagaaagtgaccaactggtgttgaatcagcaccccgcctcagacaagatcgaggcctatatggatacccttcaaacccagtggagttggatcttacagattaccaaatgcattgacgtccatctcaaggagaatgccgcttatttccagtttttcgaggaggcccagtctacagaggcatacctgaaaggactccaggacagtattcgtaaaaagtacccctgcgacaagaatatgccccttcagcatttgctggagcagatcaaggagctagagaaagaaagggaaaagattttagaatacaaaaggcaggtgcagaaccttgtcaacaagagcaaaaagatcgtacagctcaagccacgaaatcctgactatcggtccaataaacctattatacttagggctttatgcgactataaacaggatcagaagatcgtgcacaagggggatgagtgtatcttgaaagacaataacgagcgcagcaaatggtacgtcaccggtcccggaggagtagacatgctggtgcctagtgttggtctcattattcctccccccaatcccttggctgttgatttatcatgcaagattgaacagtattatgaggccatcctggcactgtggaatcagttgtatattaatatgaaatctttggtttcttggcactactgtatgatcgacatcgagaaaatccgcgccatgactatcgccaagctaaagactatgagacaggaggactatatgaaaacgattgctgacttggaactacactaccaggagttcatacgtaactctcagggctctgagatgtttggggacgatgataaacggaagatccagagccaattcactgatgcccaaaagcactatcagacactggtgatacaattgccaggctatcctcagcatcaaacggtgactaccacagagattactcaccatggaacatgccaagacgtgaaccataacaaagtgatcgagactaatagagagaacgataaacaggaaacctggatgctcatggagttgcagaaaataaggcgacagattgagcattgcgaaggacggatgaccctgaagaatctgccactggctgaccagggtagttcccaccatattactgtcaaaattaatgaattgaagtcagtccaaaacgattcccaggctatagccgaggtgctcaatcagttgaaagacatgttagcaaacttccgaggatccgagaaatactgttatctgcagaatgaggtttttggactgttccaaaagctggaaaacattaacggtgtaacagatggatacctcaattctctgtgcacggtaagggcactccttcaggcgatcctgcaaaccgaagatatgttgaaggtctatgaggctaggctgaccgaagaagaaacagtctgtttggatctcgataaagtggaagcctatcgctgtggcctgaagaaaataaagaatgatttaaacctgaaaaaatcactgctggccactatgaagaccgagctacaaaaggcccagcagatccatagccagacgtcccagcagtatccactatacgatctggatctgggaaagttcggagaaaaggttacccagctgactgaccggtggcaacggattgataagcagatcgacttccgactctgggacctggagaaacaaatcaagcagttgcgaaattaccgagacaattaccaggccttctgtaagtggctgtatgatgctaaaagaagacaggatagtctcgagtcaatgaaattcggggactctaatactgtgatgagatttctgaatgaacagaaaaaccttcactctgaaatctccggaaaacgcgataagtcagaggaggtccaaaagatagcagagctgtgcgcgaatagtataaaggattatgaattacagctggcatcgtacacatcgggtttggagacccttctgaatatcccgatcaagaggaccatgattcagagtccaagtggagtgatccttcaagaagctgccgatgttcatgctaggtacattgaattgcttacccggagtggtgactattatagatttttgtctgagatgttgaaatctctggaagacctcaaactgaaaaacaccaagattgaggtgctcgaagaggaactacgccttgcacgagatgcgaattccgagaattgcaataagaacaagtttctcgaccagaatttgcaaaaatatcaggcggaatgctcccaattcaaagccaaactcgcttcactggaggagcttaagaggcaggccgagctggacggaaaaagcgctaagcagaacctggacaaatgctatggccagatcaaggaactaaatgaaaaaatcactcgcttgacgtatgagatagaggacgagaaaaggcggcgcaaatccgtggaggatagatttgatcagcagaagaatgattacgatcaattgcagaaagcgcgtcagtgtgagaaagagaacttggggtggcaaaaacttgagtccgaaaaagccatcaaggaaaaggaatacgaaatcgagaggctgcgggtgttgctgcaggaagaggggacccggaagcgagagtatgaaaacgaactcgcgaaggtgagaaatcactataatgaggaaatgtctaacttgcgcaacaagtatgagacagaaattaatataaccaaaacaacaattaaggaaatcagtatgcaaaaggaagacgatagtaaaaacttgaggaatcaactagatcgcctatctcgagagaatcgggatctaaaagacgagattgtacggctgaatgattctattctgcaagcgactgaacaaagacggagagccgaggagaacgctctgcaacagaaagcgtgcggcagcgagatcatgcagaaaaagcagcacctggagattgagttgaaacaggtgatgcaacagcggagtgaggataacgctaggcataagcaaagtttggaagaggccgcaaagacaatccaggacaaaaataaagagatcgagcggttgaaagccgaattccaggaagaggctaaacgacggtgggagtacgaaaatgagctctcaaaggttcgcaataactacgacgaggaaataattagtctcaagaatcagttcgaaaccgaaattaatatcacaaagactacaatccaccagctgactatgcaaaaggaagaggatacctccggttatcgtgctcagatagataatctgaccagggagaatcggtcgttatccgaggagattaaacggcttaaaaatacactgactcagacgacggaaaatctgcggcgtgtcgaagaggacattcagcagcagaaggctactggaagtgaggtgtcccaacgaaaacaacagctcgaggtggaactgagacaggtgacacagatgcgcactgaagaatctgtcaggtataagcagtcacttgatgatgccgccaaaaccatccaggacaaaaataaggagattgagaggctgaagcaactgatagacaaggagaccaacgacagaaagtgcctggaagacgagaatgcaaggctccagcgcgtgcagtacgatcttcaaaaagctaactcctccgccacagagaccatcaataagctgaaggtccaggaacaggaactgacacgactcaggattgactacgaacgagtgtcccaagaaagaacggtgaaggatcaggacatcacacggtttcagaactcactgaaagagctccagctgcagaagcagaaagtggaggaggagttgaaccgcctcaagagaaccgcctccgaggactcttgcaaaagaaagaaattagaggaagaattggagggcatgcggaggtccctcaaggagcaggccattaagataaccaatctgacccaacaattagaacaggcatcaattgtcaaaaagagatcagaagacgacctccgccagcagcgggacgttctggatggacacctgcgggagaagcagcggacccaggaggaacttagacgcctgagcagcgaggtggaggccctccggaggcagcttctccaggaacaggaatcagttaagcaggctcatcttcgcaatgagcacttccaaaaagctattgaggacaaaagcagaagcttgaacgaatctaaaattgagatcgagaggttgcagtctcttaccgagaacctgaccaaagaacatctgatgctcgaagaggaactgcgaaaccttcgacttgagtatgatgatctccgacggggtagatctgaggccgacagcgataaaaatgctacgattttggagcttaggagtcaactacaaatcagcaacaatcgcactctggagctccagggcctgattaacgacctccagcgggagagagaaaacctgcgtcaagaaatcgaaaagtttcaaaaacaggcgctcgaggccagtaaccggatccaggagtctaagaaccagtgcacgcaggtcgtgcaggagcgggaatctttattggttaagatcaaagtcctggagcaggataaagcccggctgcaaaggctggaagacgagctgaacagagcaaagagtacgcttgaagcagaaacgagagtcaagcaaaggctggagtgcgagaaacagcagatccagaatgatctgaatcaatggaaaacccaatattccaggaaggaggaggctataaggaagattgagagtgaacgagaaaaatcagagcgggagaagaatagcctgcggagcgagatagagaggctgcaagccgaaataaaacgcatcgaggagcgatgtcgacgcaagctggaagactccactagagagactcaatcgcagttagaaactgaacgctcccggtatcagcgtgaaattgataaattgcgccagcgcccctatggatcccaccgtgagacgcaaacggaatgtgagtggacagtggacacaagtaaattggtctttgatggactgagaaaaaaagtaactgccatgcagctctacgaatgtcaattaatagacaaaaccacactggataagctcttgaaaggaaaaaagtctgtggaggaggtagcaagcgagatccaaccctttctgaggggtgccggctccattgccggcgcatcggcgagtccaaaggagaaatacagcctcgttgaagccaaacgcaaaaagctgataagcccagagagcaccgtcatgctgctagaggctcaagccgcaacgggcgggatcatagatccgcaccgcaacgagaagttaactgtagacagtgccattgcccgggatctgatcgacttcgacgacagacagcagatatatgcagccgagaaagccatcacaggttttgacgaccccttttcaggaaagacagttagcgtgagtgaggcgattaagaaaaacctcatagatcgggagactgggatgcgactccttgaagcccaaatcgcctcaggcggggtagttgacccagttaattcagtctttttacctaaggacgtcgccttggctagaggactgatcgatagagacctgtatcgaagcctgaacgacccccgggatagccaaaagaatttcgtggaccccgtgacaaaaaaaaaagtttcatacgtacagctgaaagaacgctgccgtatcgaaccccacacagggctgctcctgttgtcagtgcagaaaaggagcatgagcttccaaggcattcgacagccggtgactgtgactgaactggtggatagcggaatacttcggccaagcactgtaaatgaactcgagtctggccagattagctacgacgaagttggcgagcggattaaggactttcttcaaggaagctcgtgtatcgcggggatttacaacgagacaaccaagcaaaagctggggatatacgaggccatgaaaatcggactggtccgtcccggtacggccctggaactcctggaagcacaggccgccacaggctttattgtcgatcctgtctccaacttgaggcttccggtggaagaggcatacaaacgaggtctggttggcattgagtttaaggaaaagcttctcagtgctgagcgggcagtgacgggatataacgacccggagacgggcaatatcatcagcttgttccaggcaatgaataaagagttaatcgaaaagggacacgggatccgactgctggaagcccagattgcaactggcggcatcatcgacccaaaagaaagccatcggctccctgtcgacatcgcttataaaagaggctacttcaacgaggagctctcagaaatcttgtccgacccatctgacgacacgaagggcttcttcgacccaaatacagaggaaaatcttacttacctgcaacttaaggagagatgcatcaaagatgaagagaccggactgtgcctgcttcctctgaaagaaaaaaagaagcaggtgcagacctcccagaaaaatacactacgaaagcgccgagtggtgatcgtagacccagagacaaataaggagatgtctgtccaggaagcgtacaagaagggacttatcgattacgagaccttcaaagagctctgcgagcaggagtgtgagtgggaggaaataaccatcactgggtccgacggcagcactcgagttgtgctggtggaccgcaaaaccgggtcacagtatgacatccaggatgcgatagacaaaggactggtcgatcgaaagtttttcgaccagtataggtccgggagcctgagcctgacacagtttgccgacatgatatccttgaagaatggggttgggacttctagctctatgggtagcggcgtcagcgatgatgttttctcatcctcgcggcacgagagcgtgagtaagatctccactattagctcagtgagaaacctgacaatccgctcttcgtcttttagtgacactctcgaagagtcttcccccatagcagccattttcgacactgaaaacctcgagaagatatctattacggagggaattgaacgcggcattgtggactcaatcaccggtcagcggcttttggaggcacaggcctgcaccggtggcatcattcatcccaccaccggccaaaagctgtccctgcaggatgccgtgtctcagggtgtaatcgaccaagacatggcaacaagactgaagcccgctcagaaggcattcattggattcgagggcgtcaaaggtaagaagaaaatgtctgcagccgaagcagttaaggaaaagtggctcccttatgaggctggccaacggttcttggagttccagtacttaacaggtggactggtggacccagaagtgcatggtagaatctctaccgaagaagccatccgtaagggattcattgacggacgagcagcccagcgcttacaggacacaagtagttatgccaaaatcctgacatgcccaaagacaaagctcaagattagctacaaggatgccatcaacaggagcatggtggaggatattacggggctgagactgctggaggcagctagcgtctcaagcaaaggcctgcctagcccatacaatatgtcttcagctcctggtagtagaagtggatcacggtccggtagccgctctggttcacgctccgggagcaggagcggctcccgacggggtagctttgatgcaaccggcaactcttcttatagctacagctatagtttttcctcctcttctattggccactag

SEQ ID NO: 146159 - DNA, 8616 bp, Artificial Sequence
  derived and/or modified sequence
atgagctgcaatggaggcagccacccccgcatcaacaccctgggccgcatgatccgggcagagagcggccctgacctgcgctatgaggtgaccagcggcggcggcggcaccagcaggatgtactacagccggcggggcgtcatcacagaccagaacagtgatggctactgccagacaggcaccatgagccgccaccagaaccagaacaccatccaggagctgctgcagaactgcagcgactgcctgatgagagctgagctgattgtgcagcctgagctgaagtatggagatggcatccagctgaccaggagccgggagctggatgaatgttttgcccaggccaatgaccagatggagatcctggacagcctcatccgggagatgaggcagatgggccagccctgtgatgcctaccagaagaggctgctgcagctgcaggagcagatgagggccctgtacaaggccatctctgtgccccgggtgcggcgggccagcagcaaaggaggcggcggctacacctgccagagcggcagcggctgggatgagttcaccaagcacgtgaccagcgagtgcctgggctggatgaggcagcagagagctgagatggacatggtggcctggggcgtggacctggcctctgtggagcagcacatcaacagccaccggggcatccacaacagcatcggggactaccgctggcagctggacaagatcaaggctgacctgcgggagaagagcgccatctaccagctggaggaggagtatgagaacctgctgaaggccagctttgagaggatggaccacctgcggcagctgcagaacatcatccaggccaccagccgggagatcatgtggatcaatgactgtgaggaggaggagctgctgtatgactggagcgacaagaacaccaacatcgcccagaagcaggaggccttcagcatccgcatgagccagctggaggtgaaggagaaggagctgaacaagctgaagcaggagagtgaccagctggtgctgaaccagcacccagccagtgacaagattgaggcctacatggacaccctgcagacccagtggagctggatcctgcagatcaccaagtgcattgatgtgcacctgaaggaaaatgctgcctacttccagttctttgaggaggcccagagcacagaggcctacctgaagggcctgcaggacagcatcaggaagaagtacccctgtgacaagaacatgcccctgcagcacctgctggagcagatcaaggagctggagaaggagcgggagaagatcctggagtacaagaggcaggtgcagaacctggtgaacaagagcaagaagatcgtgcagctgaagcccagaaatccagactaccgcagcaacaagcccatcatcctgcgggccctgtgtgactacaagcaggaccagaagatcgtgcacaagggagatgagtgcatcctgaaggacaacaatgaaagaagcaagtggtacgtgacaggccctgggggcgtggacatgctggtgcccagcgtgggcctcatcatccccccacccaaccccctggccgtggacctgagctgcaagattgagcagtactatgaggccatcctggccctgtggaaccagctgtacatcaacatgaagagcctggtgtcctggcactactgcatgattgatattgagaagatccgggccatgaccatcgccaagctgaagaccatgaggcaggaggactacatgaagaccatcgctgacctggagctgcactaccaggagttcatccggaacagccagggcagcgagatgtttggagatgatgacaagaggaagatccagagccagttcacagatgcccagaagcactaccagaccctggtgatccagctgcccggctacccccagcaccagacagtgaccaccacagagatcacccaccacggcacctgccaggatgtgaaccacaacaaggtgattgagaccaaccgggagaatgacaagcaggagacctggatgctgatggagctgcagaagatccggcggcagatcgagcactgtgagggccgcatgaccctgaagaacctgcccctggccgaccagggcagcagccaccacatcaccgtgaagatcaatgagctgaagtctgtgcagaatgacagccaggccatcgccgaggtgctgaaccagctgaaggacatgctggccaacttccggggcagcgagaagtactgctacctgcagaatgaggtgtttggcctcttccagaagctggagaacatcaatggagtgacagatggctacctgaacagcctgtgcaccgtgcgggccctgctgcaggccatcctgcagacagaggacatgctgaaggtgtatgaggcccggctgacagaggaggagaccgtgtgcctggacctggacaaggtggaggcctaccgctgtggcctgaagaagatcaagaatgacctgaacctgaagaagagcctgctggccaccatgaagacagagctgcagaaggcccagcagatccacagccagaccagccagcagtaccccctgtatgacctggacctgggcaagtttggagagaaggtgacccagctgacagaccgctggcagagaattgacaagcagattgacttccggctgtgggacctggagaagcagatcaagcagctgaggaactacagagacaactaccaggccttctgcaagtggctgtatgatgccaagaggcggcaggacagcctggagagcatgaagtttggagacagcaacacagtgatgaggttcctgaatgagcagaagaacctgcacagcgagatcagcggcaagagggacaagtctgaggaggtgcagaagattgctgagctgtgtgccaacagcatcaaggactatgagctgcagctggccagctacaccagcggcctggagaccctgctgaacatccccatcaagaggaccatgatccagagccccagcggggtcatcctgcaggaggccgcagatgtgcacgcccgctacatcgagctgctgaccaggtctggggactactaccgcttcctgtctgagatgctgaagagcctggaggacctgaagctgaagaacaccaagattgaggtgctggaggaggagctgcggctggccagagatgccaacagcgagaactgcaacaagaacaagttcctggaccagaacctgcagaagtaccaggccgagtgcagccagttcaaggccaagctggccagcctggaggagctgaagaggcaggccgagctggatggcaagagcgccaagcagaacctggacaagtgctacggccagatcaaggagctgaatgagaagatcacccggctgacctatgaaattgaagatgagaagagaagaaggaagtctgtggaggacagatttgaccagcagaagaatgactatgaccagctgcagaaggcccggcagtgtgagaaggagaacctgggctggcagaagctggagagcgagaaggccatcaaggagaaggagtatgaaattgagcggctgcgggtgctgctgcaggaggagggcaccaggaagcgggagtatgaaaatgagctggccaaggtgaggaaccactacaatgaggagatgagcaacctgaggaacaagtatgaaacagagatcaacatcaccaagaccaccatcaaggagatctccatgcagaaggaggatgacagcaagaacctgaggaaccagctggaccggctgagcagagaaaatagagacctgaaggatgaaattgtgcggctgaatgacagcatcctgcaggccacagagcagaggcggcgggcagaggagaatgccctgcagcagaaggcctgtggcagcgagatcatgcagaagaagcagcacctggagattgagctgaagcaggtgatgcagcagaggtctgaggacaatgcccggcacaagcagagcctggaggaggccgccaagaccatccaggacaagaacaaggagattgagcggctgaaggccgagttccaggaggaggccaagaggcgctgggagtatgaaaatgagctgagcaaggtgaggaacaactatgatgaggagatcatcagcctgaagaaccagtttgaaacagagatcaacatcaccaagaccaccatccaccagctgaccatgcagaaggaggaggacaccagcggctaccgggcccagattgacaacctgaccagagaaaatagaagcctgtctgaggagatcaagaggctgaagaacaccctgacccagaccacagagaacctgcggcgggtggaggaggacatccagcagcagaaggccaccggcagcgaggtgtcccagaggaagcagcagctggaggtggagctgcggcaggtgacccagatgaggacagaggagagcgtgcgctacaagcagagcctggatgatgctgccaagaccatccaggacaagaacaaggagattgagcggctgaagcagctgattgacaaggagaccaatgacaggaagtgcctggaggatgaaaatgcccggctgcagagggtgcagtatgacctgcagaaggccaacagcagcgccacagagaccatcaacaagctgaaggtgcaggagcaggagctgacccggctgagaattgattatgaaagagtgtcccaggagaggacagtgaaggaccaggacatcacccgcttccagaacagcctgaaggagctgcagctgcagaagcagaaggtggaggaggagctgaaccggctgaagaggacagccagcgaggacagctgcaagaggaagaagctggaggaggagctggagggcatgaggaggagcctgaaggagcaggccatcaagatcaccaacctgacccagcagctggagcaggccagcatcgtgaagaagagaagtgaagatgacctgcggcagcagagagatgtgctggatggccacctgcgggagaagcagaggacccaggaggagctgcggcggctgagcagcgaggtggaggccctgcggcggcagctgctgcaggagcaggagagcgtgaagcaggcccacctgagaaatgagcacttccagaaggccatcgaggacaagagccgcagcctgaatgaaagcaagattgaaattgagcggctgcagagcctgacagagaacctgaccaaggagcacctgatgctggaggaggagctgaggaacctgcggctggagtatgatgacctgcggcggggccgctctgaggccgacagcgacaagaatgccaccatcctggagctgcggagccagctgcagatcagcaacaacagaaccctggagctgcagggcctcatcaatgacctgcagcgggagcgggagaacctgcggcaggagattgagaagttccagaagcaggccctggaggccagcaaccgcatccaggagagcaagaaccagtgcacccaggtggtgcaggagcgggagagcctgctggtgaagatcaaggtgctggagcaggacaaggcccggctgcagaggctggaggatgagctgaacagagccaagagcaccctggaggccgagaccagggtgaagcagaggctggagtgtgagaagcagcagatccagaatgacctgaaccagtggaagacccagtacagcaggaaggaggaggccatcaggaagattgaaagtgagcgggagaagtctgagcgggagaagaacagcctgcggagtgaaattgagcggctgcaggccgagatcaagagaattgaggagcgctgcaggaggaagctggaggacagcacccgggagacccagagccagctggagacagagaggagccgctaccagcgggagattgacaagctgcggcagaggccctacggcagccaccgggagacccagacagaatgtgagtggacagtggacaccagcaagctggtgtttgatggcctgaggaagaaggtgacagccatgcagctgtatgagtgccagctgattgacaagaccaccctggacaagctgctgaagggcaagaagtctgtggaggaggtggccagcgagatccagcccttcctgcggggagctggcagcattgctggggccagcgccagccccaaggagaagtacagcctggtggaggccaagaggaagaagctgatcagccctgagagcacagtgatgctgctggaggcccaggccgccactggaggcatcatcgacccccacagaaatgagaagctgactgtggacagcgccatcgcccgggacctgattgactttgatgaccggcagcagatctatgctgctgagaaggccatcaccggctttgatgaccccttcagcggcaagacagtgtctgtgtctgaggccatcaagaagaacctgattgaccgggagaccggcatgaggctgctggaggcccagatcgccagcggaggagtggtggaccctgtgaacagcgtcttcctgcccaaggatgtggccctggcccggggcctgattgaccgggacctgtaccgcagcctgaatgacccccgggacagccagaagaactttgtggaccctgtgaccaagaagaaggtgtcctatgtgcagctgaaggagcgctgccgcatcgagccccacacaggcctgctgctgctgtctgtgcagaagaggtccatgtccttccagggcatccggcagcctgtgacagtgacagagctggtggacagcggcatcctgcggcccagcacagtgaatgagctggagagcggccagatctcctatgatgaggtgggggagcgcatcaaggacttcctgcagggcagcagctgcatcgccggcatctacaatgagaccaccaagcagaagctgggcatctatgaggccatgaagattggcctggtgcggcctggaacagccctggagctgctggaggcccaggccgccaccggcttcatcgtggaccctgtgagcaacctgcggctgcctgtggaggaggcctacaagaggggcctggtgggcatcgagttcaaggagaagctgctgtctgctgagagagctgtgacaggctacaatgaccctgagaccggcaacatcatcagcctcttccaggccatgaacaaggagctgattgaaaaaggacatggcatccggctgctggaggcccagatcgccaccggcggcatcatcgaccccaaggagagccaccggctgcctgtggacatcgcctacaagaggggctacttcaatgaggagctgtctgagatcctgagtgaccccagtgatgacaccaagggcttctttgaccccaacacagaggagaacctgacctacctgcagctgaaggagcgctgcatcaaggatgaggagaccggcctgtgcctgctgcccctgaaggagaagaagaagcaggtgcagaccagccagaagaacaccctgaggaagagaagagtggtgattgtggaccctgagaccaacaaggagatgtctgtgcaggaggcctacaagaagggcctgattgattatgagaccttcaaggagctgtgtgagcaggagtgtgagtgggaggagatcaccatcactggaagtgatggcagcaccagggtggtgctggtggacaggaagacaggcagccagtatgacatccaggatgccatcgacaagggcctggtggacaggaagttctttgaccagtacagaagtggcagcctgagcctgacccagtttgctgacatgatcagcctgaagaatggagtgggcaccagcagctccatgggcagcggcgtgtctgatgatgtgttcagcagcagcagacatgaatctgtgtccaagatcagcaccatcagctctgtgaggaacctgaccatccgcagcagcagcttcagtgacaccctggaggagagcagccccatcgccgccatctttgacacagagaacctggagaagatcagcatcacagagggcatcgagcggggcatcgtggacagcatcaccggccagaggctgctggaggcccaggcctgcacaggaggcatcatccaccccaccaccggccagaagctgagcctgcaggatgctgtgtcccagggcgtcatcgaccaggacatggccacccggctgaagccagcccagaaggccttcatcggctttgagggcgtgaagggcaagaagaagatgtctgctgctgaggccgtgaaggagaagtggctgccctatgaggccggccagcgcttcctggagttccagtacctgactggaggcctggtggaccctgaggtgcacggccgcatcagcacagaggaggccatcaggaagggcttcattgatggccgggccgcccagaggctgcaggacaccagcagctatgccaagatcctgacctgccccaagaccaagctgaagatctcctacaaggatgccatcaacagatccatggtggaggacatcaccggcctgcggctgctggaggccgcctctgtgagcagcaagggcctgcccagcccctacaacatgagcagcgcccctggcagccgcagcggcagccgcagcggcagccgcagcggcagccgcagcggcagccgcagcggcagccggcggggcagctttgatgccactggaaacagcagctacagctacagctacagcttcagcagcagcagcatcggccactag

SEQ ID NO: 146160 - DNA, 8616 bp, Artificial Sequence
  derived and/or modified sequence
atgagctgcaacggcggcagccacccccggatcaacaccctgggccgcatgatacgcgctgaatccggcccggatctccgctacgaggtaaccagtggtggtggcgggacctcccgtatgtattactctcggcgtggtgtgattacagaccaaaactcagacggctactgtcagactggtaccatgagcaggcatcagaatcagaacaccattcaggagctgttacagaactgctccgactgccttatgcgtgccgaactaatagtgcagcccgaactcaaatacggggacgggattcagcttaccagatcacgcgagctggacgagtgctttgcccaagcaaatgatcagatggaaattttagatagcctgatacgtgagatgagacaaatgggccagccatgtgacgcttaccagaaaagacttctgcaactgcaggaacagatgcgcgcattatataaagcaataagcgtccctcgggtgagacgagcttcctcaaagggagggggcggctatacgtgccagtcgggatctggatgggatgagttcacaaaacacgttacatcggagtgcctaggctggatgagacagcaaagggccgaaatggacatggttgcttggggtgtggacctagctagcgttgaacaacatatcaactcgcataggggtattcataactcaatcggtgactacagatggcagctcgataagatcaaagccgacctgagggagaagagcgctatatatcaactggaggaggaatatgaaaatctgctgaaggcctctttcgagagaatggaccacctaaggcagttgcagaatatcatccaggctaccagccgcgagatcatgtggataaacgattgcgaggaagaggaactgttgtacgactggtccgacaaaaataccaatatagctcagaagcaagaggcattctccatcaggatgagtcaattagaggtgaaagaaaaagagctgaataaacttaagcaagagtcagaccagcttgttttgaatcagcaccctgcgtccgacaaaattgaagcgtatatggacacattgcaaacccagtggagttggatcctgcagatcaccaagtgcatagacgtacatctcaaagagaatgcagcttactttcagttttttgaagaagcccaaagcaccgaggcctacttgaagggacttcaggactcaatcagaaagaaatatccctgcgacaagaatatgcccttgcaacacctattagagcaaatcaaggaattagagaaggagcgcgaaaagatattggagtataaaagacaggtacaaaaccttgttaataagagcaagaaaattgtacagctgaaaccccgcaatccggactatagaagcaacaagccaatcatcctgagggccctctgcgactacaagcaggatcaaaaaatagtgcataagggggacgaatgtatactgaaagataacaacgaacggtcaaaatggtatgtgaccgggcctgggggcgtagacatgcttgttccatcagtcggcttaattatcccccccccaaatccactggctgtggatctgagctgcaaaatagagcagtattatgaggctatactggcactatggaatcaactgtacataaatatgaaatcacttgtgagttggcactactgtatgatagatatcgagaaaattagagctatgactatcgcaaagctaaaaactatgaggcaggaggattacatgaagaccattgccgacttggagttgcattatcaggagttcattaggaattctcagggatccgagatgtttggggacgacgataaaaggaaaatccagtcccagtttaccgacgcccaaaaacattaccagactctggtgatccaactgcctgggtaccctcaacaccagactgtcacaacaaccgagatcacccatcacggaacttgtcaggacgtgaatcacaacaaggtgatcgaaaccaatcgggagaatgacaagcaggagacctggatgctgatggagttacagaaaataagaaggcagatcgagcattgcgaaggaagaatgaccctcaagaatttgcccctggccgaccagggctcctctcaccatatcaccgtcaaaatcaacgagctcaaaagcgttcagaatgactctcaagccattgctgaggtcctcaaccagctcaaggatatgctcgccaactttcggggcagtgagaaatattgctatttacaaaatgaagtattcggtctctttcagaaactggaaaacataaacggcgtgacagatggttacctgaactccttgtgcaccgtcagagcgctgcttcaggctatactgcagacagaagatatgctaaaggtctacgaggcacggctcaccgaggaagagacagtgtgtttagacctggacaaagtcgaggcctataggtgtggcttaaagaagataaagaatgatcttaaccttaaaaaaagtctgctagccacaatgaaaaccgaacttcagaaagcgcagcagatccatagccagacgtcacagcagtatccgctgtacgatctcgatcttggcaagtttggtgagaaagttacccagctgactgataggtggcagcgaatcgacaaacaaatagatttcaggctctgggatctcgaaaagcagattaagcagctcagaaactatagggacaactaccaggctttctgtaaatggctttacgacgccaagagacgccaggattctctagagtcaatgaagttcggagattctaacaccgtcatgagatttctgaacgagcagaagaacctacatagtgagatttccgggaagcgtgacaaatcagaggaggtgcagaagattgctgagctgtgtgccaactctattaaagattatgagctccagcttgccagctatacgtccggtttggagactctgctgaacatccctatcaaacggaccatgatacagtccccatccggcgtgatcctccaggaagctgccgacgtgcacgctcgttatatcgagctgctgacccggagcggcgactattaccgtttcctttctgaaatgctgaagtcactggaggacctcaaactcaagaacaccaagattgaggtcttagaagaggaactccgtcttgcccgagacgccaattcggaaaattgcaataagaacaagttcttagatcagaacttgcagaaatatcaagccgagtgcagccagtttaaggccaaactggcctccctcgaggaactgaagagacaggcagagctggatggtaagtcagctaagcaaaatctggataagtgctatggccaaataaaagagttgaacgagaagatcacccggctgacttatgagatcgaagacgaaaagcgtagaagaaaaagcgtagaagatagattcgaccagcaaaaaaatgattatgatcagcttcaaaaagcgagacagtgcgaaaaagaaaatttgggatggcagaaattggagtccgaaaaggctattaaagaaaaggagtacgagatcgagcggttaagagtgctactccaggaggaaggcacacgcaagcgtgagtatgagaacgagctggcaaaggtcagaaaccactacaacgaggagatgagtaacctgcggaacaaatacgagacggagattaatatcactaagaccaccatcaaggagatttcgatgcaaaaagaggacgactctaagaacctgcggaatcaattggatagactgtcaagagagaaccgggacctaaaagacgagatcgtcagactgaacgacagcatcctgcaggctaccgagcagcgccgccgcgccgaggagaacgcattgcagcaaaaggcgtgcggttccgaaatcatgcaaaaaaaacaacatttggagatagagttaaaacaggttatgcagcaaagatctgaggacaacgcacgtcataaacagtccctggaggaggctgccaagacaattcaggacaaaaacaaggaaatagagaggctcaaggcagaatttcaagaggaggcaaagcggcgatgggaatatgagaacgaactctcaaaagtgcggaataactatgatgaggagattatctcactcaaaaatcagttcgaaaccgagatcaatattactaagacgacaattcaccagctaaccatgcagaaggaggaggacacttccggctaccgggcacaaattgacaacctgacgcgagagaaccggtctctttcagaggagatcaaaagactgaagaacacgctgacgcaaacgacagagaacctaagacgcgtcgaggaggatattcagcaacaaaaggccactgggagtgaagtcagtcagcggaagcagcagcttgaggtggaactccggcaagtcactcagatgaggactgaggaaagcgtccgctacaagcagagcttggacgacgccgccaagactattcaggataagaacaaggagatcgaacgactgaagcagctgattgacaaagaaacaaatgataggaagtgtctcgaggatgagaatgcacgactccagcgggttcagtacgacctccaaaaggccaactcgagtgccacagaaacaatcaacaagctcaaagtccaggagcaggaactgactagactcagaatagactacgagcgagtcagccaggaacggacagtgaaagatcaggatattactcgctttcagaacagtctgaaggagttgcagcttcaaaagcagaaagttgaagaagagttaaataggctaaaacgtactgctagcgaggactcctgcaagcgcaagaaactggaggaagaattagaggggatgcgtagatcactcaaagaacaagctattaaaatcaccaacctgacccagcaattagaacaggcctcaatcgttaagaagagaagcgaagacgatctgcgtcagcagagggatgttctcgatggccacctcagggagaagcagcgcacccaggaagaactgagaagactttcctcagaagtggaagcactgcgtagacaactgctccaggaacaggaaagtgtgaagcaggcccacctcaggaatgaacacttccagaaagccattgaggataaatccagatcgttgaatgaaagtaagatagagatcgagcgactgcagtctttgacggagaatttgacaaaggaacacctgatgttggaagaggaactacggaatctgcgcctcgaatacgacgacctgaggcggggaagaagcgaggccgactcagataaaaacgccacgatcttggaactgcggagtcagctgcaaatatctaacaatcgcaccctcgagctccaaggcctgattaacgatctgcaacgcgaacgggaaaatctaagacaggaaattgaaaagttccagaagcaggcgctggaggcaagcaatagaatacaggagtcaaagaaccaatgcacccaagtcgtgcaggagagagagtcgttattagtgaaaattaaggtcttagagcaggataaggccagactccagaggctcgaggatgaactgaatcgcgctaagagcaccctcgaggctgaaacacgagtgaagcaacgcctggagtgcgagaaacagcaaatccagaatgatctgaaccagtggaaaactcagtactcccggaaggaggaagctattcgtaaaatagaatcagagagggaaaagagcgagcgtgagaaaaatagtctgcggagcgagattgagagactccaggcggaaatcaaacgaattgaagaacggtgccgacggaaactggaggattcgacaagggaaactcaatcacagctggagactgagcggagtcgctatcagagagaaatcgataagctgcggcagcgtccctatggttcacaccgtgagacccagactgagtgcgaatggaccgtggatacgtctaagttagtgttcgatggattgcggaaaaaagtcactgccatgcagctttacgagtgtcagcttatagataaaacaactttggacaaactgctcaagggaaaaaaatcagtggaagaagtggccagtgagatacagccgtttttgcgcggggccggcagcatagcaggagcatccgcttcaccaaaggaaaagtactctttggtcgaggctaaacgaaagaagctgatctccccagagtccaccgtgatgctcctggaagcacaggcagccactggaggtatcatcgacccccacagaaacgagaagctgacggttgactccgcaattgctcgtgatcttattgattttgacgacagacaacagatatacgctgcagagaaggcgattaccggttttgacgatccattctccgggaaaacagtgagtgtcagcgaggcaatcaaaaaaaacctaattgaccgagaaacaggaatgaggttactggaagctcagatcgcaagtgggggagtggtggatccggttaacagcgttttcctccccaaagacgtagccctggcccggggtttgattgacagagatctgtatcgatcattgaacgacccccgggactcacagaagaacttcgttgaccccgtaactaaaaagaaggttagttacgtgcagttaaaggagagatgccggatagagcctcacaccggattgctactgctgtctgtgcaaaaacgctctatgagcttccagggaattcgacagccggtgacagtgactgagctggtggacagcggaatcctgagaccgtccactgtcaatgagctcgaatctggtcaaatttcttacgacgaggtgggggaaaggatcaaggatttcctgcaggggtccagttgcattgcaggcatctacaatgaaacaacaaagcaaaagcttgggatctacgaggctatgaagatcggcttggtaaggcctggcacagcgctggaactcctggaggcacaggccgctacaggcttcatcgttgacccagtgagcaaccttcgcctgccggtggaggaagcatataagcggggcttggtgggcattgagttcaaggaaaaactcctttccgccgaaagagctgtcacagggtataatgaccctgaaaccggaaatatcatatccctgttccaggccatgaataaggaactcatcgagaagggccacggtattcggttgctggaggcccagatcgccaccggcgggattatcgacccaaaggaatctcataggctgccagttgatatcgcgtataaaagggggtatttcaatgaagagctctccgaaattctgtcagaccctagcgatgacacaaaggggttctttgatcccaataccgaggaaaacttaacttacctgcaactcaaagaaagatgcattaaggacgaggagacagggttatgccttctgccgctgaaggagaaaaagaaacaggtgcaaacttcacagaagaacaccctgagaaaaagaagagtcgtaattgtcgaccccgagactaacaaggagatgtcagtccaggaggcctacaaaaaaggcctcattgattacgagacttttaaagagctctgtgagcaggaatgtgagtgggaggagattaccatcacaggctctgacggctctactagggtggttctggtcgaccgcaagaccggaagccagtacgatatccaagacgccatagacaagggactcgtggacagaaagttctttgaccagtacaggtctggcagcctttcacttactcaatttgctgatatgatctccctgaagaatggtgttggaaccagcagtagtatgggctctggcgtgtctgatgacgtgttctcaagttctagacacgaaagcgtctccaagattagtacaatcagctctgtgaggaacctcaccatacgctctagttccttttccgatacgttggaagaatcctcccccatcgcagcgattttcgacaccgagaacttggaaaaaatttccatcactgagggcatagaaagaggtattgttgacagcatcaccgggcagaggctattggaggcccaggcctgtaccggcggaatcatccaccccaccacagggcagaaactctcgctgcaggatgccgtcagccaaggggttatagaccaagacatggctaccagactgaaacctgctcaaaaggcttttataggattcgagggggtgaagggtaagaaaaaaatgagcgccgcagaggcagttaaagaaaaatggctcccctatgaggcgggccagcgttttctcgaatttcagtatttgactggaggattagtggatcctgaggtgcatggacggatcagtacagaggaggccatcaggaagggattcatcgacggccgggccgctcaaaggcttcaggatacatcatcgtacgccaaaatactgacatgtccgaaaacaaagcttaagatctcctataaggatgccattaaccgctctatggtcgaggatatcacggggttaagactgttagaagccgcatctgtttccagcaaaggactcccttccccatataatatgtccagtgcacctggctcaaggtccgggtcccggtctggaagtcgcagcggttctagatccggctcacggtcaggatccaggcggggcagctttgacgctacaggaaactcttcatactcatactcctattcattttcctcttcgtcaattggtcattag

SEQ ID NO: 146161 - DNA, 8615 bp, Artificial Sequence
  derived and/or modified sequence
atgtcatgcaatggagggtcccaccccaggatcaatactttgggccgtatgatccgggcagagtcaggccctgatttgcgatatgaggtgacttcaggcggagggggaacttccagaatgtattacagcaggcggggtgtaataaccgatcagaattctgacggatattgtcaaactgggaccatgagcaggcaccagaatcagaacactatccaggaactcctgcagaattgttcagactgcctaatgcgcgcagaactgatagttcagcccgaactgaaatatggagatggcattcagttaacacgcagtcgagagctggacgagtgttttgcacaggcaaacgatcagatggagattctggacagtctgatacgcgagatgaggcaaatggggcagccgtgcgacgcgtaccagaagcggttactccagctgcaggaacaaatgcgcgctctgtacaaggcgatttctgtgccacgggtgagacgggcttcttccaagggtgggggaggttatacatgtcagtcaggatccggttgggacgagttcacaaagcatgttacttctgaatgcttggggtggatgagacagcaaagagcagagatggacatggtggcctggggtgtcgatttggcttccgtggagcaacatattaactcccaccggggaatacataattcgatcggcgattacagatggcagttagataaaatcaaggcggacctaagagaaaaaagtgccatctaccagctcgaagaggaatatgagaatctgctgaaggccagctttgagaggatggatcacctgagacaactgcagaacataattcaggccacctcccgggagataatgtggatcaacgactgcgaggaggaagagctgctttatgattggtctgacaagaatacaaatattgcgcaaaagcaggaagctttcagcatccgtatgtctcagctcgaagttaaggaaaaggagctgaacaagttgaaacaggagagcgaccagcttgtacttaatcagcatcccgctagtgacaaaattgaagcatatatggataccttgcagacccaatggtcatggattctccagatcaccaaatgcatagacgtccacctaaaggagaacgccgcttattttcagttcttcgaggaggcacaatccaccgaggcctatctgaaaggcctgcaggatagcataagaaaaaaatacccatgcgataagaatatgcctctgcaacatctgctggagcagattaaggagctggagaaagaaagagagaagatcctggaatacaagcgccaggtccaaaatctcgtcaataaaagcaaaaagatcgtacagctgaagccaaggaatcctgactatcggagcaataaacccatcatactgagggccctgtgtgattataagcaggaccagaagatcgtgcacaaaggagacgagtgtattctcaaagataataacgagcggtcaaaatggtacgtcaccggtccaggcggagtcgacatgcttgtcccatcggtgggcttgatcatccctcccccaaacccgctggccgttgacttgtcctgtaagatcgagcagtactacgaagccattctagccttgtggaaccagctctatattaacatgaaatccttagtctcctggcactattgtatgattgatattgaaaaaattagagcaatgaccattgccaagctcaagaccatgcggcaggaggactatatgaagacaattgctgatctcgagcttcattaccaagagtttattagaaactcacaaggttcggaaatgtttggggatgacgacaaaaggaagatccagtcacagttcactgacgctcagaagcactatcagaccctggtcatacagctcccaggttacccacaacaccaaaccgtaacaaccactgagataacccaccatggtacctgtcaggatgttaaccataataaagtgatcgaaaccaaccgcgaaaacgacaaacaggaaacctggatgctgatggaacttcagaaaatccgacgacagattgaacactgtgaagggaggatgacactgaaaaatctgccccttgctgaccaaggcagcagtcatcatattacggtgaaaatcaacgagctgaaatccgtacagaacgactcgcaggccatcgcagaggtgttaaatcagttaaaagacatgctggccaattttaggggcagtgaaaagtactgttatctgcagaatgaagtgttcggactttttcaaaaactggagaatataaatggagttaccgatgggtatctgaacagcctgtgtacagtccgtgctctgcttcaagctatattgcagacggaagacatgctgaaggtgtatgaagcccgtctgaccgaggaagagacagtatgcctggatctcgacaaagtggaggcttaccgctgtggcctgaagaaaattaagaatgacctaaacctcaagaagtctcttcttgcaacgatgaaaactgaactccaaaaagctcagcagatccactcacagacgagtcagcagtaccctctgtatgaccttgacttaggcaagttcggcgagaaggtgacgcagctgacggaccgctggcagcgtatcgacaagcagatcgacttccgcctgtgggacctcgaaaaacagattaagcagctcaggaactaccgagacaactaccaggccttttgtaaatggctctatgacgccaagagacgccaagattcactggaatccatgaagttcggtgactccaacactgtgatgcgattccttaacgagcaaaaaaatctgcatagcgagatttcaggtaagagagacaagagcgaggaagtccaaaaaattgctgagctgtgcgccaacagcattaaggactacgaattacaactggcttcctacacctctggtctcgaaaccttgctgaatatccctataaagcgaactatgattcagagtcctagtggtgtcatcctccaggaggcagccgatgtgcatgctaggtatatagagctcctcacccgcagcggcgactactataggttcctttctgagatgttaaaaagcctggaagatttgaagttaaagaacacgaagattgaggtattagaagaagagctgagactggctcgtgacgctaatagtgaaaattgtaacaagaacaaatttcttgatcagaacttacagaagtaccaggctgagtgcagccagttcaaagctaagctggcatctctcgaggagttgaagagacaggccgaattggatgggaagtcggccaagcaaaaccttgacaagtgttacggacagattaaggaactcaacgaaaagattacacgcttgacatacgagattgaagatgaaaaaaggcgtaggaaatcagtcgaggaccggttcgatcagcagaaaaacgattacgaccaactccagaaagccaggcaatgtgaaaaggagaacctcggatggcaaaaactcgaatcagagaaggctattaaagagaaggagtacgaaatcgagcggctccgcgtgttgttgcaggaagaggggacccgtaagcgagaatatgagaacgagctggctaaggtgcgaaaccattacaatgaagagatgagtaacctgaggaacaaatatgaaaccgaaattaacattaccaagaccacaattaaagagatctcaatgcagaaggaagacgatagtaagaacctgagaaaccaactcgataggctctcgagagaaaacagggacctcaaggacgagattgtgaggttgaatgactccatcctgcaggctacagaacagcgcagaagagccgaagagaacgctcttcagcaaaaggcctgtggcagcgaaattatgcagaaaaagcagcacctggaaattgagttgaaacaggtcatgcagcaacggagcgaagacaatgctcgtcacaaacagagcttggaggaagccgctaaaacaattcaggataagaacaaggagattgagagacttaaggcggaatttcaagaggaggctaagaggaggtgggagtacgagaacgagctgtccaaggtgagaaataattacgatgaagaaataattagtcttaaaaatcaattcgagactgagatcaatatcactaagaccaccatacatcagttaactatgcagaaggaggaggacaccagtggatacagagcccagattgataatctgacaagggagaacagatccctgagtgaagaaatcaaaagactcaagaacacactgacccagaccactgagaacctccgcagagtggaggaagacatccagcagcagaaggccacaggctccgaggtgagccagcgaaaacagcagctggaggttgaattacgtcaagttacccagatgcgaaccgaggaaagcgtgagatacaagcagagtctggacgacgctgccaaaacgattcaggacaaaaataaggagattgaacgcctaaagcagctgattgacaaggagacgaatgatagaaagtgtctcgaagacgagaacgccaggctgcagagggtgcagtatgaccttcagaaagcgaactcttctgccaccgaaacaatcaacaaacttaaagtccaggagcaagaactgacccgacttaggattgactatgaaagagtgtctcaggagcgtacggtgaaggaccaggatattacaaggttccagaacagtctgaaggagctgcagcttcaaaaacagaaagtggaggaagaactgaacagattaaaacgcaccgcatccgaagactcttgcaaaaggaagaaacttgaggaagaactggaagggatgcggaggtccttaaaggagcaggcaatcaagataaccaatttgactcagcagctcgagcaggcatcgatagtcaaaaagcgcagcgaagacgatctgcgccagcagcgcgatgtgctggacgggcacttgcgggaaaagcagcggactcaagaagaactgaggaggttatcaagcgaggtggaggccttacggcgtcagctccttcaggagcaggaatcagtgaagcaggcccatctgcgcaatgagcacttccaaaaggctatagaggacaagtcaagaagtctgaatgagagtaagatcgagatcgaaaggctccagagtctgactgagaacctcacaaaggagcacttaatgctcgaggaggaacttcggaatctgcgcttggaatacgacgacctccggagaggccgatccgaagccgatagcgataagaatgccacgatactggagctgaggagccagcttcagatctctaataaccgcactcttgagctgcagggcctgatcaatgatctccagagggaaagagaaaacctcagacaagaaatcgagaagtttcagaagcaggcgcttgaggccagcaaccgcattcaggaatcaaagaatcagtgtacgcaggtcgtgcaggaaagagaatctctgctggtcaagataaaggtgttggagcaggacaaagccaggctgcaacggctggaagacgaactaaacagggctaaaagtactcttgaggcagagactcgggtgaaacaaagacttgaatgcgaaaaacagcagattcagaacgacttgaatcagtggaagacgcaatactcccggaaagaggaggccatccggaaaatcgagagcgagagagagaagtcagaacgggagaaaaactctctgagatctgagatcgagaggctgcaggccgaaatcaaacgcatagaggaacgttgccgacgcaaacttgaagattccaccagggaaactcagagccagttagaaactgaaagaagtagatatcagcgggagattgataagttgcggcagcgcccatatgggagtcacagggaaacccagaccgagtgtgagtggacagtggacacctctaaactcgtcttcgacggcctgcgcaaaaaagtgactgctatgcaactctatgaatgccaactgattgacaagactactctcgataagctactaaaaggtaagaagtcggtagaggaggtggcctctgaaatacagccatttctcagaggggctggctcaatcgccggtgcctcggctagccccaaggagaaatactcactcgtggaagctaaaagaaagaagctgatcagtcccgagagtacggtgatgctgctggaagctcaagcggcaaccggcggaattatcgaccctcaccgcaacgagaagttgactgtcgactctgctatcgcgagggacttgatcgattttgacgataggcagcagatatacgcagcagagaaggctataacaggatttgatgatcccttcagcggtaaaactgtaagcgtgagcgaagcaatcaaaaagaatctgattgacagagagaccgggatgaggcttttggaggctcagatagcatcgggaggagtggtggatccggtgaatagcgtgttcttacccaaagatgtggctctagctagggggctgatcgaccgggatctgtacaggtccctgaatgacccaagggactcccagaaaaatttcgtggatcctgtaacaaaaaagaaggtgagttatgtgcagttaaaggaaaggtgtaggattgaacctcacaccggtttgttgttgctgagcgttcagaaaaggagcatgtctttccaagggatacggcagccagtcaccgtcaccgagctggtggatagcggcatcctgcgaccttccactgttaatgaactcgagtccggacagatctcttacgacgaagtgggagagaggatcaaagactttctccaaggctcctcatgcatcgcaggtatctataatgaaactacgaaacaaaagctggggatctacgaggctatgaagattggcctggtacggccaggcactgccttggaactgctagaagctcaggcagccacaggtttcattgtagacccagtgtctaacttgcgccttcctgtcgaagaagcatacaaaaggggcctcgttgggatcgaattcaaggaaaaattgctctctgcagaacgagctgtcactggttacaatgatcctgaaaccgggaacataataagtctgttccaggcaatgaataaggagctcatcgagaaaggccacggaatcagattactggaagcccagatcgccaccgggggaattatcgacccaaaggagtcccacaggctccctgtagacattgcttacaaacggggttatttcaatgaggaactgtctgaaattctatcagatccctccgacgacactaaggggtttttcgatccgaacaccgaagagaacctcacatatctccagctaaaggagcgttgcataaaggacgaagagactgggttgtgtcttctgccattgaaagaaaaaaagaagcaggtacagactagccagaagaatacactcaggaagagacgggtcgtgatcgtcgaccccgagactaacaaggagatgtcggtccaggaggcttataagaaaggcttgatcgactacgagacgttcaaggaactgtgtgagcaggagtgcgaatgggaggaaatcactataacaggcagtgacggctcaacccgggtggtcttagttgaccgaaagacgggttcccaatacgacatccaggatgcaattgataagggcctggttgaccggaagttcttcgatcagtatcgttctggcagcctgtccctcacccaattcgcagacatgatcagtctgaagaatggcgtgggcacttcttcctcgatgggtagtggcgtgagtgatgacgtcttttcctcaagccgtcacgagtccgtatccaaaatctcaacgatatcatccgtgaggaatctaaccattagatctagttcattctcagacacacttgaagaaagctcccccattgccgctattttcgacaccgagaacctggagaaaatctccattactgagggaatcgaacggggaatcgtcgactccatcactggccagcgcttgttggaggcacaagcttgtactggagggataattcaccccactaccggacaaaaactgtcgcttcaggatgctgtctcccagggcgtaatcgatcaggatatggccactcggttgaagcccgcacagaaggcctttattgggtttgagggagttaagggtaagaaaaagatgtcagcagccgaagccgtgaaggaaaaatggctcccatacgaggccggtcagaggttcctggagttccagtatctcactggaggcctggtggaccccgaggtgcatggcaggattagcaccgaggaagccatccgcaagggattcatagatggacgagccgctcaaaggctgcaagacacatcctcttacgctaagatccttacctgcccgaagaccaagcttaagatctcctataaggatgccatcaaccggtctatggtggaggacataacaggcctgaggctgttggaagccgcatcagtctcatcaaagggactccccagcccttataatatgtccagtgcgcctggtagtcgaagcggttctagatccggctctagatccggttctaggagcggttcaagatctggatctaggaggggaagctttgatgctactggaaattctagttacagttactcatacagcttcagttccagcagcatcggacatta

SEQ ID NO: 146162 - protein, 367 aa, Artificial Sequence
  derived and/or modified sequence
MVMEVGTLDAGGLRALLGERAAQCLLLDCRSFFAFNAGHIAGSVNVRFSTIVRRRAKGAMGLEHIVPNAELRGRLLAGAYHAVVLLDERSAALDGAKRDGTLALAAGALCREARAAQVFFLKGGYEAFSASCPELCSKQSTPMGLSLPLSTSVPDSAESGCSSCSTPLYDQGGPVEILPFLYLGSAYHASRKDMLDALGITALINVSANCPNHFEGHYQYKSIPVEDNHKADISSWFNEAIDFIDSIKNAGGRVFVHCQAGISRSATICLAYLMRTNRVKLDEAFEFVKQRRSIISPNFSFMGQLLQFESQVLAPHCSAEAGSPAMAVLDRGTSTTTVFNFPVSIPVHSTNSALSYLQSPITTSPSC

SEQ ID NO: 146163 - protein, 302 aa, Artificial Sequence
  derived and/or modified sequence
MVMEVGTLDAGGLRALLGERAAQCLLLDCRSFFAFNAGHIAGSVNVRFSAAQVFFLKGGYEAFSASCPELCSKQSTPMGLSLPLSTSVPDSAESGCSSCSTPLYDQGGPVEILPFLYLGSAYHASRKDMLDALGITALINVSANCPNHFEGHYQYKSIPVEDNHKADISSWFNEAIDFIDSIKNAGGRVFVHCQAGISRSATICLAYLMRTNRVKLDEAFEFVKQRRSIISPNFSFMGQLLQFESQVLAPHCSAEAGSPAMAVLDRGTSTTTVFNFPVSIPVHSTNSALSYLQSPITTSPSC

SEQ ID NO: 146164 - protein, 340 aa, Artificial Sequence
  derived and/or modified sequence
MVMEVGTLDAGGLRALLGERAAQCLLLDCRSFFAFNAGHIAGSVNVRFSTIVRRRAKGAMGLEHIVPNAKRDGTLALAAGALCREARAAQVFFLKGGYEAFSASCPELCSKQSTPMGLSLPLSTSVPDSAESGCSSCSTPLYDQGGPVEILPFLYLGSAYHASRKDMLDALGITALINVSANCPNHFEGHYQYKSIPVEDNHKADISSWFNEAIDFIDSIKNAGGRVFVHCQAGISRSATICLAYLMRTNRVKLDEAFEFVKQRRSIISPNFSFMGQLLQFESQVLAPHCSAEAGSPAMAVLDRGTSTTTVFNFPVSIPVHSTNSALSYLQSPITTSPSC

SEQ ID NO: 146165 - DNA, 1104 bp, Artificial Sequence
  derived and/or modified sequence
atggtgatggaggttggaactctcgacgccgggggtttgagagctttgctaggggagcgggcggcacagtgcctcttgttggattgcaggtccttcttcgctttcaacgccgggcacatcgccgggagtgttaacgtccggttttcaactatcgtgaggaggcgcgccaaaggagcgatggggttggaacatatcgtccccaatgcggaactcagaggcaggctcctggctggagcttatcatgccgtcgttcttctcgatgaaaggtccgctgcccttgatggcgccaagcgggatgggacgctggctctggccgcaggtgcactgtgtcgagaagcaagggctgcccaagtattctttctcaagggagggtatgaggccttttctgcatcttgtccagagctgtgctccaagcagagcaccccaatgggactgtcgctgcccctttccaccagtgttccagattccgccgagagcgggtgtagttcatgtagcacacctctgtacgatcagggcggtccagtagagattctgcctttcctgtacttaggctccgcctaccacgcgtcccgcaaggacatgctggatgctctggggattaccgctctgatcaatgtaagcgctaattgccctaatcacttcgaggggcattaccagtacaaaagcatccctgttgaggacaaccataaggccgatatctcatcctggtttaacgaagcaatcgattttatcgattctattaagaatgccggcggtcgggtatttgtccactgccaggcaggcatcagccgcagcgctacaatatgcctggcctacttgatgcgcacgaaccgcgtcaaactggacgaggccttcgaatttgtcaagcagaggcgaagcatcatcagtcctaatttctcattcatggggcagttattacagtttgagtcgcaggttctcgccccccactgctcggcagaggccggatctccagcaatggccgtcttagatcgcggcacatctacaactaccgtgttcaattttccagttagtatcccagttcactcaactaattccgcgctgtcctatctgcaatctcctatcacaactagcccatcctgttag

SEQ ID NO: 146166 - DNA, 909 bp, Artificial Sequence
  derived and/or modified sequence
atggtaatggaggttggaacattagacgcaggaggcctgcgtgctttgctgggagagagggctgctcaatgtctgcttctagattgtcgaagttttttcgcctttaacgcaggacacattgcgggcagtgtgaatgtgaggttttccgccgctcaggtgttttttctcaaaggaggctacgaggctttctccgcttcctgtccagagctatgttcaaagcagagcacgccgatggggctctccctaccactgtctacgtcagtgccagactctgccgaatctggctgttcctcatgcagtactcctctgtacgaccaagggggacctgtcgaaatcctgccattcctctatctcggatcagcctaccacgcttctcgcaaagatatgttggacgctctgggcatcaccgcacttatcaatgtctccgcaaattgccccaatcacttcgaagggcactaccagtataagtctatccccgtggaagataatcataaggcagacatctccagctggtttaatgaggccatagactttattgatagtatcaagaacgccggagggagagtcttcgtgcattgccaggctggaatatctagaagcgccactatttgtctggcatacctaatgaggaccaacagggtgaagctggacgaagcattcgagttcgtcaagcaaagacgcagcattatctcccctaatttttcttttatgggccagctgctgcaattcgagtcccaggtgctggccccgcactgttccgcggaagccggctcccccgccatggcggtgctcgataggggaacgagcaccacgaccgtgttcaactttcccgtgagtataccagttcactccaccaatagcgccctgtcatatttacagtctcccattacaacatctccctcatgttag

SEQ ID NO: 146167 - DNA, 1023 bp, Artificial Sequence
  derived and/or modified sequence
atggtgatggaagtcggaacactggatgctggcggcttaagggccttgttgggagaacgggcagctcagtgccttctgctcgattgccgttcctttttcgcattcaacgccggtcacatcgctggaagcgtcaacgtcagattctccacaatcgttcgaagaagagctaaaggcgccatgggcctggaacacatagttcccaacgctaaaagggatggtacactcgcccttgcagcaggagccctgtgtcgcgaggcacgggctgcacaagttttctttttaaagggaggctacgaagccttctccgctagctgtccagagctgtgctcaaagcagtccacccccatggggctgtctctgccgctctcaacctctgtgcctgactcagccgaatccggatgtagctcttgctctactcctctttatgatcagggaggccccgtcgagattctgccattcctgtacctaggaagcgcgtaccacgccagccgcaaagatatgctggatgccttgggaatcaccgcccttatcaacgtctctgcgaattgccctaatcactttgagggccactaccagtacaaaagcatacctgttgaagacaaccacaaggcagatatctcttcttggttcaacgaagccattgatttcattgattccattaagaacgcaggcgggcgggtctttgtgcactgccaggcaggaatcagccggtccgccaccatctgtctcgcctacttaatgcggactaacagggtcaagctggatgaggcgttcgaatttgtaaaacagcgccggtccattatatcgccaaattttagctttatggggcagctgctccagttcgagtcacaggtactggctccccattgctctgcggaggcaggctctcccgctatggctgtcctggatcgcgggacaagcactacaactgttttcaacttcccggtgtctattccagtgcactccaccaactccgctctttcatatctgcagtctcctattactacctcaccatcttgttag

SEQ ID NO: 146168 - DNA, 1104 bp, Artificial Sequence
  derived and/or modified sequence
atggtgatggaggtgggcaccctggatgctgggggcctgcgggccctgctgggggagagagctgcccagtgcctgctgctggactgccgctccttctttgccttcaatgccggccacatcgccggctctgtgaatgtgcgcttcagcaccatcgtgagaagaagagccaagggggccatgggcctggagcacatcgtgcccaatgctgagctgcggggccgcctgctggccggggcctaccacgctgtggtgctgctggatgagaggtctgctgccctggatggagccaagagagatggcaccctggccctggccgccggggccctgtgccgggaggcccgggccgcccaggtgttcttcctgaagggcggctatgaggccttcagcgccagctgcccagagctgtgcagcaagcagagcacccccatgggcctgagcctgcccctgagcacctctgtgcctgacagcgctgagagcggctgcagcagctgcagcacccccctgtatgaccagggcggccctgtggagatcctgcccttcctgtacctgggcagcgcctaccacgccagcaggaaggacatgctggatgccctgggcatcacagccctgatcaacgtgtctgccaactgccccaaccactttgagggccactaccagtacaagagcatccctgtggaggacaaccacaaggctgacatcagctcctggttcaatgaggccatcgacttcatcgacagcatcaagaatgctgggggccgggtgtttgtgcactgccaggccggcatcagccgcagcgccaccatctgcctggcctacctgatgaggaccaacagagtgaagctggatgaggcctttgaatttgtgaagcagaggaggagcatcatcagccccaacttctccttcatgggccagctgctgcagtttgagagccaggtgctggccccccactgcagcgctgaggccggcagccctgccatggctgtgctggaccggggcaccagcaccaccaccgtcttcaacttccctgtgtccatccctgtgcacagcaccaacagcgccctgagctacctgcagagccccatcaccaccagccccagctgctag

SEQ ID NO: 146169 - DNA, 909 bp, Artificial Sequence
  derived and/or modified sequence
atggtgatggaggtgggcaccctggatgctgggggcctgcgggccctgctgggggagagagctgcccagtgcctgctgctggactgccgctccttctttgccttcaatgccggccacatcgccggctctgtgaatgtgcgcttctctgctgcccaggtgttcttcctgaagggcggctatgaggccttcagcgccagctgcccagagctgtgcagcaagcagagcacccccatgggcctgagcctgcccctgagcacctctgtgcctgattctgctgagagcggctgcagcagctgcagcacccccctgtatgaccagggcggccctgtggagatcctgcccttcctgtacctgggcagcgcctaccacgccagcaggaaggacatgctggatgccctgggcatcacagccctgatcaacgtgtctgccaactgccccaaccactttgagggccactaccagtacaagagcatccctgtggaggacaaccacaaggctgacatcagctcctggttcaatgaggccatcgacttcatcgacagcatcaagaatgccggcggccgggtgtttgtgcactgccaggccggcatcagccgcagcgccaccatctgcctggcctacctgatgaggaccaacagagtgaagctggatgaggcctttgaatttgtgaagcagaggaggagcatcatcagccccaacttctccttcatgggccagctgctgcagtttgagagccaggtgctggccccccactgcagcgctgaggccggcagccctgccatggctgtgctggaccggggcaccagcaccaccaccgtcttcaacttccctgtgtccatccctgtgcacagcaccaacagcgccctgagctacctgcagagccccatcaccaccagccccagctgctag

SEQ ID NO: 146170 - DNA, 1023 bp, Artificial Sequence
  derived and/or modified sequence
atggtgatggaggtgggcaccctggatgctgggggcctgcgggccctgctgggggagagagctgcccagtgcctgctgctggactgccgctccttctttgccttcaatgccggccacatcgccggctctgtgaatgtgcgcttcagcaccatcgtgagaagaagagccaagggggccatgggcctggagcacatcgtgcccaatgccaagagagatggcaccctggccctggccgccggggccctgtgccgggaggcccgggccgcccaggtgttcttcctgaagggcggctatgaggccttcagcgccagctgcccagagctgtgcagcaagcagagcacccccatgggcctgagcctgcccctgagcacctctgtgcctgattctgctgagagcggctgcagcagctgcagcacccccctgtatgaccagggcggccctgtggagatcctgcccttcctgtacctgggcagcgcctaccacgccagcaggaaggacatgctggatgccctgggcatcacagccctgatcaacgtgtctgccaactgccccaaccactttgagggccactaccagtacaagagcatccctgtggaggacaaccacaaggctgacatcagctcctggttcaatgaggccatcgacttcatcgacagcatcaagaatgccggcggccgggtgtttgtgcactgccaggccggcatcagccgcagcgccaccatctgcctggcctacctgatgaggaccaacagagtgaagctggatgaggcctttgaatttgtgaagcagaggaggagcatcatcagccccaacttctccttcatgggccagctgctgcagtttgagagccaggtgctggccccccactgcagcgctgaggccggcagccctgccatggctgtgctggaccggggcaccagcaccaccaccgtcttcaacttccctgtgtccatccctgtgcacagcaccaacagcgccctgagctacctgcagagccccatcaccaccagccccagctgctag

SEQ ID NO: 146171 - DNA, 1104 bp, Artificial Sequence
  derived and/or modified sequence
atggtgatggaggtgggcaccctggacgccggcggcctgcgggccctgctgggggaacgcgctgcccagtgccttctcctggattgtcgaagtttcttcgccttcaatgccggacatattgctggctctgtgaatgtgagattttctactattgtgaggcgacgagctaagggggctatggggttagagcacattgtacctaacgctgaactgcggggacgcctgctagccggagcataccatgcggttgtcctcctagacgaacggtccgccgcgctcgacggcgccaagagggatgggacactggcactggctgccggcgcgctgtgcagggaggcacgcgccgcccaagtgttcttcctaaaaggcggttacgaagccttcagcgcctcgtgtccagagctctgcagcaaacagtccaccccgatgggcctatcgctgcctctgagcacgtccgttcccgattccgctgagagcgggtgcagctcgtgctcgactccactttatgatcaaggtgggcctgttgagatcctgccatttttataccttgggtcagcttaccacgcaagtcgcaaagacatgctcgacgccctgggtataaccgcccttattaacgtgtctgccaactgtccaaatcattttgagggtcactaccagtataagtccatccctgtcgaagacaaccacaaagccgatatcagcagttggttcaacgaggctatcgattttatcgacagtattaaaaatgctggagggcgcgtgttcgtacactgccaggctggtatttctcgcagcgctacaatttgccttgcctaccttatgagaacaaatcgagtaaagctggacgaggcattcgagtttgtcaagcagcggcgttctattatttcccccaatttttcatttatggggcagctccttcaattcgagtcccaggtgttagctccacactgtagcgcagaggcgggatcccctgcaatggcagtgctcgaccgcggcactagcactacaaccgtgttcaacttccctgtgagcatccctgtacacagtactaattctgcattatcttacctccaatcacccatcacgacctccccttcatgttag

SEQ ID NO: 146172 - DNA, 909 bp, Artificial Sequence
  derived and/or modified sequence
atggtgatggaggtgggcaccctggacgccggcggcctgcgggccctcctgggcgaacgtgcagcacagtgtttactgctggactgccggagtttctttgcattcaacgctggccacatagccggaagcgtgaacgttagattctcagcagcacaggtcttttttctgaaaggtggatatgaggccttcagcgctagttgtcctgaactctgttctaagcaatctactcccatgggattgagtctccccttgtccacttcagtgcccgactctgccgagagtggctgctcatcatgctcaactccactgtatgaccagggtggaccagtggagatacttccattcctgtatttggggagcgcctatcacgcctcccggaaagacatgctcgatgccctgggtattacagcattaattaatgtgagtgctaactgccctaaccatttcgagggccactatcaatataagagcatacctgtggaggataatcacaaggctgacatttcctcatggttcaacgaagctatagacttcattgattcgatcaagaatgcggggggtagagtctttgtgcattgccaggctgggatttcgcgtagtgccacaatctgtttagcctaccttatgagaaccaaccgagtgaaactggacgaagcttttgagttcgtgaaacagaggcgcagtatcatctcacccaatttctcattcatggggcaactgcttcagtttgagtcccaggtgttggcgcctcattgtagcgcggaagcggggagccccgctatggcggtgctggacagaggcacctccacaaccaccgtgttcaattttcccgtcagcattccggtccacagcaccaactccgccctgtcctacctgcagtctcctatcactacgtctccctcatgttag

SEQ ID NO: 146173 - DNA, 1023 bp, Artificial Sequence
  derived and/or modified sequence
atggtgatggaggtgggcaccctggacgccggcggcctgcgggccctcttaggcgaacgagcagcccagtgtctgctgctggattgtaggtctttcttcgcatttaacgccggccatattgccggaagcgtcaatgtaaggtttagcactatcgtgcgacgccgcgctaagggggccatgggcttagaacatatcgtgccgaacgcgaagcgagatgggactctggcgctggcggcgggtgccctatgccgcgaggcgcgggccgcccaggttttttttcttaaaggcggttatgaggctttctccgccagctgcccggagctttgctccaagcagtctacgcctatgggtttatccctgcctctgtcgacttcagtccccgactccgccgaatctggttgtagcagttgcagcactcccctgtacgaccagggtggcccggtagaaatacttccctttttgtatctgggatctgcctatcacgctagtagaaaggatatgctcgacgccttagggatcacagcgctaataaacgtaagtgcaaattgtccgaaccacttcgaaggccattatcagtataagagcatccccgtggaagataatcataaagccgacatttcttcctggttcaacgaggcaatcgatttcattgatagtatcaagaatgcgggaggtcgggtgttcgtgcactgccaagcaggcatctcccggtccgcaaccatatgcctcgcttacctcatgcgcaccaatcgagtgaagcttgatgaagcttttgagtttgtgaaacagagaagatcgatcatttcaccaaacttttctttcatgggtcagctgctccagttcgagagtcaggtcttggctccccattgcagcgccgaagccggctccccagcgatggccgtgcttgatagaggaaccagcacgactacggtctttaacttccccgtgagcatccctgtccatagcacgaacagcgccctgtcatatttgcagagcccgatcacaacctcaccaagttgctag

SEQ ID NO: 146174 - DNA, 1104 bp, Artificial Sequence
  derived and/or modified sequence
atggtgatggaagtagggacattggatgccggaggtctacgcgctcttctgggtgagcgcgcagctcagtgtctgcttcttgattgtaggtcatttttcgcttttaatgctggtcatatagccggatcagtgaacgtccgtttctctacaattgtgcgccgaagagcaaagggggctatgggcctggaacatatcgttccaaatgcagaactcagaggacggcttcttgctggcgcttatcatgcagtcgtgctgctcgacgagaggagcgctgccctcgatggcgctaagcgggacgggactttagcactggcagccggagctttgtgccgtgaagctagggccgcacaggtgtttttcctcaagggaggctatgaagctttttctgcttcatgccctgaattatgctccaaacagtctactcccatggggcttagcctccccttaagcacctctgtgccagatagcgcagaatcaggttgttcgtcttgctcaacccccctgtatgaccagggcggacccgtagagatcctgccctttctttatctaggctccgcataccatgcttctcgtaaggatatgctcgacgccctgggtatcactgctctgataaacgtcagcgcaaattgtcctaaccactttgagggacactatcagtataagagcattccagtagaagataatcacaaagctgacatcagttcttggtttaatgaggccatcgactttatcgacagcattaagaatgccggagggcgagtttttgtgcactgccaggccggaatttcaagatccgccacaatttgcttagcgtacctgatgagaaccaatcgggtgaaactagacgaagctttcgagtttgtgaagcagaggaggtctataatatcccctaatttcagttttatgggacagttacttcaatttgaatcccaggttctcgcccctcactgcagtgcagaggctggttctccagccatggccgtgctggaccgcggaaccagcactacaactgtttttaattttcctgtgagtattcccgtccacagcacgaattcggcattatcatacctgcagtctccaattacaaccagcccttcttgctag

SEQ ID NO: 146175 - DNA, 909 bp, Artificial Sequence
  derived and/or modified sequence
atggtcatggaggtgggcacactagacgccggaggactcagggcgctactgggcgagagagcagcacagtgcttgcttctcgattgccgaagcttcttcgcttttaacgccggacacattgccggatccgtaaatgtaaggttctcagccgcacaggtgttcttcctcaagggcggatacgaagccttctccgcatcatgcccagagctgtgtagcaagcagtccaccccgatgggactttccctgcccctttcaacttccgtccctgactctgcagagagcggttgttccagctgttccactccactctatgatcaaggaggtcctgtggagattcttcctttcttatacctgggaagcgcctaccacgccagcaggaaagatatgttggatgcattgggaattaccgctcttataaatgtctctgccaactgcccgaaccacttcgagggacattatcagtataaatccatccccgtcgaagataatcacaaggcagatatttcctcttggtttaatgaggctattgattttatcgatagtataaaaaacgcagggggacgtgtttttgtacattgccaagccggtatcagccggtccgccacgatctgcctcgcataccttatgcgcactaaccgggtcaagcttgacgaggcttttgagtttgttaagcagcgcagatctattatctcccctaatttctcctttatgggacagttactccaattcgagtcccaggtactcgcaccgcactgttcagcagaagccggaagtcctgccatggccgttctcgaccgaggcacatcaacaaccacagtctttaacttccccgtatctatccccgtgcacagcactaactccgccttgtcatatttacagagcccgattacaacttccccctcctgctag

SEQ ID NO: 146176 - DNA, 1023 bp, Artificial Sequence
  derived and/or modified sequence
atggtgatggaagttggaacgctggacgccggtgggctgcgggctcttttaggagaacgcgctgcgcagtgcctgctcctggattgtagatcatttttcgcctttaacgccggacacatcgctggctccgtcaacgtcaggttcagcactatagtgcggcgtcgagctaagggcgcaatggggcttgaacatatagtgcccaatgctaaacgtgatggcactctagcattggccgcaggtgctctttgccgggaggctagggcagcacaggtcttctttctaaagggcggatacgaagctttcagtgccagttgcccagagttgtgtagcaagcaatccacccccatgggcctgtcgttgccactgagtacctccgtgcccgatagcgccgagtctgggtgctcatcatgttccacgcctttatacgatcaagggggacccgtcgagatcctgcctttcttatacctgggcagcgcatatcatgcctctcgaaaagatatgctggatgccctggggatcacagccttgatcaacgtttccgccaactgtccaaaccatttcgaggggcactaccaatacaagagcatccctgtggaggacaaccacaaagccgatatcagctcatggttcaacgaagcgatcgacttcatcgattccatcaaaaatgcaggaggacgtgtcttcgtgcactgtcaggcgggtatctctaggtccgccacaatttgcctggcttacctgatgcggactaatagggtgaagctggatgaagccttcgagtttgtgaaacagaggcgttctatcatctccccaaatttctctttcatggggcagctactgcagttcgaatcccaggtcctggcccctcactgttcggcagaggctggcagtcccgcaatggctgttctggatcgagggacaagcaccaccacagtgttcaacttcccagtgtccatacctgtccattccacgaactctgcactttcctatcttcagtctccaatcaccacttcaccttcgtgttag

SEQ ID NO: 146177 - DNA, 1104 bp, Artificial Sequence
  derived and/or modified sequence
atggtgatggaggtgggcaccctggacgccggcggcctgagagccctgctgggcgagagagccgcccagtgcctgctgctggactgcagaagcttcttcgccttcaacgccggccacatcgccggcagcgtgaacgtgagattcagcaccatcgtgagaagaagagccaagggcgccatgggcctggagcacatcgtgcccaacgccgagctgagaggcagactgctggccggcgcctaccacgccgtggtgctgctggacgagagaagcgccgccctggacggcgccaagagagacggcaccctggccctggccgccggcgccctgtgcagagaggccagagccgcccaggtgttcttcctgaagggcggctacgaggccttcagcgccagctgccccgagctgtgcagcaagcagagcacccccatgggcctgagcctgcccctgagcaccagcgtgcccgacagcgccgagagcggctgcagcagctgcagcacccccctgtacgaccagggcggccccgtggagatcctgcccttcctgtacctgggcagcgcctaccacgccagcagaaaggacatgctggacgccctgggcatcaccgccctgatcaacgtgagcgccaactgccccaaccacttcgagggccactaccagtacaagagcatccccgtggaggacaaccacaaggccgacatcagcagctggttcaacgaggccatcgacttcatcgacagcatcaagaacgccggcggcagagtgttcgtgcactgccaggccggcatcagcagaagcgccaccatctgcctggcctacctgatgagaaccaacagagtgaagctggacgaggccttcgagttcgtgaagcagagaagaagcatcatcagccccaacttcagcttcatgggccagctgctgcagttcgagagccaggtgctggccccccactgcagcgccgaggccggcagccccgccatggccgtgctggacagaggcaccagcaccaccaccgtgttcaacttccccgtgagcatccccgtgcacagcaccaacagcgccctgagctacctgcagagccccatcaccaccagccccagctgctag

SEQ ID NO: 146178 - DNA, 909 bp, Artificial Sequence
  derived and/or modified sequence
atggtgatggaggtgggcaccctggacgccggcggcctgagagccctgctgggcgagagagccgcccagtgcctgctgctggactgcagaagcttcttcgccttcaacgccggccacatcgccggcagcgtgaacgtgagattcagcgccgcccaggtgttcttcctgaagggcggctacgaggccttcagcgccagctgccccgagctgtgcagcaagcagagcacccccatgggcctgagcctgcccctgagcaccagcgtgcccgacagcgccgagagcggctgcagcagctgcagcacccccctgtacgaccagggcggccccgtggagatcctgcccttcctgtacctgggcagcgcctaccacgccagcagaaaggacatgctggacgccctgggcatcaccgccctgatcaacgtgagcgccaactgccccaaccacttcgagggccactaccagtacaagagcatccccgtggaggacaaccacaaggccgacatcagcagctggttcaacgaggccatcgacttcatcgacagcatcaagaacgccggcggcagagtgttcgtgcactgccaggccggcatcagcagaagcgccaccatctgcctggcctacctgatgagaaccaacagagtgaagctggacgaggccttcgagttcgtgaagcagagaagaagcatcatcagccccaacttcagcttcatgggccagctgctgcagttcgagagccaggtgctggccccccactgcagcgccgaggccggcagccccgccatggccgtgctggacagaggcaccagcaccaccaccgtgttcaacttccccgtgagcatccccgtgcacagcaccaacagcgccctgagctacctgcagagccccatcaccaccagccccagctgctag

SEQ ID NO: 146179 - DNA, 1023 bp, Artificial Sequence
  derived and/or modified sequence
atggtgatggaggtgggcaccctggacgccggcggcctgagagccctgctgggcgagagagccgcccagtgcctgctgctggactgcagaagcttcttcgccttcaacgccggccacatcgccggcagcgtgaacgtgagattcagcaccatcgtgagaagaagagccaagggcgccatgggcctggagcacatcgtgcccaacgccaagagagacggcaccctggccctggccgccggcgccctgtgcagagaggccagagccgcccaggtgttcttcctgaagggcggctacgaggccttcagcgccagctgccccgagctgtgcagcaagcagagcacccccatgggcctgagcctgcccctgagcaccagcgtgcccgacagcgccgagagcggctgcagcagctgcagcacccccctgtacgaccagggcggccccgtggagatcctgcccttcctgtacctgggcagcgcctaccacgccagcagaaaggacatgctggacgccctgggcatcaccgccctgatcaacgtgagcgccaactgccccaaccacttcgagggccactaccagtacaagagcatccccgtggaggacaaccacaaggccgacatcagcagctggttcaacgaggccatcgacttcatcgacagcatcaagaacgccggcggcagagtgttcgtgcactgccaggccggcatcagcagaagcgccaccatctgcctggcctacctgatgagaaccaacagagtgaagctggacgaggccttcgagttcgtgaagcagagaagaagcatcatcagccccaacttcagcttcatgggccagctgctgcagttcgagagccaggtgctggccccccactgcagcgccgaggccggcagccccgccatggccgtgctggacagaggcaccagcaccaccaccgtgttcaacttccccgtgagcatccccgtgcacagcaccaacagcgccctgagctacctgcagagccccatcaccaccagccccagctgctag

SEQ ID NO: 146180 - DNA, 2019 bp, Artificial Sequence
  derived and/or modified sequence
gcgaaggacatttgggctgtgtgtgcgacgcgggtcggaggggcagtcgggggaaccgcgaagaagccgaggagcccggagccccgcgtgacgctcctctctcagtccaaaagcggcttttggttcggcgcagagagacccgggggtctagcttttcctcgaaaagcgccgccctgcccttggccccgagaacagacaaagagcaccgcagggccgatcacgctgggggcgctgaggccggccatggtcatggaagtgggcaccctggacgctggaggcctgcgggcgctgctgggggagcgagcggcgcaatgcctgctgctggactgccgctccttcttcgctttcaacgccggccacatcgccggctctgtcaacgtgcgcttcagcaccatcgtgcggcgccgggccaagggcgccatgggcctggagcacatcgtgcccaacgccgagctccgcggccgcctgctggccggcgcctaccacgccgtggtgttgctggacgagcgcagcgccgccctggacggcgccaagcgcgacggcaccctggccctggcggccggcgcgctctgccgcgaggcgcgcgccgcgcaagtcttcttcctcaaaggaggatacgaagcgttttcggcttcctgcccggagctgtgcagcaaacagtcgacccccatggggctcagccttcccctgagtactagcgtccctgacagcgcggaatctgggtgcagttcctgcagtaccccactctacgatcagggtggcccggtggaaatcctgccctttctgtacctgggcagtgcgtatcacgcttcccgcaaggacatgctggatgccttgggcatcactgccttgatcaacgtctcagccaattgtcccaaccattttgagggtcactaccagtacaagagcatccctgtggaggacaaccacaaggcagacatcagctcctggttcaacgaggccattgacttcatagactccatcaagaatgctggaggaagggtgtttgtccactgccaggcaggcatttcccggtcagccaccatctgccttgcttaccttatgaggactaatcgagtcaagctggacgaggcctttgagtttgtgaagcagaggcgaagcatcatctctcccaacttcagcttcatgggccagctgctgcagtttgagtcccaggtgctggctccgcactgttcggcagaggctgggagccccgccatggctgtgctcgaccgaggcacctccaccaccaccgtgttcaacttccccgtctccatccctgtccactccacgaacagtgcgctgagctaccttcagagccccattacgacctctcccagctgctgaaaggccacgggaggtgaggctcttcacatcccattgggactccatgctccttgagaggagaaatgcaataactctgggaggggctcgagagggctggtccttatttatttaacttcacccgagttcctctgggtttctaagcagttatggtgatgacttagcgtcaagacatttgctgaactcagcacattcgggaccaatatatagtgggtacatcaagtccatctgacaaaatggggcagaagagaaaggactcagtgtgtgatccggtttctttttgctcgcccctgttttttgtagaatctcttcatgcttgacatacctaccagtattattcccgacgacacatatacatatgagaatataccttatttatttttgtgtaggtgtctgccttcacaaatgtcattgtctactcctagaagaaccaaatacctcaatttttgtttttgagtactgtactatcctgtaaatatatcttaagcaggtttgttttcagcactgatggaaaataccagtgttgggtttttttttagttgccaacagttgtatgtttgctgattatttatgacctgaaataatatatttcttcttctaagaagacattttgttacataaggatgacttttttatacaatggaataaattatggcatttctattgaaatttcaa

SEQ ID NO: 146181 - DNA, 1394 bp, Artificial Sequence
  derived and/or modified sequence
gcgaaggacatttgggctgtgtgtgcgacgcgggtcggaggggcagtcgggggaaccgcgaagaagccgaggagcccggagccccgcgtgacgctcctctctcagtccaaaagcggcttttggttcggcgcagagagacccgggggtctagcttttcctcgaaaagcgccgccctgcccttggccccgagaacagacaaagagcaccgcagggccgatcacgctgggggcgctgaggccggccatggtcatggaagtgggcaccctggacgctggaggcctgcgggcgctgctgggggagcgagcggcgcaatgcctgctgctggactgccgctccttcttcgctttcaacgccggccacatcgccggctctgtcaacgtgcgcttcagcgccgcgcaagtcttcttcctcaaaggaggatacgaagcgttttcggcttcctgcccggagctgtgcagcaaacagtcgacccccatggggctcagccttcccctgagtactagcgtccctgacagcgcggaatctgggtgcagttcctgcagtaccccactctacgatcagggtggcccggtggaaatcctgccctttctgtacctgggcagtgcgtatcacgcttcccgcaaggacatgctggatgccttgggcatcactgccttgatcaacgtctcagccaattgtcccaaccattttgagggtcactaccagtacaagagcatccctgtggaggacaaccacaaggcagacatcagctcctggttcaacgaggccattgacttcatagactccatcaagaatgctggaggaagggtgtttgtccactgccaggcaggcatttcccggtcagccaccatctgccttgcttaccttatgaggactaatcgagtcaagctggacgaggcctttgagtttgtgaagcagaggcgaagcatcatctctcccaacttcagcttcatgggccagctgctgcagtttgagtcccaggtgctggctccgcactgttcggcagaggctgggagccccgccatggctgtgctcgaccgaggcacctccaccaccaccgtgttcaacttccccgtctccatccctgtccactccacgaacagtgcgctgagctaccttcagagccccattacgacctctcccagctgctgaaaggccacgggaggtgaggctcttcacatcccattgggactccatgctccttgagaggagaaatgcaataactctgggaggggctcgagagggctggtccttatttatttaacttcacccgagttcctctgggtttctaagcagttatggtgatgacttagcgtcaagacatttgctgaactcagcacattcgggaccaatatatagtgggtacatcaagtccatctgacaaaatggggcag

SEQ ID NO: 146182 - DNA, 1854 bp, Artificial Sequence
  derived and/or modified sequence
gcgaaggacatttgggctgtgtgtgcgacgcgggtcggaggggcagtcgggggaaccgcgaagaagccgaggagcccggagccccgcgtgacgctcctctctcagtccaaaagcggcttttggttcggcgcagagagacccgggggtctagcttttcctcgaaaagcgccgccctgcccttggccccgagaacagacaaagagcaccgcagggccgatcacgctgggggcgctgaggccggccatggtcatggaagtgggcaccctggacgctggaggcctgcgggcgctgctgggggagcgagcggcgcaatgcctgctgctggactgccgctccttcttcgctttcaacgccggccacatcgccggctctgtcaacgtgcgcttcagcaccatcgtgcggcgccgggccaagggcgccatgggcctggagcacatcgtgcccaacgccaagcgcgacggcaccctggccctggcggccggcgcgctctgccgcgaggcgcgcgccgcgcaagtcttcttcctcaaaggaggatacgaagcgttttcggcttcctgcccggagctgtgcagcaaacagtcgacccccatggggctcagccttcccctgagtactagcgtccctgacagcgcggaatctgggtgcagttcctgcagtaccccactctacgatcagggtggcccggtggaaatcctgccctttctgtacctgggcagtgcgtatcacgcttcccgcaaggacatgctggatgccttgggcatcactgccttgatcaacgtctcagccaattgtcccaaccattttgagggtcactaccagtacaagagcatccctgtggaggacaaccacaaggcagacatcagctcctggttcaacgaggccattgacttcatagactccatcaagaatgctggaggaagggtgtttgtccactgccaggcaggcatttcccggtcagccaccatctgccttgcttaccttatgaggactaatcgagtcaagctggacgaggcctttgagtttgtgaagcagaggcgaagcatcatctctcccaacttcagcttcatgggccagctgctgcagtttgagtcccaggtgctggctccgcactgttcggcagaggctgggagccccgccatggctgtgctcgaccgaggcacctccaccaccaccgtgttcaacttccccgtctccatccctgtccactccacgaacagtgcgctgagctaccttcagagccccattacgacctctcccagctgctgaaaggccacgggaggtgaggctcttcacatcccattgggactccatgctccttgagaggagaaatgcaataactctgggaggggctcgagagggctggtccttatttatttaacttcacccgagttcctctgggtttctaagcagttatggtgatgacttagcgtcaagacatttgctgaactcagcacattcgggaccaatatatagtgggtacatcaagtccatctgacaaaatggggcagaagagaaaggactcagtgtgtgatccggtttctttttgctcgcccctgttttttgtagaatctcttcatgcttgacatacctaccagtattattcccgacgacacatatacatatgagaatataccttatttatttttgtgtaggtgtctgccttcacaaatgtcattgtctactcctagaagaaccaaatacctcaatttttgtttttgagtactgtactatcctgtaaatatatcttaagcaggtttgttttcagcactgatggaaaataccagtgttgggtttttttttagttgccaacagttgtatgtttgctgattatttatgacctgaaataatatattt

SEQ ID NO: 146183 - protein, 314 aa, Artificial Sequence
  derived and/or modified sequence
MGLEAARELECAALGTLLRDPREAERTLLLDCRPFLAFCRRHVRAARPVPWNALLRRRARGPPAAVLACLLPDRALRTRLVRGELARAVVLDEGSASVAELRPDSPAHVLLAALLHETRAGPTAVYFLRGGFDGFQGCCPDLCSEAPAPALPPTGDKTSRSDSRAPVYDQGGPVEILPYLFLGSCSHSSDLQGLQACGITAVLNVSASCPNHFEGLFRYKSIPVEDNQMVEISAWFQEAIGFIDWVKNSGGRVLVHCQAGISRSATICLAYLMQSRRVRLDEAFDFVKQRRGVISPNFSFMGQLLQFETQVLCH

SEQ ID NO: 146184 - DNA, 945 bp, Artificial Sequence
  derived and/or modified sequence
atgggactggaggcagctcgtgaactcgagtgcgccgcgctgggaactctcctccgcgaccctagagaagcagagcgcaccctgctcctggattgcaggccgtttctagccttctgcaggcggcacgtccgagcagctcgcccagtgccctggaacgcactactgagaaggcgcgcacgcggccccccagctgcagtgctggcctgcctgctgcctgatagggcacttaggaccaggctagtccgtggagagctggcgagagcagtggtgcttgacgagggctcggcctccgtggcggaactgaggccggactctccagcgcatgtgcttctagctgcactgctacatgaaactagggccggccccaccgccgtttactttctccgggggggcttcgatgggtttcagggctgctgcccagacctgtgttctgaggctcctgctcctgcactgccccctacaggcgacaaaacctcccgctctgactcccgcgcccccgtctatgatcaaggaggccccgttgagattctgccctacttgtttctggggagctgctcacacagcagcgatttgcagggtctccaggcctgcggaattaccgcggttttgaacgtcagcgcatcttgtccaaaccatttcgaaggtttgtttcggtacaaaagcatccccgtggaggataaccaaatggtcgagatctctgcgtggtttcaggaggctattggcttcatagattgggtgaagaattcaggaggacgggttctggtacattgccaggctggcatctcccggtcggcaactatctgcctggcatacttgatgcaatcacgccgcgtgcgcctcgacgaagccttcgattttgtgaaacaacggcgaggagtgatcagcccgaattttagcttcatgggacagttgttgcagttcgaaacccaggtactgtgccattag

SEQ ID NO: 146185 - DNA, 945 bp, Artificial Sequence
  derived and/or modified sequence
atgggcctggaggccgcccgggagctggagtgtgccgccctgggcaccctgctgcgggacccccgggaggccgagaggaccctgctgctggactgccggcccttcctggccttctgccgccgccacgtgcgggccgcccggcctgtgccctggaatgccctgctgcggcggcgggcccggggccccccagctgctgtgctggcctgcctgctgcctgaccgggccctgcggacccggctggtgcggggggagctggcccgggctgtggtgctggatgagggcagcgcctctgtggccgagctgcggccagacagccctgcccacgtgctgctggccgccctgctgcacgagacccgggccggccccacagctgtgtacttcctgcggggcggctttgatggcttccagggctgctgcccagacctgtgcagcgaggccccagccccagccctgccccccaccggggacaagaccagcagaagtgacagccgggcccctgtgtatgaccagggcggccctgtggagatcctgccctacctgttcctgggcagctgcagccacagcagtgacctgcagggcctgcaggcctgtggcatcacagctgtgctgaatgtgtctgccagctgccccaaccactttgagggcctcttccgctacaagagcatccctgtggaggacaaccagatggtggagatcagcgcctggttccaggaggccatcggcttcatcgactgggtgaagaacagcggcggccgggtgctggtgcactgccaggccggcatcagccgcagcgccaccatctgcctggcctacctgatgcagagccggcgggtgcggctggatgaggcctttgattttgtgaagcagaggcggggcgtcatcagccccaacttctccttcatgggccagctgctgcagtttgagacccaggtgctgtgccactag

SEQ ID NO: 146186 - DNA, 945 bp, Artificial Sequence
  derived and/or modified sequence
atgggcctggaggccgcccgggagctggagtgcgccgccctgggcaccctactgagggaccccagagaggccgaacgcacgctattgctggattgccgtcctttcctagcgttctgccggcgccacgttagggcggcccgtccagttccttggaacgccctgctgcggcgacgcgctcgaggtccccctgcagctgtgttagcctgtctactgcctgacagggcgctgcgcactaggctagtcaggggcgagttggcgagggctgtcgtcctggacgaaggttccgccagtgtggctgaattgcgaccagattcccctgcccatgtacttctcgctgctttgctgcacgaaacacgcgccggccctacggcagtatatttcctccgaggaggctttgacgggttccagggctgctgccccgatctatgctcagaggctcccgcacctgctttaccccccacaggtgacaaaactagtcgatcagattcccgcgcccctgtatacgaccagggcggccctgtggaaattttgccttacctgttcttgggtagttgttcccacagttccgatttacaaggactccaagcgtgtggcatcaccgcagtgctgaacgtgtccgcctcttgccccaaccacttcgagggactgttccgctacaagtcaatccccgtcgaggataaccagatggtcgagatttccgcctggtttcaggaagccatagggttcatcgactgggtgaagaacagcggggggcgtgtactggttcactgccaggcaggaattagtagatccgccaccatctgcctggcctatcttatgcagtcaagacgagtgaggctggacgaggcatttgactttgtaaaacagagacgtggcgttatttccccgaactttagctttatgggtcagcttctacagtttgagacgcaggtactgtgccactag

SEQ ID NO: 146187 - DNA, 945 bp, Artificial Sequence
  derived and/or modified sequence
atggggctcgaggccgcacgggagctcgagtgcgccgctctgggcaccttgctgcgcgatcccagggaggctgagcggactttgctgctggattgcagaccttttctagccttttgccgacggcacgtccgggcagcacgtccagtcccctggaacgcactcctgcggcgacgggctaggggacccccagcagccgtgcttgcatgcctgctgccagacagagcgctccggacacggttagtgaggggagagctggctcgtgccgtagtgttggatgagggctctgccagcgttgccgagctaaggcccgacagtcctgctcacgtgttacttgcggctctgctgcatgaaacgcgtgccggtcctacggcagtgtactttttgagagggggattcgacgggtttcagggctgttgccccgatctttgctccgaagcacccgcacccgcactgccgccaactggcgataaaacgtcgcgctccgactccagagcaccagtctacgaccagggcggtccagtcgagatcttgccctacctgttcctcggctcatgcagtcacagcagcgatttgcagggattacaggcctgcggaatcaccgccgtgctgaacgtgtctgctagttgtcccaaccactttgaaggcttattcagatacaaatctatccccgtcgaagataatcagatggtcgagatcagcgcttggttccaggaagctatcggctttattgattgggtgaagaactccggcggtcgcgttttggttcactgtcaggctggaatatcccggtccgccacaatctgtctggcatatctcatgcagtcgcgccgagtgcgactcgacgaagcttttgactttgtgaaacagcgccgtggagtgatctcacccaatttctcatttatgggtcagttacttcagttcgagacacaggttctctgccattag

SEQ ID NO: 146188 - DNA, 945 bp, Artificial Sequence
  derived and/or modified sequence
atgggcctggaggccgccagagagctggagtgcgccgccctgggcaccctgctgagagaccccagagaggccgagagaaccctgctgctggactgcagacccttcctggccttctgcagaagacacgtgagagccgccagacccgtgccctggaacgccctgctgagaagaagagccagaggcccccccgccgccgtgctggcctgcctgctgcccgacagagccctgagaaccagactggtgagaggcgagctggccagagccgtggtgctggacgagggcagcgccagcgtggccgagctgagacccgacagccccgcccacgtgctgctggccgccctgctgcacgagaccagagccggccccaccgccgtgtacttcctgagaggcggcttcgacggcttccagggctgctgccccgacctgtgcagcgaggcccccgcccccgccctgccccccaccggcgacaagaccagcagaagcgacagcagagcccccgtgtacgaccagggcggccccgtggagatcctgccctacctgttcctgggcagctgcagccacagcagcgacctgcagggcctgcaggcctgcggcatcaccgccgtgctgaacgtgagcgccagctgccccaaccacttcgagggcctgttcagatacaagagcatccccgtggaggacaaccagatggtggagatcagcgcctggttccaggaggccatcggcttcatcgactgggtgaagaacagcggcggcagagtgctggtgcactgccaggccggcatcagcagaagcgccaccatctgcctggcctacctgatgcagagcagaagagtgagactggacgaggccttcgacttcgtgaagcagagaagaggcgtgatcagccccaacttcagcttcatgggccagctgctgcagttcgagacccaggtgctgtgccactag

SEQ ID NO: 146189 - DNA, 1688 bp, Artificial Sequence
  derived and/or modified sequence
ggagtcgaccgctcgggcagcgccaccgccacgagagcccgggacgcgggaaagaccgaaaggaagaggaagaggcaccggtggccatggggctggaggcggcgcgcgagctggagtgcgcggcgctgggcacgctgctgcgggatccgcgggaggcggaacgcacgctgctgctggactgccgccccttcctggccttctgccggcgccacgtgcgcgccgcgcggccagtgccttggaacgcgctgctgcggcgccgcgcgcgcggccctcctgccgccgttctcgcctgcctgctgcccgaccgcgcgctgcggacgcgcctggtccgcggggagctggcgcgggccgtggtgctggacgagggcagtgcctcggtggcggagctccggcccgacagcccggctcatgtgctgctggccgcgctgctgcacgagacccgcgcggggcccactgccgtgtacttcctgcgaggaggcttcgacggcttccagggctgctgtcccgatctgtgctctgaggcccccgcccctgcgctgccgccaacaggggacaaaaccagccgctccgactccagggctcctgtctacgaccagggtggccctgtggagatcttgccctacctgttcctgggcagctgcagtcactcgtcagacctgcaggggctgcaggcctgtggcatcacagccgtcctcaacgtgtccgccagctgccccaaccactttgagggccttttccgctacaagagtatccctgtggaggacaaccagatggtggagatcagtgcctggttccaggaggccataggcttcattgactgggtgaagaacagcggaggccgggtgctggtgcactgccaggcgggtatctcgcgctctgccaccatctgtctggcatacctcatgcagagtcgccgtgtgcggctggacgaggcctttgacttcgttaagcagcgccggggggtcatctcccccaacttcagtttcatggggcagctgctgcagtttgagacccaggtgctgtgtcactgaggtggtgcccctctgcctgcctgccccactgtgctggcaggagctgactgtggactggtgggctcccctctgggccagcacagtcccctcacctctggcagggctgctacctcctcagagtttcagaagcccccacatgggggctctaggaatgccggcatgctggtctttccgacctggtgctcttctgctgggggactgaggctggccctcattcggggtcgggaaccaagggtgtgtctgctctttccctccccatcctctggcagaaatcagctagacgctataccgtggactctccctggtccaccaccatgttgaagcccttggcagcctgagagctccaaggaacaagctgtgacaaccaggagccctgtctgtgggttcgtctgcccagggcctggagcccaagccctgtgttcctggggaagctggggacttgggaagtgatgggtgtgtcatgttgcgtgtgtctgtctgtgagcctttcacacctgtgctggcgctggaaaattatttgtgctcagctgacatttaacactccctcccccgcttcctcctagccctgtgggcaggggttggaaacttagcactttatatttatacagaacattcaggatatgtcaataaaatattgttatatttaaaaaacaacaa

SEQ ID NO: 146190 - protein, 384 aa, Artificial Sequence
  derived and/or modified sequence
MKVTSLDGRQLRKMLRKEAAARCVVLDCRPYLAFAASNVRGSLNVNLNSVVLRRARGGAVSARYVLPDEAARARLLQEGGGGVAAVVVLDQGSRHWQKLREESAARVVLTSLLACLPAGPRVYFLKGGYETFYSEYPECCVDVKPISQEKIESERALISQCGKPVVNVSYRPAYDQGGPVEILPFLYLGSAYHASKCEFLANLHITALLNVSRRTSEACATHLHYKWIPVEDSHTADISSHFQEAIDFIDCVREKGGKVLVHCEAGISRSPTICMAYLMKTKQFRLKEAFDYIKQRRSMVSPNFGFMGQLLQYESEILPSTPNPQPPSCQGEAAGSSLIGHLQTLSPDMQGAYCTFPASVLAPVPTHSTVSELSRSPVATATSC

SEQ ID NO: 146191 - DNA, 1155 bp, Artificial Sequence
  derived and/or modified sequence
atgaaggtgacatcgctcgacggcaggcagctgcggaagatgttacgcaaggaagccgctgctcgctgcgtggttctggactgcagaccatacctcgcttttgcagcatctaatgttagaggcagtcttaacgttaatctgaactccgtcgtgctgagaagagcccggggcggagctgtctccgccagatatgttttgccagatgaagccgcaagggctaggctccttcaagagggaggcgggggagttgctgcggtagtcgttttagatcagggttctaggcattggcagaagttaagggaggagtcagctgctcgtgtggtgctcacctcccttcttgcatgtctaccagcaggccctagagtgtacttcctgaagggcggctatgagactttctacagtgagtatcctgaatgttgtgtggacgttaaaccaatatcccaggaaaagatcgagtcagaaagagcgcttatctcccagtgcgggaaacccgtggttaacgtgtcataccgccctgcttacgatcaggggggcccggtcgagatccttccctttctctaccttggcagtgcctaccacgcatcgaagtgcgaattcttggccaatctacatatcacagctttgctcaatgtgagcagacgtacaagtgaggcctgtgccacccatctacattacaaatggatacccgtggaagacagtcacactgcggacatatcatctcattttcaggaagctattgattttatcgactgcgtcagagagaagggcggcaaagtcctggtgcattgcgaggccggcatctcacgctcacccaccatctgtatggcctacctgatgaaaaccaaacagttcaggctgaaggaagctttcgactatatcaaacagcgccggagcatggtgtcccctaacttcggctttatggggcagctcctgcagtatgagtccgagatcctcccttccacgcctaacccacagcctcctagctgtcagggagaggctgcaggttcctcattgattgggcacttgcagaccctatcccccgacatgcaaggcgcatactgcactttcccggcatcagtcttagcacccgtgcccacccactcgacagttagcgagctgagcagatctcccgtggctactgccacaagctgttag

SEQ ID NO: 146192 - DNA, 1155 bp, Artificial Sequence
  derived and/or modified sequence
atgaaggtgaccagcctggatggccggcagctgaggaagatgctgaggaaggaggccgccgcccgctgtgtggtgctggactgccggccctacctggcctttgctgccagcaatgtgcggggcagcctgaatgtgaacctgaacagcgtggtgctgcggcgggcccggggcggcgctgtgtctgcccgctacgtgctgcctgatgaggccgcccgggcccggctgctgcaggagggcggcggcggcgtggccgctgtggtggtgctggaccagggcagccgccactggcagaagctgcgggaggagagcgctgcccgggtggtgctgaccagcctgctggcctgcctgcctgctggcccccgggtgtacttcctgaagggcggctatgagaccttctacagcgagtacccagagtgctgcgtggatgtgaagcccatcagccaggagaagattgaaagtgagcgggccctgatcagccagtgtgggaagcctgtggtgaatgtgtcctacagacctgcctatgaccagggcggccctgtggagatcctgcccttcctgtacctgggcagcgcctaccacgccagcaaatgtgagttcctggccaacctgcacatcacagccctgctgaatgtgtccaggaggaccagcgaggcctgtgccacccacctgcactacaagtggatccctgtggaggacagccacacagctgacatcagcagccacttccaggaggccatcgacttcatcgactgtgtgcgggagaagggcggcaaggtgctggtgcactgtgaggccggcatcagccgcagccccaccatctgcatggcctacctgatgaagaccaagcagttccggctgaaggaggcctttgactacatcaagcagaggaggtccatggtgagccccaactttggcttcatgggccagctgctgcagtatgaaagtgagatcctgcccagcacccccaacccccagccccccagctgccagggcgaggccgccggcagcagcctgattggccacctgcagaccctgagcccagacatgcagggcgcctactgcaccttccctgcctctgtgctggcccctgtgcccacccacagcacagtgtctgagctgagccgcagccctgtggccacagccaccagctgctag

SEQ ID NO: 146193 - DNA, 1155 bp, Artificial Sequence
  derived and/or modified sequence
atgaaggtgaccagcctggacggccggcagctgcggaagatgctgaggaaagaggctgccgcacgctgcgtggtcctggactgtcgaccctacctggccttcgcagcatcaaacgtacggggttcgctgaatgtcaacctaaactctgtggtgctcaggcgagcccggggaggcgccgtcagcgcacgatacgtattgccagacgaagccgcccgtgctaggctactgcaagagggaggcggtggtgttgctgccgtggtggtgctggaccaaggtagtaggcactggcagaaactacgggaggagagcgcagctagggtagtgttgacctcgttgctggcttgcctgcccgccggccctcgcgtgtattttttaaagggtggctacgagactttctactctgaataccccgagtgttgcgttgacgtgaagccaatcagtcaggaaaagatcgaatctgagcgggccctgattagtcagtgcggcaagccagttgtgaacgttagctaccggccagcatatgatcagggcggtccagtcgagatactcccgttcctctacctgggatctgcatatcatgccagcaagtgcgagttcttggccaaccttcacattaccgccttactcaacgtgagccggaggaccagcgaagcttgcgctactcatctgcattacaagtggatacctgttgaggattcccacactgcagatatttcatcccattttcaggaggcaatcgattttattgattgcgtcagggaaaagggcgggaaggtgcttgttcattgcgaggcagggatatctaggtccccaacaatctgcatggcatatctcatgaagactaagcagtttcgcttgaaggaggcctttgactacatcaagcaacgccgatccatggtgtccccaaattttgggtttatgggacaactgttgcagtacgagtcagaaattttaccatctactccgaacccccagccccctagctgccagggcgaagcagcaggttcctcccttattggccatttgcagaccctctctccggacatgcagggtgcttactgcacctttcctgcaagtgtcctcgctcctgtccctacccacagtaccgtatctgagctcagtagatctccagtggctactgccacctcttgctag

SEQ ID NO: 146194 - DNA, 1155 bp, Artificial Sequence
  derived and/or modified sequence
atgaaggtcacttccctcgatgggaggcagttacggaaaatgttgcggaaagaggctgccgctagatgcgtggtccttgactgtcggccttaccttgcatttgcagctagtaacgtacgcggttccctgaacgtcaatcttaacagcgtcgtgctgcgtcgggctcgcggtggcgcagtcagcgcccgatatgtcttgcccgatgaggccgctcgggctagactactgcaggaggggggaggaggtgtggcagccgtggttgttctcgatcaggggagccggcactggcagaagctgagggaggagagcgcagcaagagtagtcttaacatccctgctggcgtgtctcccagcgggaccgcgtgtgtatttccttaagggaggctacgagactttttattcagagtatcccgagtgttgcgtggatgtgaagcccatctcacaagagaaaatagagtctgagcgggctctgattagtcagtgcggcaagccagtggtcaatgtcagctatcggccagcctacgaccagggaggccctgtggagatccttccttttttgtacctagggagcgcctaccacgcgtctaaatgtgagtttttagcaaacttgcacatcactgccctgctgaacgtgagtagaagaactagcgaggcttgtgccacccatcttcactacaagtggatccccgtcgaagatagccatactgccgacatcagctcccatttccaggaagctatcgactttattgattgcgtgagggaaaagggcggtaaggtactggtacattgcgaagccggaatcagcagatcccccaccatctgtatggcatacttgatgaaaacaaagcagttccgtttaaaagaggcattcgactatatcaaacagcgccgaagcatggtctcccctaactttggtttcatgggccagctgctgcagtatgagtccgagatcctgccatctacgcccaacccccagccccctagttgccagggggaggcagctggctcttctctgattggtcatcttcaaacactctcgccagatatgcagggggcatattgcacctttcccgcatctgtcctggccccagtacccactcatagcactgtttccgagctgtctcggtcacccgttgcaactgctactagttgctag

SEQ ID NO: 146195 - DNA, 1155 bp, Artificial Sequence
  derived and/or modified sequence
atgaaggtgaccagcctggacggcagacagctgagaaagatgctgagaaaggaggccgccgccagatgcgtggtgctggactgcagaccctacctggccttcgccgccagcaacgtgagaggcagcctgaacgtgaacctgaacagcgtggtgctgagaagagccagaggcggcgccgtgagcgccagatacgtgctgcccgacgaggccgccagagccagactgctgcaggagggcggcggcggcgtggccgccgtggtggtgctggaccagggcagcagacactggcagaagctgagagaggagagcgccgccagagtggtgctgaccagcctgctggcctgcctgcccgccggccccagagtgtacttcctgaagggcggctacgagaccttctacagcgagtaccccgagtgctgcgtggacgtgaagcccatcagccaggagaagatcgagagcgagagagccctgatcagccagtgcggcaagcccgtggtgaacgtgagctacagacccgcctacgaccagggcggccccgtggagatcctgcccttcctgtacctgggcagcgcctaccacgccagcaagtgcgagttcctggccaacctgcacatcaccgccctgctgaacgtgagcagaagaaccagcgaggcctgcgccacccacctgcactacaagtggatccccgtggaggacagccacaccgccgacatcagcagccacttccaggaggccatcgacttcatcgactgcgtgagagagaagggcggcaaggtgctggtgcactgcgaggccggcatcagcagaagccccaccatctgcatggcctacctgatgaagaccaagcagttcagactgaaggaggccttcgactacatcaagcagagaagaagcatggtgagccccaacttcggcttcatgggccagctgctgcagtacgagagcgagatcctgcccagcacccccaacccccagccccccagctgccagggcgaggccgccggcagcagcctgatcggccacctgcagaccctgagccccgacatgcagggcgcctactgcaccttccccgccagcgtgctggcccccgtgcccacccacagcaccgtgagcgagctgagcagaagccccgtggccaccgccaccagctgctag

SEQ ID NO: 146196 - DNA, 2557 bp, Artificial Sequence
  derived and/or modified sequence
cttatatgggcagccgcgtcacggacggcactcattcacataaaacgctgcgcggccggcggaatccccggcttctagggcggcgagcggccgggctggctatcgagcgagcggggcgggaacgcggagttgcgccgccgctcgggcgccgggctccgtcgcggccgcagccccgcgggtcgccctcccgtgcctcgcccgcggacaccctggccgtggacaccctggccgtgggcacccgcggggcgcgcggcgcggggccgctggccggcggcggcggcggcatgaaggtcacgtcgctcgacgggcgccagctgcgcaagatgctccgcaaggaggcggcggcgcgctgcgtggtgctcgactgccggccctatctggccttcgctgcctcgaacgtgcgcggctcgctcaacgtcaacctcaactcggtggtgctgcggcgggcccggggcggcgcggtgtcggcgcgctacgtgctgcccgacgaggcggcgcgcgcgcggctcctgcaggagggcggcggcggcgtcgcggccgtggtggtgctggaccagggcagccgccactggcagaagctgcgagaggagagcgccgcgcgtgtcgtcctcacctcgctactcgcttgcctacccgccggcccgcgggtctacttcctcaaagggggatatgagactttctactcggaatatcctgagtgttgcgtggatgtaaaacccatttcacaagagaagattgagagtgagagagccctcatcagccagtgtggaaaaccagtggtaaatgtcagctacaggccagcttatgaccagggtggcccagttgaaatccttcccttcctctaccttggaagtgcctaccatgcatccaagtgcgagttcctcgccaacctgcacatcacagccctgctgaatgtctcccgacggacctccgaggcctgcgcgacccacctacactacaaatggatccctgtggaagacagccacacggctgacattagctcccactttcaagaagcaatagacttcattgactgtgtcagggaaaagggaggcaaggtcctggtccactgtgaggctgggatctcccgttcacccaccatctgcatggcttaccttatgaagaccaagcagttccgcctgaaggaggccttcgattacatcaagcagaggaggagcatggtctcgcccaactttggcttcatgggccagctcctgcagtacgaatctgagatcctgccctccacgcccaacccccagcctccctcctgccaaggggaggcagcaggctcttcactgataggccatttgcagacactgagccctgacatgcagggtgcctactgcacattccctgcctcggtgctggcaccggtgcctacccactcaacagtctcagagctcagcagaagccctgtggcaacggccacatcctgctaaaactgggatggaggaatcggcccagccccaagagcaactgtgatttttgtttttaagactcatggacatttcatacctgtgcaatactgaagacctcattctgtcatgctgccccagtgagatagtgagtggtcaccaggcttgcaaatgaacttcagacggacctcagggtaggttctcgggactgaaggaaggccaagccattacgggagcacagcatgtgctgactactgtacttccagacccctgccctcttgggactgcccagtccttgcacctcagagttcgccttttcatttcaagcataaggcaataaatacctgcagcaacgtgggagaaagaagttgctggaccaggagaaaaggcagttatgaagccaattcattttgaaggaagcacaatttccaccttattttttgaactttggcagtttcaatgtctgtctctgttgcttcggggcataagctgatcaccgtctagttgggaaagtaaccctacagggtttgtagggacatgatcagcatcctgatttgaaccctgaaatgttgtgtagacaccctcttgggtccaatgaggtagttggttgaagtagcaagatgttggcttttctggattttttttgccatgggttcttcactgaccttggactttggcatgattcttagtcatacttgaacttgtctcattccacctcttctcagagcaactcttcctttgggaaaagagttcttcagatcatagaccaaaaaagtcataccttcgaggtggtagcagtagattccaggaggagaagggtacttgctaggtatcctgggtcagtggcggtgcaaactggtttcctcagctgcctgtccttctgtgtgcttatgtctcttgtgacaattgttttcctccctgcccctggaggttgtcttcaagctgtggacttctgggatttgcagattttgcaacgtggtactactttttttttctttttgtctgttagttatttctccaggggaaaaggcaataattttctaagacccgtgtgaatgtgaagaaaagcagtatgttactggttgttgttgttgttcttgttttttatagtgtaaaataaaaatagtaaaaggagaaaagca

SEQ ID NO: 146197 - protein, 736 aa, Artificial Sequence
  derived and/or modified sequence
MAGSSTGGGGVGETKVIYHLDEEETPYLVKIPVPAERITLGDFKSVLQRPAGAKYFFKSMDQDFGVVKEEISDDNARLPCFNGRVVSWLVSSDNPQPEMAPPVHEPRAELAPPAPPLPPLPPERTSGIGDSRPPSFHPNVSSSHENLEPETETESVVSLRRERPRRRDSSEHGAGGHRTGGPSRLERHLAGYESSSTLMTSELESTSLGDSDEEDTMSRFSSSTEQSSASRLLKRHRRRRKQRPPRLERTSSFSSVTDSTMSLNIITVTLNMEKYNFLGISIVGQSNERGDGGIYIGSIMKGGAVAADGRIEPGDMLLQVNDMNFENMSNDDAVRVLRDIVHKPGPIVLTVAKCWDPSPQAYFTLPRNEPIQPIDPAAWVSHSAALTGTFPAYPGSSSMSTITSGSSLPDGCEGRGLSVHTDMASVTKAMAAPESGLEVRDRMWLKITIPNAFLGSDVVDWLYHHVEGFPERREARKYASGLLKAGLIRHTVNKITFSEQCYYVFGDLSGGCESYLVNLSLNDNDGSSGASDQDTLAPLPGATPWPLLPTFSYQYPAPHPYSPQPPPYHELSSYTYGGGSASSQHSEGSRSSGSTRSDGGAGRTGRPEERAPESKSGSGSESEPSSRGGSLRRGGEASGTSDGGPPPSRGSTGGAPNLRAHPGLHPYGPPPGMALPYNPMMVVMMPPPPPPVPPAVQPPGAPPVRDLGSVPPELTASRQSFHMAMGNPSEFFVDVM

SEQ ID NO: 146198 - DNA, 2211 bp, Artificial Sequence
  derived and/or modified sequence
atggccggcagcagcaccggcggcggcggcgtgggcgagaccaaggtgatctaccacctggacgaggaggagaccccctacctggtgaagatccccgtgcccgccgagagaatcaccctgggcgacttcaagagcgtgctgcagagacccgccggcgccaagtacttcttcaagagcatggaccaggacttcggcgtggtgaaggaggagatcagcgacgacaacgccagactgccctgcttcaacggcagagtggtgagctggctggtgagcagcgacaacccccagcccgagatggccccccccgtgcacgagcccagagccgagctggccccccccgccccccccctgccccccctgccccccgagagaaccagcggcatcggcgacagcagaccccccagcttccaccccaacgtgagcagcagccacgagaacctggagcccgagaccgagaccgagagcgtggtgagcctgagaagagagagacccagaagaagagacagcagcgagcacggcgccggcggccacagaaccggcggccccagcagactggagagacacctggccggctacgagagcagcagcaccctgatgaccagcgagctggagagcaccagcctgggcgacagcgacgaggaggacaccatgagcagattcagcagcagcaccgagcagagcagcgccagcagactgctgaagagacacagaagaagaagaaagcagagaccccccagactggagagaaccagcagcttcagcagcgtgaccgacagcaccatgagcctgaacatcatcaccgtgaccctgaacatggagaagtacaacttcctgggcatcagcatcgtgggccagagcaacgagagaggcgacggcggcatctacatcggcagcatcatgaagggcggcgccgtggccgccgacggcagaatcgagcccggcgacatgctgctgcaggtgaacgacatgaacttcgagaacatgagcaacgacgacgccgtgagagtgctgagagacatcgtgcacaagcccggccccatcgtgctgaccgtggccaagtgctgggaccccagcccccaggcctacttcaccctgcccagaaacgagcccatccagcccatcgaccccgccgcctgggtgagccacagcgccgccctgaccggcaccttccccgcctaccccggcagcagcagcatgagcaccatcaccagcggcagcagcctgcccgacggctgcgagggcagaggcctgagcgtgcacaccgacatggccagcgtgaccaaggccatggccgcccccgagagcggcctggaggtgagagacagaatgtggctgaagatcaccatccccaacgccttcctgggcagcgacgtggtggactggctgtaccaccacgtggagggcttccccgagagaagagaggccagaaagtacgccagcggcctgctgaaggccggcctgatcagacacaccgtgaacaagatcaccttcagcgagcagtgctactacgtgttcggcgacctgagcggcggctgcgagagctacctggtgaacctgagcctgaacgacaacgacggcagcagcggcgccagcgaccaggacaccctggcccccctgcccggcgccaccccctggcccctgctgcccaccttcagctaccagtaccccgccccccacccctacagcccccagccccccccctaccacgagctgagcagctacacctacggcggcggcagcgccagcagccagcacagcgagggcagcagaagcagcggcagcaccagaagcgacggcggcgccggcagaaccggcagacccgaggagagagcccccgagagcaagagcggcagcggcagcgagagcgagcccagcagcagaggcggcagcctgagaagaggcggcgaggccagcggcaccagcgacggcggccccccccccagcagaggcagcaccggcggcgcccccaacctgagagcccaccccggcctgcacccctacggccccccccccggcatggccctgccctacaaccccatgatggtggtgatgatgccccccccccccccccccgtgccccccgccgtgcagccccccggcgccccccccgtgagagacctgggcagcgtgccccccgagctgaccgccagcagacagagcttccacatggccatgggcaaccccagcgagttcttcgtggacgtgatgtag

SEQ ID NO: 146199 - DNA, 3022 bp, Artificial Sequence
  derived and/or modified sequence
ctttaagtcacgtgacatgaggagaggtgggcgggtacctggaggaagctcgcggcgtcggtggcggtggcgcgcggcggccgctgagaccggggctttgagtcgcaccccgcggcccgccccccgccgccaccctcgcagatccgtgctttttcccctttgcttctctcccgtactgggtcagtcctgtccgcgctcgcgcgtcggtttgcgggtgtgcgcaggcgcggcaggggccattagccctttgggtgggcggtggagcccgggagcgcgcgggcgagaccatggcgggtagcagcactgggggcggtggggttggggagacgaaggtgatttaccacctggatgaggaagagactccctacctggtgaagatccctgtccccgccgagcgcatcaccctcggcgatttcaagagcgtcctgcagcggcccgcgggcgccaagtactttttcaagtctatggatcaggatttcggggtggtgaaggaagaaatttcagatgacaacgcccgcctcccctgcttcaacggaagggtggtatcctggctggtgtcctcagataatccccaacccgagatggcccctccagtccatgagcctcgggcagaactggcgcctccagccccacctttacctcctttgccacccgagaggaccagcggcattggggactcaaggcctccatccttccaccctaatgtgtccagcagccatgagaatctggagcctgagacagaaaccgagtcagtagtgtcactgaggcgggagcggcctcgcaggagagacagcagtgagcatggcgctgggggccacaggactggtggcccctcaaggctggagcgccacctggccggatacgagagctcctctaccctcatgaccagcgagctggagagtaccagcctgggggactcggacgaggaggacaccatgagcaggttcagcagctccacggagcagagcagtgcctcccgcctccttaagcgccaccggcggcgaaggaagcagaggccaccccgcctggagaggacgtcatccttcagcagcgtcacagattccacaatgtctctcaatatcatcacagtcacgctaaacatggagaagtacaacttcctgggtatctccattgttggccagagcaatgagcggggagacggaggcatctacattggctccatcatgaagggtggggctgtggcggccgacgggcgcattgagccaggggacatgcttttgcaggtgaatgacatgaactttgagaacatgagcaacgatgacgctgtgcgggtgctgagggacattgtgcacaagcctggccccattgtgctgactgtggccaagtgctgggatccctctcctcaggcctatttcactctcccccgaaatgagcccatccagccaattgaccctgctgcctgggtgtcccattccgcggctctgactggcaccttcccagcctatccaggttcctcctccatgagcaccattacatctggatcgtctttgcctgatggctgtgaaggccggggtctctccgtccatacggacatggcatcggtgaccaaggccatggcagctccagagtctggactggaagtccgggaccgcatgtggctcaagatcaccatccctaatgcctttctgggctcggatgtggttgactggctctaccatcacgtggagggctttcctgagcggcgggaggcccgcaagtatgccagcgggctgctcaaagcaggcctgatccgacacaccgtcaacaagatcaccttctctgagcagtgctattacgtcttcggagacctcagtggtggctgtgagagctacctagtcaacctgtctctcaatgacaacgatggctccagtggggcttcagaccaggataccctggctcctctgcctggggccaccccctggcccctgctgcccactttctcctaccaataccctgccccacacccctacagcccgcagcctccaccctaccatgagctttcatcttacacctatggtgggggcagtgccagcagccagcatagtgagggcagccggagcagtgggtcgacacggagtgatgggggggcagggcgcacggggaggcccgaggagcgggcccccgagtccaagtccggcagtggcagtgagtctgagccctccagccgagggggcagccttcggcggggtggggaagcaagtgggactagcgatgggggccctcctccatccagaggctcaactgggggtgcccctaatctccgagcccacccagggctccatccctatggaccgccccctggcatggccctcccctacaaccccatgatggtggtcatgatgcccccacctccacctccagtccctccagcagtgcagcctccgggggcccctccagtcagagacctgggctctgtgcccccagaactgacagccagccgccaaagcttccacatggccatgggcaatcccagcgagttctttgtggatgttatgtagcccactgtggggccaggctgggccgggcgctcctggtgtgtgactgggtgtcctggccgtcatgtgcttgctcttacagtgcctgggctcagcctaccagctgctgccatacaggagattgtggccactgtgactctcaccagcagtgcctggttcctcccccttccctcaggggtagacaagggacctttgattatttttagctttgtttttttataagcctttttgggggttaaaatagagtttcttacatttttgggacttttttaataggcatttcctcttttatatgaagaattcccatccattgggccccttctaaccccagaatgtgacctcctcctccagttacccacagccctgccctttgcagggttgggggtggtcagcggtaccccggggttaggcatcctagacagcagcctgaggaagctgggagatttgggccatgtagctgcctttgttactctatttattttagtcacttgtataaaacaccaaataaagcaatagaggcaaactcc

SEQ ID NO: 146200 - DNA, 2211 bp, Artificial Sequence
  derived and/or modified sequence
atggccggcagctccaccggaggaggtggagtgggagagacaaaagtgatttaccacctggatgaggaagagactccctatttggtaaaaataccagtgcccgcagagcgcataaccctcggggactttaaaagcgtcttgcagagaccagccggagcgaaatattttttcaagagcatggatcaggattttggtgtggtcaaggaggaaatctccgacgataacgctcgactcccttgcttcaatggacgcgtggtgagttggttagtttcctctgataatccacagcctgaaatggcgccacccgtacacgaaccccgagctgagctggcccctcccgctcctccacttcccccccttccgccagagagaacatccggaatcggcgacagccgaccccccagcttccatccaaacgtgtcctcaagccatgagaatctggaaccagaaaccgagaccgagtccgtcgtgagcctgaggcgcgaacggccacgcaggcgcgatagctcagagcacggagctggtgggcatagaaccggaggtccttctcgcctagaacgtcacctggccggatacgaaagtagctctaccctcatgactagcgaactggaaagcacatcactaggagatagtgacgaagaagatactatgtccaggtttagtagttctacagaacaaagcagcgcctcgcggttgctgaagcgacatcgacgtcggagaaagcagcgccctcccagattggaacgcacatcatcattcagttcagttacagacagtacaatgtcgcttaacattatcacggtgaccctgaacatggagaaatacaactttcttggcatctcaattgtgggccaatccaacgagcgaggggacgggggaatctatatcgggtccattatgaagggcggcgctgtggccgcagatgggcggattgaaccaggagatatgttactgcaggtcaatgacatgaattttgaaaacatgtctaacgatgacgccgtacgcgtactgagagacatcgtccacaagcctggaccgatagtcttaacagtggcaaagtgttgggacccctcgccacaggcatacttcacactgccaaggaatgaacccatacagcccatcgatccagctgcatgggtctcacactctgccgctctgaccggaaccttccccgcatatcctggttcatcatcgatgtccaccataacctcaggttcgagtcttccagacggttgcgaaggtagaggcctcagcgtccataccgacatggcgtcagtgactaaggctatggccgcacccgagtctggactggaggtgagggaccgcatgtggctcaagattacaattccaaatgcttttctcgggtccgacgtagtcgactggttgtaccaccatgtggaggggttccccgagagacgggaggcccggaaatatgcttctgggctgctcaaggctgggctaattcggcacacggtcaacaagattaccttttccgagcagtgctattatgttttcggagatctgagtggggggtgtgagagctatctcgtgaacctttccctcaatgacaacgacggaagctccggagcatcagaccaggataccctggcccccctgccaggtgcaaccccatggccgctgttgcccaccttcagctatcagtatcctgccccacacccctattctccccagcctcctccctatcatgaactcagttcctacacctatggggggggatctgcaagctctcaacatagtgaggggtctcgaagctccggctccaccaggtccgacggcggcgccggaagaaccggacgccccgaggaaagggctcccgagagcaagtctggttctgggtcagagagtgaaccttcttcaagaggcggttcactgaggcgggggggcgaggcctctggcacaagcgacggggggccccctccatctcggggcagtacaggaggagctccaaacttgcgcgcccacccagggttgcacccctatgggcctccccccggtatggccctgccatacaaccctatgatggtggtaatgatgcctccgccaccaccacccgtgcctcccgccgttcagccaccgggagccccccccgtgcgagacctggggtcagtgccgccagagctcaccgcttcgaggcaatcatttcatatggctatggggaatccgtcagagttctttgtcgacgtaatgtag

SEQ ID NO: 146201 - DNA, 2211 bp, Artificial Sequence
  derived and/or modified sequence
atggccggcagcagcactggaggcggcggcgtgggggagaccaaggtgatctaccacctggatgaggaggagaccccctacctggtgaagatccctgtgcctgctgagcgcatcaccctgggggacttcaagtctgtgctgcagaggcctgctggggccaagtacttcttcaagtccatggaccaggactttggagtggtgaaggaggagatcagtgatgacaatgcccggctgccctgcttcaacggccgggtggtgtcctggctggtgtccagtgacaacccccagcctgagatggcccctcctgtgcatgagcccagggctgagctggcccccccagccccacccctgccccccctgcccccagagaggaccagcggcatcggggacagcaggcctccttccttccaccccaacgtgagcagcagccatgagaacctggagcctgagacagaaacagaatctgtggtgtccctgcggcgggagcggccccggcggcgggacagcagcgagcacggggccggcggccacaggactggaggccccagccggctggagcggcacctggccggctatgagagcagcagcaccctgatgaccagcgagctggagagcaccagcctgggggacagtgatgaggaggacaccatgagccgcttcagcagcagcacagagcagagcagcgccagccggctgctgaagaggcacagaagaagaaggaagcagaggcctccccggctggagaggaccagcagcttcagctctgtgacagacagcaccatgagcctgaacatcatcaccgtgaccctgaacatggagaagtacaacttcctgggcatcagcatcgtgggccagagcaatgaaagaggagatggcggcatctacatcggcagcatcatgaagggcggcgctgtggccgcagatggaagaattgagcccggggacatgctgctgcaggtgaatgacatgaactttgagaacatgagcaatgatgatgctgtgcgggtgctgcgggacatcgtgcacaagccaggccccatcgtgctgactgtggccaagtgctgggaccccagcccccaggcctacttcaccctgcccagaaatgagcccatccagcccatcgaccctgctgcctgggtgagccacagcgctgccctgaccggcaccttccctgcctacccaggcagcagctccatgagcaccatcaccagcggcagcagcctgcctgatggctgtgagggccggggcctgtctgtgcacacagacatggcctctgtgaccaaggccatggccgcccctgagagcggcctggaggtgcgggacaggatgtggctgaagatcaccatccccaatgccttcctgggcagtgatgtggtggactggctgtaccaccacgtggagggcttccctgagcggcgggaggccaggaaatatgccagcggcctgctgaaggccggcctcatccgccacacagtgaacaagatcaccttcagcgagcagtgctactacgtgtttggagacctgagcggcggctgtgagagctacctggtgaacctgagcctgaatgacaatgatggcagcagcggggccagtgaccaggacaccctggcccccctgcccggggccaccccctggcccctgctgcccaccttctcctaccagtacccagccccccacccctacagcccccagcccccaccctaccacgagctgagcagctacacctacggcggcggcagcgccagcagccagcacagcgagggcagccgcagcagcggcagcaccaggagtgatggaggagctggccgcacaggccggcctgaggagcgggcccctgagagcaagagcggcagcggcagcgagagcgagcccagcagccggggcggcagcctgcggcggggcggggaggccagcggcaccagtgatggcggccccccacccagccggggcagcactggaggagcccccaacctgcgggcccaccctggcctgcacccctacggccccccacctggcatggccctgccctacaaccccatgatggtggtgatgatgcctcctcctcctcctcctgtgcccccagctgtgcagcccccaggggcccctcctgtgcgggacctgggctctgtgcccccagagctgacagccagccggcagagcttccacatggccatgggcaaccccagcgagttctttgtggatgtgatgtag

SEQ ID NO: 146202 - DNA, 2211 bp, Artificial Sequence
  derived and/or modified sequence
atggccggcagcagcaccggcggcggcggcgtgggcgagaccaaggtgatatatcatttagacgaggaggagactccctatcttgttaagatccctgttcccgccgaaaggatcacattaggagatttcaaaagtgttctgcagcgccctgctggcgcaaagtatttcttcaagagcatggaccaggacttcggagtagttaaggaagaaataagtgatgacaacgctagactgccgtgtttcaacggaagagtggtctcttggctcgtgagctcggataacccccagcccgagatggctcctcccgtccacgagcctcgggccgagctggccccaccggctccgccactccccccgctccctcctgagcgcacttccggcatcggtgatagccgacccccctcgtttcaccctaatgtgagtagctcccatgaaaacctagagcccgaaaccgagactgagtcagtagtgtccttgagacgggagaggccaaggcggcgcgactcgagtgagcacggcgcgggaggtcataggaccgggggcccatcacggctagagcgacatctcgctgggtatgaatcttcctctaccctaatgacaagcgagctggagtctactagcttaggcgactcggacgaggaggatacgatgagtcgcttttcctcaagtacagaacagagctcagcctcacgcttgctgaagaggcacaggagacggaggaaacagaggccacctagactggaaaggacgagtagtttttccagcgttacagatagtactatgtctctgaacattattaccgtcacattgaatatggaaaagtataatttcctcgggatatcaattgtggggcaatccaatgagcgcggggacggcggtatctatataggaagtattatgaaagggggggctgtcgctgccgatggtcgtatcgaacctggcgacatgctgcttcaggtaaacgatatgaactttgaaaatatgtctaatgacgatgccgtgagggttctgcgcgatatcgtgcataaaccaggacccattgtccttacggtcgccaaatgctgggacccaagcccacaagcatattttacacttccacgtaatgagcccatccaacccatcgatcccgctgcgtgggtgtcccacagtgccgccctcaccggcacattccccgcatacccagggagctcttcaatgtcaactattacttccgggtcttccctccctgatggctgcgagggccgcgggctatccgtgcacaccgatatggcttctgtcacaaaagcgatggcggccccggaaagtggcctcgaggttcgcgatagaatgtggctgaaaataacaatccccaacgcatttctgggtagtgatgtggtggattggctgtatcatcatgtggaggggttccccgaacggagggaagccagaaaatacgctagtggtttgttgaaggcaggcctgattaggcatactgtgaacaagattacattctctgaacagtgttactacgtctttggggacctgagtggaggctgcgagtcttatttggttaatctgtcactgaacgataacgacggtagttcaggcgcgtccgaccaggataccctcgctccccttcctggggccacaccctggcctcttttgcccacattcagctaccagtatccggcgcctcacccatactctccccaacccccaccttaccacgaactcagctcttatacgtacggaggcgggtctgcgtccagccaacactctgaaggtagccgcagttctgggtcaacaaggtcagatggaggagccgggcggacggggagaccagaagaacgcgcaccagagagcaaatccgggtccgggagtgagtcggagccttcttcccgtggaggctcccttaggaggggcggtgaagcatccggaacctcagacgggggaccgccaccaagtcgcggttcaaccgggggagctcccaacttgagagctcacccaggtttgcatccatatggccctcctccaggtatggccttgccatacaaccctatgatggtagtgatgatgccacctccaccaccacccgtaccccccgcagttcagccgccaggagcgccaccagtgcgggacctgggcagtgttccacccgaactcactgccagccggcagtcttttcatatggccatgggcaacccttcagagtttttcgtggatgtgatgtag

SEQ ID NO: 146203 - DNA, 2211 bp, Artificial Sequence
  derived and/or modified sequence
atggctggatcatcaacagggggagggggtgttggcgaaaccaaggtcatctatcacctcgacgaagaagagactccctatctcgtgaagatacctgtgcctgcggagagaataacacttggtgactttaagtccgttctccagagacccgcaggggctaaatatttcttcaaaagtatggatcaggacttcggggtggtgaaagaggagatctccgacgacaatgctagactgccctgctttaatgggcgtgtggtatcctggctagtttccagtgacaaccctcagcccgagatggcacccccagtccatgagccaagggcagaacttgccccaccggctccccctctgccccctttgcctcccgaaagaacgtcaggcatcggtgattccaggccccctagctttcaccccaatgttagctcatcacacgagaatctggaacccgaaaccgagaccgaaagcgtggtgagtcttcggagagaacggcctaggagaagggactcttctgagcacggggctggtggacatcggaccggcggaccgagtcgcctagagcggcatctggccggttacgagagctctagcactctaatgacttccgaactggagtcgacctccctgggggattcagacgaggaggacacaatgagcagattctcgagctcaactgagcagagcagcgctagccgactgctgaaaaggcatcgtaggcgaagaaagcagcggcctccgaggctcgaacgtacctcctccttcagcagcgtcaccgacagtaccatgagcctcaatattatcactgtgacactgaacatggagaaatacaacttcctcggcatttccattgtgggccagagcaacgagcgcggtgacggcggaatttacatcggtagcatcatgaaagggggtgctgtggccgctgacgggagaattgaacctggtgatatgctgttgcaagtgaatgatatgaatttcgagaatatgtctaatgacgacgctgtccgagtgctccgcgacatcgtccacaagccaggaccgatagttctcaccgtcgccaaatgctgggatccatctccacaggcttactttaccctgccaagaaatgagccgattcagccaatcgatcccgctgcgtgggtttcccacagtgcggcattaacaggaacctttcccgcttatcccggtagttcttccatgtctacgatcacctctggatcatccctccctgatgggtgcgaggggagaggtctcagcgtacacactgacatggcctccgttactaaagctatggccgcacccgaatctggcctcgaggtccgagatcgcatgtggctgaagattaccataccgaatgctttccttggtagcgacgtggtggactggctgtaccaccatgtcgagggtttcccggaacgcagggaagctcgaaagtacgcaagtggtctcctcaaggcaggcctcatcagacacactgtgaacaaaatcacttttagtgagcagtgctattacgtcttcggtgatctgagcgggggttgtgaatcctacctggtgaacctctcactgaacgacaacgatggatcatctggcgcttcagaccaggacacactcgcccctctaccaggagccaccccctggcctctattgcccaccttcagctatcagtatcctgcgcctcacccctattccccacagccgcctccataccacgaactgagcagttacacctacgggggaggttcggcttcatctcagcatagcgagggcagtcgcagctctggttcaaccaggagcgatggcggagccggacgcacagggaggccagaagagagggcacccgagtccaaatcaggctctggcagcgagagtgagccatcctcccgcggagggagcttgcgcagggggggagaggcaagcgggacttctgacggaggcccacctccctcacggggatctaccggaggggctcctaatttgagagcacacccaggcctgcacccgtacggccctccccctggcatggcgttgccctataacccaatgatggttgtcatgatgcccccaccccctccaccagtgccacctgccgtgcagccccctggtgcccctcccgtacgcgacctgggcagtgtgccccctgagctgacagcctctcgccagagttttcacatggctatgggcaatccctccgagttcttcgtagacgttatgtag

SEQ ID NO: 146204 - DNA, 2211 bp, Artificial Sequence
  derived and/or modified sequence
atggccgggagttctactggcggaggaggcgtgggcgagactaaagtgatctaccatctggatgaagaggaaacaccatatttagttaaaattcctgtgcccgccgagaggatcaccctaggtgatttcaagagcgtgttgcaacgcccagctggggcaaaatactttttcaagtctatggaccaggactttggcgtggtgaaggaggagatctccgatgataatgcacgtctaccctgttttaatggacgggtggtaagctggctggttagcagcgataatccacaacctgaaatggctccaccagtacacgaaccccgggctgaacttgcccctcccgcgccacccctcccccctcttcctcccgagcgtactagcggcattggggactccagaccccctagctttcaccctaatgtcagcagttcccacgaaaacctggaacctgagaccgagaccgagtcggtggtatccctccgcagggaaagacccagaagacgtgactctagcgagcatggcgctggcggccatcgcactggcggaccttctaggctggagcgccatttagcaggctacgagtcatcaagcacactcatgacctccgagcttgagtccacaagcttaggcgactcagacgaagaagatacaatgtcccgattctcctccagtaccgagcagagctccgctagccgcctcctaaagagacaccgcagaaggaggaagcagcgaccgcccagactggagcgcacatcatcttttagcagtgtaaccgattctaccatgtccttgaatatcataactgtaaccttaaatatggagaaatataactttctgggcataagcattgtgggtcaatccaatgaaaggggagacggcgggatttatataggctccattatgaagggcggtgcagtggcagccgacggtagaattgaaccaggggacatgcttttgcaggtcaacgatatgaattttgagaatatgagtaatgacgacgcagtgcgggtgcttagagacatagtccacaagccgggccctatcgtgctcacagtcgccaagtgctgggatcccagccctcaggcttattttaccctcccacgcaacgagcccattcagcccatcgatcctgcagcctgggtatcccactccgccgcgctgacaggtacattccctgcttacccgggttcatcgtccatgagcacaatcacctcagggtctagtctgccagacgggtgtgaaggtcgagggctcagtgttcacacggacatggcgagcgttactaaggctatggcggcacctgagtctgggctggaggtcagagatcgtatgtggctgaaaatcaccattccaaatgctttcctggggtctgatgtcgtggactggctgtatcaccacgtggaagggttccccgaacgccgcgaagctagaaagtacgcatcaggtttgctgaaagccgggctcatcagacacacagtaaataaaatcacattcagtgagcagtgttactatgtgtttggcgacttatccggcggatgcgaatcttatctcgtgaatttgtcactgaatgacaacgatgggtcgagcggagctagcgatcaagatacgcttgcccccctccccggagcaactccatggcctctcctgcccacattctcgtatcagtatcccgcaccccatccgtattctccccagccaccaccataccacgagctgagtagctatacttatgggggcggatctgccagtagccagcacagtgaaggctcaagaagcagcgggtctacccgaagtgacgggggtgccggaagaaccggtcgcccagaagagcgggcaccagaatcaaaatccggctcaggcagcgaaagcgagccctcttcccgtggaggttccctccggcgggggggagaagccagcgggacaagcgacggcggccccccccccagcagaggctcgaccggtggcgccccaaacctccgtgctcaccccggccttcatccctatggcccgcccccaggtatggcattgccctataatccaatgatggtggtcatgatgccgcccccgcctcctcctgtacctccagcagtgcagcctcctggggccccgccagtcagagacctcgggtccgtccctcctgaactgaccgcctcccgacaatcttttcatatggcgatgggcaacccctcggagttttttgtcgatgtgatgtag

SEQ ID NO: 146205 - DNA, 2211 bp, Artificial Sequence
  derived and/or modified sequence
atggccgggagttctactggcggaggaggcgtgggcgagactaaagtgatctaccatctggatgaagaggaaacaccatatttagttaaaattcctgtgcccgccgagaggatcaccctaggtgatttcaagagcgtgttgcaacgcccagctggggcaaaatactttttcaagtctatggaccaggactttggcgtggtgaaggaggagatctccgatgataatgcacgtctaccctgttttaatggacgggtggtaagctggctggttagcagcgataatccacaacctgaaatggctccaccagtgcacgaaccacgagctgaactagcaccccctgcccctcccctccctccattaccacccgaaagaacgtccggcatcggcgactctaggccaccgtccttccatccaaacgtatcttcttcacacgaaaacctggagcctgagacagaaacagagtccgtggtttctctgcggcgcgaacgaccgaggaggagagattctagtgagcatggagctggagggcacagaacgggcggcccctccagactggaaaggcatctggccggttacgaatcttcatcaacactgatgaccagcgagctggaatctacctccctaggcgatagcgatgaagaggacaccatgagtcggttctctagctctactgaacagtcttcagcctctcgtctactcaagcggcataggagacgcaggaaacagcgacccccaagactcgagagaacatcttccttcagtagcgtaacagatagtacaatgagccttaacattatcacggtcactcttaacatggagaaatataactttttaggcattagcattgtcgggcagtctaacgagcggggagacgggggcatctatataggcagtattatgaaggggggagccgtggcagcagacgggcggatagaacctggggacatgctgttacaggttaatgatatgaatttcgagaacatgtccaatgatgacgccgttcgggtgctccgagacatagtgcacaaacctggacctatcgtccttaccgtggcaaaatgttgggacccaagcccacaggcttatttcactttaccaaggaatgaacccatccagcctatagaccctgcagcttgggtgtctcacagcgctgcactcaccggcacatttcccgcttatcctggatcgtctagtatgtcaacaatcacgtccggatcttcattgcccgatggctgtgagggacgtggattatccgtgcataccgatatggcctctgttactaaggccatggccgctcctgaatccgggttggaagtaagggaccgtatgtggctcaaaatcacgatacctaacgcctttttaggctccgatgtagtggactggctttatcaccacgtggaagggttccctgaacgaagggaggcgagaaagtacgcttcagggttgctgaaagctggattaataagacataccgtgaacaaaatcaccttctctgagcagtgttactatgtgtttggcgacctgtcaggcggatgtgagagctaccttgtgaacctttcgctcaacgacaacgacggaagctccggcgcatcagatcaggataccctcgctccccttcccggcgcaaccccatggccgcttctgcctacattttcatatcaataccctgccccacacccctattcgcctcagcctcccccctaccacgagctctcttcctacacctatggcggagggtcagcatctagccagcactccgaaggcagtaggagtagtggctccacccgctcagacggcggtgccggtcgcacgggcagacctgaagagcgggctccagagtccaagagcgggtcaggaagcgaatcagaaccttcatcgagggggggctcgctcagacggggtggagaggctagtggcacatcagacggcggtcccccgccatccagaggctcaaccggaggagcacccaatctacgagcgcacccgggcttacatccttatggacccccacccggaatggcgctgccttacaaccctatgatggttgtcatgatgccccccccccccccgcccgtaccccctgccgttcaacctccaggcgcccctcccgttcgggacctcggaagtgtgccgccagagctaaccgcaagtagacagtcctttcatatggctatgggcaacccctcagaattcttcgtggacgttatgtag

SEQ ID NO: 146206 - RNA, 2211 nt, Artificial Sequence
  derived and/or modified sequence
auggccgggaguucuacuggcggaggaggcgugggcgagacuaaagugaucuaccaucuggaugaagaggaaacaccauauuuaguuaaaauuccugugcccgccgagaggaucacccuaggugauuucaagagcguguugcaacgcccagcuggggcaaaauacuuuuucaagucuauggaccaggacuuuggcguggugaaggaggagaucuccgaugauaaugcacgucuacccuguuuuaauggacgggugguaagcuggcugguuagcagcgauaauccacaaccugaaauggcuccaccaguacacgaaccccgggcugaacuugccccucccgcgccaccccuccccccucuuccucccgagcguacuagcggcauuggggacuccagacccccuagcuuucacccuaaugucagcaguucccacgaaaaccuggaaccugagaccgagaccgagucggugguaucccuccgcagggaaagacccagaagacgugacucuagcgagcauggcgcuggcggccaucgcacuggcggaccuucuaggcuggagcgccauuuagcaggcuacgagucaucaagcacacucaugaccuccgagcuugaguccacaagcuuaggcgacucagacgaagaagauacaaugucccgauucuccuccaguaccgagcagagcuccgcuagccgccuccuaaagagacaccgcagaaggaggaagcagcgaccgcccagacuggagcgcacaucaucuuuuagcaguguaaccgauucuaccauguccuugaauaucauaacuguaaccuuaaauauggagaaauauaacuuucugggcauaagcauugugggucaauccaaugaaaggggagacggcgggauuuauauaggcuccauuaugaagggcggugcaguggcagccgacgguagaauugaaccaggggacaugcuuuugcaggucaacgauaugaauuuugagaauaugaguaaugacgacgcagugcgggugcuuagagacauaguccacaagccgggcccuaucgugcucacagucgccaagugcugggaucccagcccucaggcuuauuuuacccucccacgcaacgagcccauucagcccaucgauccugcagccuggguaucccacuccgccgcgcugacagguacauucccugcuuacccggguucaucguccaugagcacaaucaccucagggucuagucugccagacgggugugaaggucgagggcucaguguucacacggacauggcgagcguuacuaaggcuauggcggcaccugagucugggcuggaggucagagaucguauguggcugaaaaucaccauuccaaaugcuuuccuggggucugaugucguggacuggcuguaucaccacguggaaggguuccccgaacgccgcgaagcuagaaaguacgcaucagguuugcugaaagccgggcucaucagacacacaguaaauaaaaucacauucagugagcaguguuacuauguguuuggcgacuuauccggcggaugcgaaucuuaucucgugaauuugucacugaaugacaacgaugggucgagcggagcuagcgaucaagauacgcuugccccccuccccggagcaacuccauggccucuccugcccacauucucguaucaguaucccgcaccccauccguauucuccccagccaccaccauaccacgagcugaguagcuauacuuaugggggcggaucugccaguagccagcacagugaaggcucaagaagcagcgggucuacccgaagugacgggggugccggaagaaccggucgcccagaagagcgggcaccagaaucaaaauccggcucaggcagcgaaagcgagcccucuucccguggagguucccuccggcgggggggagaagccagcgggacaagcgacggcggccccccccccagcagaggcucgaccgguggcgccccaaaccuccgugcucaccccggccuucaucccuauggcccgcccccagguauggcauugcccuauaauccaaugaugguggucaugaugccgcccccgccuccuccuguaccuccagcagugcagccuccuggggccccgccagucagagaccucggguccgucccuccugaacugaccgccucccgacaaucuuuucauauggcgaugggcaaccccucggaguuuuuugucgaugugauguag

SEQ ID NO: 146207 - RNA, 2211 nt, Artificial Sequence
  derived and/or modified sequence
auggccgggaguucuacuggcggaggaggcgugggcgagacuaaagugaucuaccaucuggaugaagaggaaacaccauauuuaguuaaaauuccugugcccgccgagaggaucacccuaggugauuucaagagcguguugcaacgcccagcuggggcaaaauacuuuuucaagucuauggaccaggacuuuggcguggugaaggaggagaucuccgaugauaaugcacgucuacccuguuuuaauggacgggugguaagcuggcugguuagcagcgauaauccacaaccugaaauggcuccaccagugcacgaaccacgagcugaacuagcacccccugccccuccccucccuccauuaccacccgaaagaacguccggcaucggcgacucuaggccaccguccuuccauccaaacguaucuucuucacacgaaaaccuggagccugagacagaaacagaguccgugguuucucugcggcgcgaacgaccgaggaggagagauucuagugagcauggagcuggagggcacagaacgggcggccccuccagacuggaaaggcaucuggccgguuacgaaucuucaucaacacugaugaccagcgagcuggaaucuaccucccuaggcgauagcgaugaagaggacaccaugagucgguucucuagcucuacugaacagucuucagccucucgucuacucaagcggcauaggagacgcaggaaacagcgacccccaagacucgagagaacaucuuccuucaguagcguaacagauaguacaaugagccuuaacauuaucacggucacucuuaacauggagaaauauaacuuuuuaggcauuagcauugucgggcagucuaacgagcggggagacgggggcaucuauauaggcaguauuaugaaggggggagccguggcagcagacgggcggauagaaccuggggacaugcuguuacagguuaaugauaugaauuucgagaacauguccaaugaugacgccguucgggugcuccgagacauagugcacaaaccuggaccuaucguccuuaccguggcaaaauguugggacccaagcccacaggcuuauuucacuuuaccaaggaaugaacccauccagccuauagacccugcagcuugggugucucacagcgcugcacucaccggcacauuucccgcuuauccuggaucgucuaguaugucaacaaucacguccggaucuucauugcccgauggcugugagggacguggauuauccgugcauaccgauauggccucuguuacuaaggccauggccgcuccugaauccggguuggaaguaagggaccguauguggcucaaaaucacgauaccuaacgccuuuuuaggcuccgauguaguggacuggcuuuaucaccacguggaaggguucccugaacgaagggaggcgagaaaguacgcuucaggguugcugaaagcuggauuaauaagacauaccgugaacaaaaucaccuucucugagcaguguuacuauguguuuggcgaccugucaggcggaugugagagcuaccuugugaaccuuucgcucaacgacaacgacggaagcuccggcgcaucagaucaggauacccucgcuccccuucccggcgcaaccccauggccgcuucugccuacauuuucauaucaauacccugccccacaccccuauucgccucagccuccccccuaccacgagcucucuuccuacaccuauggcggagggucagcaucuagccagcacuccgaaggcaguaggaguaguggcuccacccgcucagacggcggugccggucgcacgggcagaccugaagagcgggcuccagaguccaagagcgggucaggaagcgaaucagaaccuucaucgagggggggcucgcucagacgggguggagaggcuaguggcacaucagacggcggucccccgccauccagaggcucaaccggaggagcacccaaucuacgagcgcacccgggcuuacauccuuauggacccccacccggaauggcgcugccuuacaacccuaugaugguugucaugaugccccccccccccccgcccguacccccugccguucaaccuccaggcgccccucccguucgggaccucggaagugugccgccagagcuaaccgcaaguagacaguccuuucauauggcuaugggcaaccccucagaauucuucguggacguuauguag

SEQ ID NO: 146208 - protein, 716 aa, Artificial Sequence
  derived and/or modified sequence
MGETKIIYHLDGQETPYLVKLPLPAERVTLADFKGVLQRPSYKFFFKSMDDDFGVVKEEISDDNAKLPCFNGRVVSWLVSAEGSHPDPAPFCADNPSELPPPMERTGGIGDSRPPSFHPHAGGGSQENLDNDTETDSLVSAQRERPRRRDGPEHATRLNGTAKGERRREPGGYDSSSTLMSSELETTSFFDSDEDDSTSRFSSSTEQSSASRLMRRHKRRRRKQKVSRIERSSSFSSITDSTMSLNIITVTLNMEKYNFLGISIVGQSNERGDGGIYIGSIMKGGAVAADGRIEPGDMLLQVNEINFENMSNDDAVRVLREIVHKPGPITLTVAKCWDPSPRGCFTLPRSEPIRPIDPAAWVSHTAAMTGTFPAYGMSPSLSTITSTSSSITSSIPDTERLDDFHLSIHSDMAAIVKAMASPESGLEVRDRMWLKITIPNAFIGSDVVDWLYHNVEGFTDRREARKYASNLLKAGFIRHTVNKITFSEQCYYIFGDLCGNMANLSLHDHDGSSGASDQDTLAPLPHPGAAPWPMAFPYQYPPPPHPYNPHPGFPELGYSYGGGSASSQHSEGSRSSGSNRSGSDRRKEKDPKAGDSKSGGSGSESDHTTRSSLRGPRERAPSERSGPAASEHSHRSHHSLASSLRSHHTHPSYGPPGVPPLYGPPMLMMPPPPAAMGPPGAPPGRDLASVPPELTASRQSFRMAMGNPSEFFVDVM

SEQ ID NO: 146209 - protein, 723 aa, Artificial Sequence
  derived and/or modified sequence
MGETKIIYHLDGQETPYLVKLPLPAERVTLADFKGVLQRPSYKFFFKSMDDDFGVVKEEISDDNAKLPCFNGRVVSWLVSAEGSHPDPAPFCADNPSELPPPMERTGGIGDSRPPSFHPHAGGGSQENLDNDTETDSLVSAQRERPRRRDGPEHATRLNGTAKGERRREPGGYDSSSTLMSSELETTSFFDSDEDDSTSRFSSSTEQSSASRLMRRHKRRRRKQKVSRIERSSSFSSITDSTMSLNIITVTLNMEKYNFLGISIVGQSNERGDGGIYIGSIMKGGAVAADGRIEPGDMLLQVNEINFENMSNDDAVRVLREIVHKPGPITLTVAKCWDPSPRGCFTLPRSEPIRPIDPAAWVSHTAAMTGTFPAYGMSPSLSTITSTSSSITSSIPDTERLDDFHLSIHSDMAAIVKAMASPESGLEVRDRMWLKITIPNAFIGSDVVDWLYHNVEGFTDRREARKYASNLLKAGFIRHTVNKITFSEQCYYIFGDLCGNMANLSLHDHDGSSGASDQDTLAPLPHPGAAPWPMAFPYQYPPPPHPYNPHPGFPELGYSYGGGSASSQHSEGSRSSGSNRSGSDRRKEKDPKAGDSKSGGSGSESDHTTRSSLRGPRERAPSERSGPAASEHSHRSHHSLASSLRSHHTHPSYGPPGVPPLYGPPMLMMPPPPAAMGPPGAPPGRDLASVPPELTASRQSFRMAMGNPSEFFVDVMVLRGWGA

SEQ ID NO: 146210 - protein, 699 aa, Artificial Sequence
  derived and/or modified sequence
MGETKIIYHLDGQETPYLVKLPLPAERVTLADFKGVLQRPSYKFFFKSMDDDFGVVKEEISDDNAKLPCFNGRVVSWLVSAEGSHPDPAPFCADNPSELPPPMERTGGIGDSRPPSFHPHAGGGSQENLDNDTETDSLVSAQRERPRRRDGPEHATRLNGTAKGERRREPGGYDSSSTLMSSELETTSFFDSDEDDSTSRFSSSTEQSSASRLMRRHKRRRRKQKVSRIERSSSFSSITDSTMSLNIITVTLNMEKYNFLGISIVGQSNERGDGGIYIGSIMKGGAVAADGRIEPGDMLLQVNEINFENMSNDDAVRVLREIVHKPGPITLTVAKCWDPSPRGCFTLPRTMTGTFPAYGMSPSLSTITSTSSSITSSIPDTERLDDFHLSIHSDMAAIVKAMASPESGLEVRDRMWLKITIPNAFIGSDVVDWLYHNVEGFTDRREARKYASNLLKAGFIRHTVNKITFSEQCYYIFGDLCGNMANLSLHDHDGSSGASDQDTLAPLPHPGAAPWPMAFPYQYPPPPHPYNPHPGFPELGYSYGGGSASSQHSEGSRSSGSNRSGSDRRKEKDPKAGDSKSGGSGSESDHTTRSSLRGPRERAPSERSGPAASEHSHRSHHSLASSLRSHHTHPSYGPPGVPPLYGPPMLMMPPPPAAMGPPGAPPGRDLASVPPELTASRQSFRMAMGNPSEFFVDVM

SEQ ID NO: 146211 - protein, 784 aa, Artificial Sequence
  derived and/or modified sequence
MEGAMAVRVTAAHTAEAQAEAGREAGEGAVAAVAAALAPSGFLGLPAPFSEEDEDDVHRCGRCQAEFTALEDFVQHKIQKACQRAPPEALPATPATTALLGQEVVPAAPGPEEPITVAHIVVEAASLAADISHASDLVGGGHIKEVIVAAEAELGDGEMAEAPGSPRQQGLGLAGEGEQAQVKLLVNKDGRYVCALCHKTFKTGSILKAHMVTHSSRKDHECKLCGASFRTKGSLIRHHRRHTDERPYKCSKCGKSFRESGALTRHLKSLTPCTEKIRFSVSKDVVVSKEDARAGSGAGAAGLGTATSSVTGEPIETSPVIHLVTDAKGTVIHEVHVQMQELSLGMKALAPEPPVSQELPCSSEGSRENLLHQAMQNSGIVLERAAGEEGALEPAPAAGSSPQPLAVAAPQLPVLEVQPLETQVASEASAVPRTHPCPQCSETFPTAATLEAHKRGHTGPRPFACAQCGKAFPKAYLLKKHQEVHVRERRFRCGDCGKLYKTIAHVRGHRRVHSDERPYPCPKCGKRYKTKNAQQVHFRTHLEEKPHVCQFCSRGFREKGSLVRHVRHHTGEKPFKCYKCGRGFAEHGTLNRHLRTKGGCLLEVEELLVSEDSPAAATTVLTEDPHTVLVEFSSVVADTQEYIIEATADDAETSEATEIIEGTQTEVDSHIMKVVQQIVHQASAGHQIIVQNVTMDEETALGPEAAAADTITIATPESLTEQVAMTLASAISEGTVLAARAGTSGTEQATVTMVSSEDIEILEHAGELVIASPEGQLEVQTVIV

SEQ ID NO: 146212 - DNA, 2355 bp, Artificial Sequence
  derived and/or modified sequence
atggaaggcgccatggcggttagggtgaccgccgcccatacagcggaagcacaagcggaagcaggcagagaagccggcgagggagcagttgcagcagtcgccgccgcactcgcgccatcgggattcctgggccttccagcgccttttagtgaagaggacgaagatgatgtgcacagatgtggcaggtgtcaggccgaatttactgcgctggaagattttgttcaacataagatccaaaaggcttgccagcgtgctcccccagaggccctgcctgcgacacctgcaactactgccctcctgggccaggaagtggttcccgcagctcccggtccggaggagcctattaccgtcgcgcacatagtcgtagaggcggcatccttggccgctgacatcagtcatgccagcgatcttgtgggcggcgggcacatcaaagaagtgattgtggcggcagaagcagagttgggagatggggagatggcagaggcccctggatccccccggcagcaaggtctaggtctggccggtgagggggagcaagcccaagtaaagcttctggtcaacaaggacggtcgctatgtctgcgcattatgccataaaacttttaaaacaggcagtatccttaaggcccacatggtcacgcatagctcaaggaaggaccacgaatgtaaactgtgtggtgcttcttttagaactaagggctcgttaataagacaccatcgtcgccataccgatgagagaccttataaatgctctaaatgcgggaagtcattcagggagagtggtgccctgactagacacctgaaatccctgaccccttgtactgagaaaatacggttcagtgtgtccaaggacgtcgtcgtatctaaggaggacgccagggctggatctggggcgggggccgccggattgggtaccgccacttcctccgtgacaggcgaaccaattgagacctcgcccgtcattcatctggtcaccgacgccaagggcactgtgatccacgaagtgcacgtgcagatgcaagagctgtctttggggatgaaggccctggcccctgaaccacctgtgagtcaggaactgccttgtagctcggagggctccagagagaacctgcttcaccaggctatgcagaattcgggtatcgtactggagcgggcggccggagaggagggcgccctggagcccgctccagcagctggctcgtccccacagccgctggcagtggcagcccctcagctgcccgtcctggaggttcagccactcgaaacccaagtagcatctgaggcctccgccgtgcccagaacacacccctgtcctcagtgcagcgagacgttcccgactgccgctacacttgaggcccacaaacgtgggcacacaggcccacggccctttgcctgcgcccagtgtggtaaggcattccccaaagcatatttgctcaagaaacaccaggaggtgcacgtgagagaaaggcgatttcggtgtggagactgtggcaagttgtataagacaatcgcccatgtgcgaggacaccggcgggttcactcggacgaaaggccttacccatgtcccaaatgcgggaaaaggtacaagacaaagaacgcgcagcaggtccactttcggacccacctagaggagaagccccacgtgtgtcaattttgcagtcggggcttccgcgaaaagggcagtctggtccgacacgttaggcatcacactggggaaaagccgttcaagtgctacaaatgtggaaggggcttcgcggagcacggaaccctgaatcgtcatttacggactaaagggggctgtctgctggaggttgaggagttactcgtcagcgaagacagtccagcagcggcaacaaccgttttgactgaagacccacacactgtgctcgttgaattttcctctgtggtggccgacacgcaagagtatattatcgaggcaacagctgacgatgctgagacatcggaggccactgaaataatcgaaggaactcagacggaggttgactcccatatcatgaaagtcgtgcagcagatcgttcaccaagcctccgctggacatcaaattatcgtacaaaacgtgacaatggatgaagagaccgctctggggcctgaagctgcagcagcagacaccattaccatagctacccctgagtcactaactgagcaggtggctatgaccctcgcctccgcgatatcagaggggacagtattggctgcccgcgctggtacatcaggtaccgagcaggctactgtaactatggtgtcttcggaagacatcgagatactggaacatgccggtgagctggtgattgccagcccagaaggtcagctcgaagtgcaaaccgtgatagtctag

SEQ ID NO: 146213 - DNA, 2355 bp, Artificial Sequence
  derived and/or modified sequence
atggagggcgccatggctgtgcgggtgacagctgcccacacagctgaggcccaggccgaggccggccgggaggccggggagggcgctgtggccgctgtggccgccgccctggcccccagcggcttcctgggcctgcctgcccccttcagcgaggaggatgaagatgatgtgcaccgctgtggccgctgccaggccgagttcaccgccctggaggactttgtgcagcacaagatccagaaggcctgccagagggcccctcctgaggccctgcctgccaccccagccaccacagccctgctgggccaggaggtggtgcctgctgcccctggccctgaggagcccatcaccgtggcccacatcgtggtggaggccgccagcctggccgctgacatcagccacgccagtgacctggtgggcggcggccacatcaaggaggtgattgtggccgctgaggccgagctgggagatggagagatggccgaggcccctggcagcccccggcagcagggcctgggcctggccggggagggggagcaggcccaggtgaagctgctggtgaacaaggatggccgctacgtgtgtgccctgtgccacaagaccttcaagacaggcagcatcctgaaggcccacatggtgacccacagcagcaggaaggaccacgagtgcaagctgtgtggggccagcttccgcaccaagggcagcctcatccgccaccaccggcggcacacagatgagcggccctacaagtgcagcaaatgtgggaagagcttccgggagagcggggccctgaccaggcacctgaagagcctgaccccctgcacagagaagatccgcttctctgtgtccaaggatgtggtggtgtccaaggaggatgcccgggccggcagcggggccggggctgctggcctgggcacagccaccagctctgtgactggagagcccatcgagaccagccctgtgatccacctggtgacagatgccaagggcaccgtcatccacgaggtgcacgtgcagatgcaggagctgagcctgggcatgaaggccctggcccctgagccccctgtgtcccaggagctgccctgcagcagcgagggcagccgggagaacctgctgcaccaggccatgcagaacagcggcatcgtgctggagagagctgctggggaggagggcgccctggagcccgccccagctgctggcagcagcccccagcccctggccgtggccgccccccagctgcctgtgctggaggtgcagcccctggagacccaggtggccagcgaggccagcgctgtgcccaggacccacccctgcccccagtgcagcgagaccttccccacagctgccaccctggaggcccacaagaggggccacacaggcccccggccctttgcctgtgcccagtgtgggaaggccttccccaaggcctacctgctgaagaagcaccaggaggtgcacgtgcgggagcggcgcttccgctgtggggactgtgggaagctgtacaagaccatcgcccacgtgcggggccaccggcgggtgcacagtgatgagcggccctacccctgccccaagtgtgggaagcgctacaagaccaagaatgcccagcaggtgcacttccgcacccacctggaggagaagccccacgtgtgccagttctgcagccggggcttccgggagaagggcagcctggtgagacatgtgcgccaccacactggagagaagcccttcaagtgctacaagtgtggccggggctttgctgagcacggcaccctgaacagacacctgcggaccaagggcggctgcctgctggaggtggaggagctgctggtgtctgaggacagccctgctgctgccaccaccgtgctgacagaggacccccacacagtgctggtggagttcagctctgtggtggccgacacccaggagtacatcatcgaggccacagcagatgatgctgagaccagcgaggccacagagatcatcgagggcacccagacagaggtggacagccacatcatgaaggtggtgcagcagatcgtgcaccaggccagcgctggccaccagatcatcgtgcagaatgtgaccatggatgaggagacagccctgggccctgaggccgctgctgctgacaccatcaccatcgccaccccagagagcctgacagagcaggtggccatgaccctggccagcgccatcagcgagggcaccgtgctggccgcccgggccggcaccagcggcacagagcaggccaccgtgaccatggtgtccagtgaagatattgagatcctggagcacgccggggagctggtgattgccagccctgagggccagctggaggtgcagacagtgattgtgtag

SEQ ID NO: 146214 - DNA, 2355 bp, Artificial Sequence
  derived and/or modified sequence
atggagggcgccatggccgtgcgggtgaccgccgcccacaccgccgaagcccaggccgaagctggcagggaggccggggaaggcgctgttgcagctgtcgcagcggccttggctccatccggcttcctggggctgcctgcccccttctcagaagaagacgaagatgatgtgcatagatgtggcagatgccaggccgagttcaccgccctcgaggacttcgtgcaacacaagatccagaaagcgtgccagcgcgccccccccgaagcgttacctgcaactcctgccactacggctctgctcggccaggaagtggtacccgccgcgccaggccctgaagagcctatcactgtcgcccatatcgttgtagaagccgccagtctggcagccgacatttctcacgcttcagacctggtcggaggaggacacattaaggaggtgatagtggccgcagaagcagagctgggggacggtgagatggccgaggcaccaggatcaccaagacagcaaggactgggcctggccggggagggagagcaagctcaggtaaagttactggtgaacaaggatggccggtacgtgtgcgccttgtgccacaagactttcaaaactggttccatcctgaaagctcacatggttacacactcctctcgaaaagatcacgaatgtaagttgtgcggagctagcttccgtacgaagggcagcctgatcagacatcataggaggcataccgacgaacgcccctacaaatgttcaaaatgcggcaaatcctttagggagtctggagccctaaccaggcatctgaagtcactgacaccttgtaccgaaaagatccgtttcagcgtgagcaaggatgtagtcgtgtcaaaggaagacgccagagccgggtcaggagctggggcggctggattggggactgcaacctcttctgtgacaggagagcccatagaaacatcaccagtcattcatctcgtgacggatgccaaaggcacggtgattcacgaagtgcatgtgcagatgcaggaactgagcctcgggatgaaggccctggccccggagcctcccgtttctcaggaactcccttgcagtagcgaggggtcacgggagaacctcctgcatcaagccatgcaaaattcaggcatcgtgctggagagagcagcaggggaggagggggcactggaaccagctccagctgcaggaagctccccacagccgctcgctgttgccgctccccaacttcctgttctcgaagtccaaccccttgaaacccaagtcgcctctgaggcaagcgcggtcccgcgcactcatccttgcccccagtgttccgaaacatttccaactgcagccaccctggaagcccataaacgtggccatactgggccaaggccttttgcgtgtgcccagtgcggcaaggccttcccaaaggcttacctcctgaagaagcatcaggaggtgcatgtgcgcgagcggcgttttagatgtggcgattgtgggaagctgtataaaactatcgctcacgtccggggacatcgacgcgtacactccgacgaaagaccttacccctgccccaagtgcgggaagagatataaaaccaagaacgctcagcaggttcactttcgcactcacctggaggagaaaccccacgtgtgccagttttgtagccgcggcttccgcgaaaagggatcactggtcaggcatgtgcgacaccatacaggggaaaagccttttaaatgttataagtgcggcagagggtttgcagagcacggtactctaaacaggcacctgaggacaaaaggcggatgtctcctagaggtcgaagagctgttggtctctgaagactcacccgctgctgccaccaccgtgctcactgaggacccacatacggtgctggtagaattctcgagcgtggtagccgatacacaagaatacattattgaagcaacggcggatgacgccgagacaagcgaggctaccgagattatagagggcacccagactgaggttgactctcatataatgaaggtcgtgcagcagattgttcatcaggcatcggcgggtcatcagatcatagtgcagaacgtgaccatggatgaagaaacagctcttggcccagaggccgctgccgccgataccattaccattgccacacccgaatctctcactgaacaggttgctatgacactcgcatcagctatcagtgaagggactgtcctggcagcaagagcgggaacttccggcacagagcaagccactgtgacaatggtgagttctgaggatattgagatcttagaacacgcaggcgaactggtgatcgcatcaccagagggccaactcgaggtgcagaccgtcatcgtgtag

SEQ ID NO: 146215 - DNA, 2355 bp, Artificial Sequence
  derived and/or modified sequence
atggagggcgcaatggccgtacgggtaacagcagcacacacagcggaggctcaagctgaggcgggacgagaagctggcgaaggagccgtggcagcagttgccgcagcgctggcgccttccggcttcctgggtctgcccgctcctttctctgaggaggacgaagatgatgtacaccggtgcggacgctgtcaggccgagtttactgcgttagaggacttcgtgcaacacaagatccagaaggcttgccagagagcgcctcccgaggcattacctgcgacacccgcaaccacggcgttgctgggacaggaggtcgtgcccgcagctccaggacctgaggaacccataactgtggctcacatagtggtcgaggccgctagccttgccgcagatatcagccacgcctccgatctcgtgggaggaggtcacatcaaggaagtcattgtggcggcagaagcggagctgggagatggtgaaatggccgaagccccaggctcaccgcgacaacagggactcgggctggccggtgagggtgagcaggcacaggtcaaactgctcgtcaacaaagatggtcgctacgtgtgcgccctttgtcacaagacctttaagacagggagtattctgaaagcccacatggttacccattctagtcggaaggatcatgaatgtaaactgtgcggagcaagcttccgcactaagggaagcttgatcaggcaccatcgccgacacactgatgaaaggccatacaaatgctcgaagtgtgggaagtcttttcgggaaagcggggcactgacacgccatctgaaatcgctgacgccctgcacagagaaaatcagatttagcgtatccaaagatgtcgtcgtctccaaggaggacgcgagagcaggatcaggggcaggggctgccggtctagggaccgcgacgtctagcgtaacaggagagcccatcgagaccagtccagtgattcacctagtgacagacgccaaaggcacagttatccatgaggtccatgtgcaaatgcaagaactgtcccttggcatgaaggccctcgcccctgaacccccagtgagtcaggagttgccttgcagctcagagggctccagagagaatctcctgcatcaggctatgcagaatagcggcatcgtactagagagagctgctggcgaggaaggcgcacttgagcctgcccctgccgcaggttcgtctccccaacctctcgccgtagccgctcctcaactgccggtcctcgaggtacagccgttagagacccaggtcgcctctgaggcatccgccgtacccaggacccatccatgtccgcaatgcagtgaaacttttcccacggctgccactcttgaggcacacaagaggggccacacaggtcccagaccctttgcttgcgctcagtgtgggaaagcttttcctaaagcatacctgctgaaaaagcatcaggaagtgcatgtcagggagcggagattcaggtgtggagactgtgggaagctctataagaccattgcccacgtacggggacaccggcgtgtacattctgatgagagaccttacccttgtcccaagtgtggcaagcgctacaaaacaaaaaacgcccagcaggttcactttcgcacccacctggaggaaaagcctcacgtgtgccagttctgttccagaggtttcagagagaagggatccttggtacgccacgtgcggcaccatacaggcgagaagcccttcaaatgctataagtgcggacgcggtttcgcagagcatggcaccttgaatcgccatctgaggactaagggaggctgccttttggaggtcgaagagttgctcgtatctgaagactctcccgctgcggcaaccaccgtgctgactgaagatccccatacagtgctcgtggagttctcctcagtggtggcagatacacaggaatatattattgaggccactgctgacgacgcagagacatcagaggctactgagatcatcgaaggcacccagactgaagtggattcccatataatgaaggtagttcaacagatcgtgcaccaagcttccgccggacaccagataatcgttcaaaatgttaccatggacgaggagaccgctctaggacctgaagctgccgcagctgataccatcactattgccacgcccgagtcactgactgaacaggtggcaatgacattagccagtgcaatctcagaaggcactgtccttgcagcaagagccggaactagcgggaccgaacaggccacagttacaatggtttctagtgaagacatcgaaattctggaacatgcaggagagctggtgattgcgagccccgaaggacagctggaagtacagactgtgattgtttag

SEQ ID NO: 146216 - DNA, 2355 bp, Artificial Sequence
  derived and/or modified sequence
atggagggcgccatggccgtgagagtgaccgccgcccacaccgccgaggcccaggccgaggccggcagagaggccggcgagggcgccgtggccgccgtggccgccgccctggcccccagcggcttcctgggcctgcccgcccccttcagcgaggaggacgaggacgacgtgcacagatgcggcagatgccaggccgagttcaccgccctggaggacttcgtgcagcacaagatccagaaggcctgccagagagccccccccgaggccctgcccgccacccccgccaccaccgccctgctgggccaggaggtggtgcccgccgcccccggccccgaggagcccatcaccgtggcccacatcgtggtggaggccgccagcctggccgccgacatcagccacgccagcgacctggtgggcggcggccacatcaaggaggtgatcgtggccgccgaggccgagctgggcgacggcgagatggccgaggcccccggcagccccagacagcagggcctgggcctggccggcgagggcgagcaggcccaggtgaagctgctggtgaacaaggacggcagatacgtgtgcgccctgtgccacaagaccttcaagaccggcagcatcctgaaggcccacatggtgacccacagcagcagaaaggaccacgagtgcaagctgtgcggcgccagcttcagaaccaagggcagcctgatcagacaccacagaagacacaccgacgagagaccctacaagtgcagcaagtgcggcaagagcttcagagagagcggcgccctgaccagacacctgaagagcctgaccccctgcaccgagaagatcagattcagcgtgagcaaggacgtggtggtgagcaaggaggacgccagagccggcagcggcgccggcgccgccggcctgggcaccgccaccagcagcgtgaccggcgagcccatcgagaccagccccgtgatccacctggtgaccgacgccaagggcaccgtgatccacgaggtgcacgtgcagatgcaggagctgagcctgggcatgaaggccctggcccccgagccccccgtgagccaggagctgccctgcagcagcgagggcagcagagagaacctgctgcaccaggccatgcagaacagcggcatcgtgctggagagagccgccggcgaggagggcgccctggagcccgcccccgccgccggcagcagcccccagcccctggccgtggccgccccccagctgcccgtgctggaggtgcagcccctggagacccaggtggccagcgaggccagcgccgtgcccagaacccacccctgcccccagtgcagcgagaccttccccaccgccgccaccctggaggcccacaagagaggccacaccggccccagacccttcgcctgcgcccagtgcggcaaggccttccccaaggcctacctgctgaagaagcaccaggaggtgcacgtgagagagagaagattcagatgcggcgactgcggcaagctgtacaagaccatcgcccacgtgagaggccacagaagagtgcacagcgacgagagaccctacccctgccccaagtgcggcaagagatacaagaccaagaacgcccagcaggtgcacttcagaacccacctggaggagaagccccacgtgtgccagttctgcagcagaggcttcagagagaagggcagcctggtgagacacgtgagacaccacaccggcgagaagcccttcaagtgctacaagtgcggcagaggcttcgccgagcacggcaccctgaacagacacctgagaaccaagggcggctgcctgctggaggtggaggagctgctggtgagcgaggacagccccgccgccgccaccaccgtgctgaccgaggacccccacaccgtgctggtggagttcagcagcgtggtggccgacacccaggagtacatcatcgaggccaccgccgacgacgccgagaccagcgaggccaccgagatcatcgagggcacccagaccgaggtggacagccacatcatgaaggtggtgcagcagatcgtgcaccaggccagcgccggccaccagatcatcgtgcagaacgtgaccatggacgaggagaccgccctgggccccgaggccgccgccgccgacaccatcaccatcgccacccccgagagcctgaccgagcaggtggccatgaccctggccagcgccatcagcgagggcaccgtgctggccgccagagccggcaccagcggcaccgagcaggccaccgtgaccatggtgagcagcgaggacatcgagatcctggagcacgccggcgagctggtgatcgccagccccgagggccagctggaggtgcagaccgtgatcgtgtag

SEQ ID NO: 146217 - DNA, 2573 bp, Artificial Sequence
  derived and/or modified sequence
atgacgacatggtcgtaaatccgccatcttcctgcggcgcgttgcgacatggagggcgcgatggcagtgcgggtgacggccgctcatacggcagaagcccaggccgaagccgggcgggaagcgggcgagggtgcagttgcggcggtggcggcggccttggcccccagcggcttcctcggcctcccggcgcccttcagcgaggaagatgaggacgatgtgcacagatgcggccgctgccaggcagagttcaccgccttggaggattttgttcagcacaagattcagaaggcctgccagcgggcccctccggaggccctgcctgccacccctgccaccacagcgttgctgggccaggaggtggtgccggcagcaccaggcccagaggagcccatcactgtggcccacatcgtggtggaggcggcctctctggcagcagacatcagccacgcatctgaccttgttggtggtgggcacatcaaagaggtcatcgtggctgctgaggcggagctgggagacggtgagatggccgaggccccgggcagcccccgccagcaggggctggggctcgcaggggagggtgagcaggcccaggtgaagctactggtgaacaaggatggccgctatgtgtgtgcgctgtgccacaagaccttcaagacgggcagcatcctcaaggcccacatggtcactcacagcagccgcaaggaccacgagtgcaagctctgtggggcctccttccgcaccaagggctcactcatccggcaccaccggcggcacacggatgagcgcccctacaagtgctccaagtgtggaaagagcttccgggagtcgggtgcactgacccggcacctcaagtctctcaccccctgcacagagaaaatccgcttcagtgtgagcaaggacgtggttgtcagcaaagaggacgcacgtgcaggttctggagctggagctgccggcttggggacagccacatcatcggtgacaggcgagcctatagagacttcacccgtgattcacctggtgacagatgccaagggcaccgtcatccacgaagtccacgtccagatgcaggagctgtccctgggcatgaaagccctggccccagagccccccgtctcccaggagctcccctgctccagcgagggcagccgtgagaacctgctgcaccaggccatgcagaactccggcatcgtccttgagcgcgctgctggggaggagggtgccctggagccagctcctgctgccgggtccagtccccagcccctggcagtggcagccccgcagctgccggtactggaagtgcagccgctggagacacaggtggccagcgaggcctcagcggtgcccaggacccacccatgtcctcagtgcagtgagaccttcccgacagcagccaccctggaggcccacaagaggggccacaccgggccgaggccgttcgcctgcgcgcagtgtggcaaggccttccccaaggcctacctgctcaagaagcaccaggaggtgcacgtgcgtgagcgccgcttccgctgtggcgactgcgggaagctctacaagaccattgcccatgtgcgtggccaccggcgcgtccactcagacgagcggccctacccttgtcccaagtgtggcaagcgctacaagactaagaacgcacagcaggtgcacttcaggacacacctggaggagaagccgcacgtgtgccagttctgcagccgtggcttccgagagaagggctcactggtgcggcacgtgcgacaccacacaggcgagaagccgttcaagtgctacaagtgcggccgtggcttcgccgagcacggcacgctgaaccggcacctgcgcaccaaagggggctgcctgctggaggtggaggagttgctggtgtctgaggacagccccgcggcagccaccaccgtcctcacggaagacccgcacacagtgttggtggagttctcgtccgtggtagctgacacccaggagtatatcatcgaggccactgcggacgatgcggagaccagtgaggccacggagatcatcgagggcacccagacagaggtggacagccacatcatgaaggtggtgcagcagatcgtgcaccaggctagcgccggccaccagatcatcgtgcagaacgtcaccatggacgaggagacggcgctgggcccagaggcggctgccgccgacaccatcaccatcgccacccccgagagcctgacagagcaggtggccatgacgctggcctcggccatcagcgagggcactgtgcttgccgcccgggcagggacaagtggcactgaacaggccactgtgaccatggtgtcatcagaggacatcgagatcctggagcatgcaggcgagctggtcatcgcctcgccggagggccagctggaggtgcagacggtcatcgtctagcatgaggtctgcggggtcctggccgggcagggacagggcagaggactctgagcgccccacccatgcctgcctggcctggtagagaagatggcacaggatggaggcgccccaagacggacagtgtacataagagtttcttgttgctttacaataaaacatgagaacctgca

SEQ ID NO: 146218 - protein, 1004 aa, Artificial Sequence
  derived and/or modified sequence
METESEQNSNSTNGSSSSGGSSRPQIAQMSLYERQAVQALQALQRQPNAAQYFHQFMLQQQLSNAQLHSLAAVQQATIAASRQASSPNTSTTQQQTTTTQASINLATTSAAQLISRSQSVSSPSATTLTQSVLLGNTTSPPLNQSQAQMYLRPQLGNLLQVNRTLGRNVPLASQLILMPNGAVAAVQQEVPSAQSPGVHADADQVQNLAVRNQQASAQGPQMQGSTQKAIPPGASPVSSLSQASSQALAVAQASSGATNQSLNLSQAGGGSGNSIPGSMGPGGGGQAHGGLGQLPSSGMGGGSCPRKGTGVVQPLPAAQTVTVSQGSQTEAESAAAKKAEADGSGQQNVGMNLTRTATPAPSQTLISSATYTQIQPHSLIQQQQQIHLQQKQVVIQQQIAIHHQQQFQHRQSQLLHTATHLQLAQQQQQQQQQQQQQQQPQATTLTAPQPPQVPPTQQVPPSQSQQQAQTLVVQPMLQSSPLSLPPDAAPKPPIPIQSKPPVAPIKPPQLGAAKMSAAQQPPPHIPVQVVGTRQPGTAQAQALGLAQLAAAVPTSRGMPGTVQSGQAHLASSPPSSQAPGALQECPPTLAPGMTLAPVQGTAHVVKGGATTSSPVVAQVPAAFYMQSVHLPGKPQTLAVKRKADSEEERDDVSTLGSMLPAKASPVAESPKVMDEKSSLGEKAESVANVNANTPSSELVALTPAPSVPPPTLAMVSRQMGDSKPPQAIVKPQILTHIIEGFVIQEGAEPFPVGCSQLLKESEKPLQTGLPTGLTENQSGGPLGVDSPSAELDKKANLLKCEYCGKYAPAEQFRGSKRFCSMTCAKRYNVSCSHQFRLKRKKMKEFQEANYARVRRRGPRRSSSDIARAKIQGKCHRGQEDSSRGSDNSSYDEALSPTSPGPLSVRAGHGERDLGNPNTAPPTPELHGINPVFLSSNPSRWSVEEVYEFIASLQGCQEIAEEFRSQEIDGQALLLLKEEHLMSAMNIKLGPALKICAKINVLKET

SEQ ID NO: 146219 - protein, 172 aa, Artificial Sequence
  derived and/or modified sequence
METESEQNSNSTNGSSSSGGSSRPQIAQMSLYERQAVQALQALQRQPNAAQYFHQFMLQQQLSNAQLHSLAAVQQATIAASRQASSPNTSTTQQQTTTTQASINLATTSAAQLISRSQSVSSPSATTLTQSVLLGNTTSPPLNQSQAQMYLRPQLGNLLQVNRTLGRNVPLA

SEQ ID NO: 146220 - DNA, 519 bp, Artificial Sequence
  derived and/or modified sequence
atggaaacagaaagcgagcaaaatagcaatagtactaatggaagctctagcagcggcggttcctctcgacctcagattgcccagatgtccttatatgaacgccaggcggtgcaggccttgcaagccttgcaaagacaacccaacgccgcacagtacttccatcagttcatgttacagcaacagctgtccaacgctcagctgcatagcttagcagcggtccagcaggcaactatcgctgcctcgcgtcaagcgtcgtctcctaatacaagcacaacccagcaacagacgacgacaactcaagcctcaatcaatttagcaaccacatccgccgcacagctcatcagccgctcccagtcggtgtcctcaccatcagcaacaacgctcacacagagcgtgctattgggaaacactacgtctccgcctttgaaccagagccaggctcagatgtatctccgcccgcaacttggaaacctcctccaggtcaatcgtaccctgggaaggaatgtcccccttgcttag

SEQ ID NO: 146221 - DNA, 519 bp, Artificial Sequence
  derived and/or modified sequence
atggagacagaaagtgagcagaacagcaacagcaccaacggcagcagcagcagcggcggcagcagccggccccagatcgcccagatgagcctgtatgaaaggcaggccgtgcaggccctgcaggccctgcagaggcagcccaatgctgcccagtacttccaccagttcatgctgcagcagcagctgagcaatgcccagctgcacagcctggccgctgtgcagcaggccaccatcgccgccagccggcaggccagcagccccaacaccagcaccacccagcagcagaccaccaccacccaggccagcatcaacctggccaccaccagcgctgcccagctgatcagccgcagccagagcgtgagcagccccagcgccaccaccctgacccagagcgtgctgctgggcaacaccaccagcccccccctgaaccagagccaggcccagatgtacctgcggccccagctgggcaacctgctgcaggtgaacagaaccctgggcagaaatgtgcccctggcctag

SEQ ID NO: 146222 - DNA, 618 bp, Artificial Sequence
  derived and/or modified sequence
ctcctaatgggttagctgtttctgcagcattctttcccgccttcttggagttgaggtcttgagtcagacagagcaccagccttggggaccctggaccactatcatggagactgagagcgagcagaactccaattccaccaatgggagttctagctcagggggcagctctcggccccagatagctcaaatgtcactttatgaacgacaagcagtgcaggctctgcaagcactgcagcggcagcccaatgcagctcagtatttccaccagttcatgctccagcagcagctcagtaatgcccagctgcatagcctggctgccgtccagcaggccacaattgctgccagtcggcaggccagctccccaaacaccagcactacacagcagcagactaccaccacccaggcctcgatcaatctggccaccacatcggccgcccagctcatcagccgatcccagagtgtgagctctcccagtgctaccaccttgacccaatctgtgctactggggaacaccacctccccacccctcaaccagtctcaggcccagatgtatctacggccacagctgggaaacctattgcaggtaaaccgaaccctgggtcggaatgtgcctctagc

SEQ ID NO: 146223 - DNA, 519 bp, Artificial Sequence
  derived and/or modified sequence
atggagaccgagagcgagcagaacagcaacagcaccaacggcagctctagctccggtggttcatctcggccacaaatcgctcagatgagtctctacgaacggcaggcagtccaagccttgcaggccctgcagcgtcagccaaacgcagctcagtactttcaccaattcatgctccagcagcagttgtcaaacgctcaacttcatagcctggccgcagttcagcaggccactatagctgcatccaggcaggcttccagccccaacacgagcacaactcaacagcagacaaccaccacccaggcttccattaatctggccactacgtcagccgcgcagctgatttctcgtagccagagcgtctcaagcccatcagcgacaactcttactcagtctgtcctactgggcaacacaacaagtccaccactcaaccaatctcaggctcaaatgtacctgagaccgcaattaggcaacctgctgcaggttaacagaaccctcggaagaaatgtaccacttgcctag

SEQ ID NO: 146224 - DNA, 519 bp, Artificial Sequence
  derived and/or modified sequence
atggaaactgagtccgagcagaattctaattccacaaacggatccagttctagcggtggctcatcccgccctcagatcgctcaaatgagcctgtatgaacgtcaagcagtgcaggccttgcaggcgctgcagaggcaaccaaatgcagctcagtacttccatcagttcatgttgcagcagcagctaagtaacgcccaactgcactcgctcgcagcagtgcaacaagctactatagccgcaagtaggcaggcttcttcgccgaacaccagcaccacccagcagcaaacaaccaccactcaagcatcaatcaatttagcgaccacttcagccgctcagttgattagtaggagtcagtccgttagtagtccctccgcaacgactctgacacagagtgtcctgctggggaacactacctctcccccactgaatcaatctcaggcacagatgtacctgagacctcagctgggtaaccttctgcaggtgaacagaacactcggaaggaatgtgccactcgcctag

SEQ ID NO: 146225 - DNA, 519 bp, Artificial Sequence
  derived and/or modified sequence
atggagaccgagagcgagcagaacagcaacagcaccaacggcagcagcagcagcggcggcagcagcagaccccagatcgcccagatgagcctgtacgagagacaggccgtgcaggccctgcaggccctgcagagacagcccaacgccgcccagtacttccaccagttcatgctgcagcagcagctgagcaacgcccagctgcacagcctggccgccgtgcagcaggccaccatcgccgccagcagacaggccagcagccccaacaccagcaccacccagcagcagaccaccaccacccaggccagcatcaacctggccaccaccagcgccgcccagctgatcagcagaagccagagcgtgagcagccccagcgccaccaccctgacccagagcgtgctgctgggcaacaccaccagcccccccctgaaccagagccaggcccagatgtacctgagaccccagctgggcaacctgctgcaggtgaacagaaccctgggcagaaacgtgcccctggcctag

SEQ ID NO: 146226 - protein, 205 aa, Artificial Sequence
  derived and/or modified sequence
MEFLWAPLLGLCCSLAAADRHTVFWNSSNPKFRNEDYTIHVQLNDYVDIICPHYEDHSVADAAMEQYILYLVEHEEYQLCQPQSKDQVRWQCNRPSAKHGPEKLSEKFQRFTPFTLGKEFKEGHSYYYISKPIHQHEDRCLRLKVTVSGKITHSPQAHDNPQEKRLAADDPEVRVLHSIGHSAAPRLFPLAWTVLLLPLLLLQTP

SEQ ID NO: 146227 - DNA, 618 bp, Artificial Sequence
  derived and/or modified sequence
atggagttcctgtgggcccccctgctgggcctgtgctgcagcctggccgccgccgacagacacaccgtgttctggaacagcagcaaccccaagttcagaaacgaggactacaccatccacgtgcagctgaacgactacgtggacatcatctgcccccactacgaggaccacagcgtggccgacgccgccatggagcagtacatcctgtacctggtggagcacgaggagtaccagctgtgccagccccagagcaaggaccaggtgagatggcagtgcaacagacccagcgccaagcacggccccgagaagctgagcgagaagttccagagattcacccccttcaccctgggcaaggagttcaaggagggccacagctactactacatcagcaagcccatccaccagcacgaggacagatgcctgagactgaaggtgaccgtgagcggcaagatcacccacagcccccaggcccacgacaacccccaggagaagagactggccgccgacgaccccgaggtgagagtgctgcacagcatcggccacagcgccgcccccagactgttccccctggcctggaccgtgctgctgctgcccctgctgctgctgcagaccccctag

SEQ ID NO: 146228 - DNA, 1926 bp, Artificial Sequence
  derived and/or modified sequence
atgcgaggctcagaaaggtgcggggcatgtcaacaacctcgcaccctgcaaggtccgcgcgcggagcagcaaagccgtgtcccgcacccccgcgttcgcagactcgcacttgcgagttcttcccttctcccgcacgcgactgcgcccagggacgcaagcccaccaccgggacaggctcacaaagctccacgcagacccacaagtgagcgaacacacatctctgagcagatctgcgggggcagaggagcgcgcttcgctctttcctgcacccccagcctcctcgcctccccaccccgcccctcctccacctccccagcccccaagcccccaggcagccgcgcgccgggcggggcgagggcggggcggggtgtcgggcggcgccggcccaaaaggcggagtcgctaggcgaaggggccagatctgtgagcccagcgctgactgcgccgcggagaaagccagtgggaacccagacccataggagacccgcgtccccgctcggcctggccaggccccgcgctatggagttcctctgggcccctctcttgggtctgtgctgcagtctggccgctgctgatcgccacaccgtcttctggaacagttcaaatcccaagttccggaatgaggactacaccatacatgtgcagctgaatgactacgtggacatcatctgtccgcactatgaagatcactctgtggcagacgctgccatggagcagtacatactgtacctggtggagcatgaggagtaccagctgtgccagccccagtccaaggaccaagtccgctggcagtgcaaccggcccagtgccaagcatggcccggagaagctgtctgagaagttccagcgcttcacacctttcaccctgggcaaggagttcaaagaaggacacagctactactacatctccaaacccatccaccagcatgaagaccgctgcttgaggttgaaggtgactgtcagtggcaaaatcactcacagtcctcaggcccatgacaatccacaggagaagagacttgcagcagatgacccagaggtgcgggttctacatagcatcggtcacagtgctgccccacgcctcttcccacttgcctggactgtgctgctccttccacttctgctgctgcaaaccccgtgaaggtgtatgccacacctggccttaaagagggacaggctgaagagagggacaggcactccaaacctgtcttggggccactttcagagcccccagccctgggaaccactcccaccacaggcataagctatcacctagcagcctcaaaacgggtcagtattaaggttttcaaccggaaggaggccaaccagcccgacagtgccatccccaccttcacctcggagggatggagaaagaagtggagacagtcctttcccaccattcctgcctttaagccaaagaaacaagctgtgcaggcatggtcccttaaggcacagtgggagctgagctggaaggggccacgtggatgggcaaagcttgtcaaagatgccccctccaggagagagccaggatgcccagatgaactgactgaaggaaaagcaagaaacagtttcttgcttggaagccaggtacaggagaggcagcatgcttgggctgacccagcatctcccagcaagacctcatctgtggagctgccacagagaagtttgtagccaggtactgcattctctcccatcctggggcagcactccccagagctgtgccagcaggggggctgtgccaacctgttcttagagtgtagctgtaagggcagtgcccatgtgtacattctgcctagagtgtagcctaaagggcagggcccacgtgtatagtatctgtatataagttgctgtgtgtctgtcctgatttctacaactggagtttttttatacaatgttctttgtctcaaaataaagcaatgtgttttttcgga

SEQ ID NO: 146229 - DNA, 618 bp, Artificial Sequence
  derived and/or modified sequence
atggagtttctgtgggccccacttctggggttatgttgctctttagcagccgccgacaggcatactgtcttttggaactccagcaatccaaagttcagaaacgaagactacaccattcacgttcagctgaatgattacgtggacataatctgtccacattacgaggaccattcagtagccgatgccgccatggaacagtacatcctctacttggtcgagcacgaagagtaccagctgtgccagccgcagagtaaggatcaggtgcgatggcagtgtaatcgccctagcgccaagcacgggcccgaaaagctctctgagaagtttcagaggtttacccccttcacccttggcaaggaattcaaggagggacacagctactattacatttccaagcccatacatcagcatgaagaccgttgtctgaggttgaaagttaccgtgtccgggaaaattacacattctcctcaggcacatgataacccccaggagaagcggctggcagccgatgaccccgaggtacgggtgctgcacagtatcggtcattcagctgctccacggctgtttccactggcatggaccgtcctgctcctccctttgttattactgcaaactccctag

SEQ ID NO: 146230 - DNA, 618 bp, Artificial Sequence
  derived and/or modified sequence
atggagttcctgtgggcccccctgctgggcctgtgctgcagcctggccgctgctgacagacacacagtgttctggaacagcagcaaccccaagttcagaaatgaagactacaccatccacgtgcagctgaatgactatgtggacatcatctgcccccactatgaggaccacagcgtggctgatgctgccatggagcagtacatcctgtacctggtggagcacgaggagtaccagctgtgccagccccagagcaaggaccaggtgcgctggcagtgcaaccggcccagcgccaagcacggccctgagaagctgtctgagaagttccagcgcttcacccccttcaccctgggcaaggagttcaaggagggccacagctactactacatcagcaagcccatccaccagcatgaagatcgctgcctgcggctgaaggtgacagtgtctgggaagatcacccacagcccccaggcccatgacaacccccaggagaagaggctggccgcagatgatcctgaggtgcgggtgctgcacagcatcggccacagcgctgcccccaggctcttccccctggcctggacagtgctgctgctgcccctgctgctgctgcagaccccctag

SEQ ID NO: 146231 - DNA, 618 bp, Artificial Sequence
  derived and/or modified sequence
atggagttcctgtgggcccccctgctgggcctgtgctgcagcctggccgcagcggatcggcatacagtgttttggaactcctctaatccaaagttccgcaacgaggattataccattcatgttcagctgaatgactatgtcgatatcatctgtcctcattacgaggaccatagcgtcgcggatgccgccatggagcagtacattctgtatctcgtagagcacgaagagtatcagctgtgccagccccagtccaaagatcaggtgcggtggcaatgtaaccgtcctagcgcgaagcatggccctgagaagctttccgaaaaattccagcggtttactccctttaccctaggaaaagaattcaaagaggggcactcttattactatatcagtaaacctatccatcagcacgaggatagatgcctgcgactgaaagtcacagtctcgggaaaaattacacatagccctcaggcccacgataatccccaggagaagaggctcgccgccgacgatcctgaggttcgcgtgctccattctatcggacattccgctgcccctaggctgtttccattagcttggacagtgcttctgttgcccctgctgctgcttcagacaccgtag

SEQ ID NO: 146232 - DNA, 618 bp, Artificial Sequence
  derived and/or modified sequence
atggaattcctctgggcccctctcctgggcctgtgctgcagcctggccgcagcagaccgccacactgtgttctggaattctagcaatcccaagtttagaaatgaagactacaccatccacgtgcaattgaatgactacgtggatattatatgtccccattatgaagaccacagtgtggctgatgccgctatggagcaatacatcctgtacctcgtggaacatgaggaataccagttatgccaaccacagtcgaaagaccaggttcggtggcaatgcaatcggccaagtgctaagcatggtcctgaaaaattgtcagaaaagttccagagattcacgccctttacccttggtaaagagtttaaggagggccactcctactactatatctcgaagcccatacaccagcacgaagatcggtgcctacgcctgaaagtgaccgtatccggaaaaatcacccacagtcctcaggcccatgacaatccccaagaaaagcgattggccgcagatgacccagaagtcagagttcttcattctataggccacagcgccgcacctcggttatttccactagcgtggaccgtcctcctcctgccgcttttgctcttacagactccgtag

SEQ ID NO: 146233 - protein, 346 aa, Artificial Sequence
  derived and/or modified sequence
MARPGQRWLGKWLVAMVVWALCRLATPLAKNLEPVSWSSLNPKFLSGKGLVIYPKIGDKLDIICPRAEAGRPYEYYKLYLVRPEQAAACSTVLDPNVLVTCNRPEQEIRFTIKFQEFSPNYMGLEFKKHHDYYITSTSNGSLEGLENREGGVCRTRTMKIIMKVGQDPNAVTPEQLTTSRPSKEADNTVKMATQAPGSRGSLGDSDGKHETVNQEEKSGPGASGGSSGDPDGFFNSKVALFAAVGAGCVIFLLIIIFLTVLLLKLRKRHRKHTQQRAAALSLSTLASPKGGSGTAGTEPSDIIIPLRTTENNYCPHYEKVSGDYGHPVYIVQEMPPQSPANIYYKV

SEQ ID NO: 146234 - DNA, 1041 bp, Artificial Sequence
  derived and/or modified sequence
atggctcgacctggacagagatggctggggaagtggttggtggcaatggtggtgtgggctttgtgccggttggctaccccattggcgaaaaatctcgagcccgtgtcttggagctctttgaacccgaagtttctgtccggcaaagggctggttatttaccctaaaataggtgataaattggatataatctgtccccgggccgaagccgggcgtccatatgaatattataagctgtacctggtgcggcccgagcaggccgctgcctgctctacagtgctggaccctaatgttctggttacgtgcaataggcctgaacaggaaatcaggtttacgattaaatttcaggaatttagccccaattacatggggctcgagtttaagaaacatcacgattattacataacgtcgacctccaatggatccctcgaaggcctcgaaaatagggagggtggtgtatgcaggactagaactatgaagattatcatgaaagtagggcaggacccaaacgctgtgacacccgagcagctgacaactagcaggccatcaaaggaggccgataacacagtgaaaatggctacacaggcccctggatctcgtggatccttaggcgattccgacggcaaacatgaaactgtcaatcaggaagaaaaatccgggccaggcgcgtcaggcgggagctctggtgatccggatggtttcttcaatagcaaagtggcacttttcgcagcggtgggggctggttgtgttatatttctcctgattatcattttcttgacagtcctgctcctgaaacttcggaaaagacatagaaagcatacacagcagcgcgccgccgctttgtctttgagcaccttggcgtctcccaaagggggatctggaaccgccggcaccgagccgagcgacatcattatccctctaagaaccaccgagaacaactattgtccgcactacgaaaaggtcagcggcgattacgggcacccggtttacatcgtgcaggaaatgcccccacagagccccgcgaacatttattacaaggtatag

SEQ ID NO: 146235 - DNA, 1041 bp, Artificial Sequence
  derived and/or modified sequence
atggcccggcccggccagcgctggctgggcaagtggctggtggccatggtggtgtgggccctgtgccgcctggccacccccctggccaagaacctggagcctgtgtcctggagcagcctgaaccccaagttcctgagcggcaagggcctggtgatctaccccaagatcggggacaagctggacatcatctgccccagggctgaggccggccggccctatgagtactacaagctgtacctggtgcggcctgagcaggccgccgcctgcagcacagtgctggaccccaacgtgctggtgacctgcaacagacctgagcaggagatccgcttcaccatcaagttccaggagttcagccccaactacatgggcctggagttcaagaagcaccacgactactacatcaccagcaccagcaatggcagcctggagggcctggagaaccgggagggcggcgtgtgcaggaccaggaccatgaagatcatcatgaaggtgggccaggaccccaatgctgtgaccccagagcagctgaccaccagccggcccagcaaggaggccgacaacacagtgaagatggccacccaggcccctggcagccggggcagcctgggggacagtgatggcaagcatgaaacagtgaaccaggaggagaagagcggccctggggccagcggcggcagcagcggggaccctgatggcttcttcaacagcaaggtggccctgtttgctgctgtgggcgccggctgcgtcatcttcctgctgatcatcatcttcctgactgtgctgctgctgaagctgaggaagaggcacaggaagcacacccagcagagagctgctgccctgagcctgagcaccctggccagccccaagggcggcagcggcacagctggaacagagcccagcgacatcatcatccccctgcggaccacagagaacaactactgcccccactatgagaaggtgtctggggactatggccaccctgtgtacatcgtgcaggagatgccaccccagagccctgccaacatctactacaaggtgtag

SEQ ID NO: 146236 - DNA, 1041 bp, Artificial Sequence
  derived and/or modified sequence
atggcccggcccggccagcggtggctgggcaagtggctggtggccatggttgtttgggcactatgccgtctcgctacgccactggcgaaaaatttggagccagtgtcatggtcctcattgaacccaaagtttctgagcggaaaggggctcgtgatctatccaaaaattggcgataagctagacattatatgcccacgggccgaagccggccgtccgtacgagtactataagctttacttggtgagacccgagcaagccgcagcatgttctaccgtgctcgatcccaacgtgctcgtgacatgcaataggcctgaacaggagattcgttttacaattaaattccaggaattcagtccaaactatatgggtttagagttcaaaaagcaccatgattactatatcacctctacctccaacggaagcctggaggggctagagaaccgagagggtggagtgtgccgcactcgtacaatgaaaataattatgaaggtgggccaggatccaaacgcagtcacccctgagcagcttacgacatcccgccccagcaaggaggcagataataccgtcaaaatggctactcaggcaccaggttcaagaggtagtttgggagactccgatggcaaacatgagaccgtcaaccaggaggagaaatctggtcccggagcatccggcgggagctccggagatcctgatggcttttttaactcaaaggtagccctctttgcggccgtcggagcggggtgtgtcattttcctcctaatcataatatttctgaccgtgctgttattgaaactgcggaagaggcaccgtaagcatacccagcagagagctgctgcattgagtttgagcacgttggcatcacctaagggcggcagcgggaccgccgggaccgagccttccgatattataatccctttgagaaccaccgaaaacaattactgcccccattacgagaaagtgagcggcgactatggacaccccgtgtatattgtccaggaaatgcccccacagagccctgccaacatctattacaaggtttag

SEQ ID NO: 146237 - DNA, 1041 bp, Artificial Sequence
  derived and/or modified sequence
atggcaaggcccggacagaggtggctgggaaagtggctagtggcgatggtagtttgggcactgtgtcgattggctacgcctttagctaaaaatctcgagcccgtaagctggagctcattgaatcctaaattcttgtctggaaaagggctggttatctacccaaagataggggataaattggacattatctgcccacgggcagaagccggacggccttacgaatattacaagttgtatcttgtgaggcctgagcaggctgccgcttgctccaccgttctggaccccaacgttctagtaacatgcaaccgacctgaacaggaaatccgattcactattaaattccaggaattttctcccaactatatgggattggaatttaagaagcatcacgactactacattaccagcactagcaatgggtcactggaaggcctggagaacagagagggaggagtatgccgtaccaggaccatgaaaataataatgaaggttggtcaggaccctaacgcggtcactccagagcagctgaccactagtagacctagcaaagaggccgataatacagtgaaaatggccacgcaggcacccggttccaggggatccctgggcgacagcgacggaaagcacgagaccgtaaatcaggaagagaaaagcgggccaggcgcttcaggcggttcatccggggaccccgatggtttttttaactctaaagttgcccttttcgcggctgtaggcgctggctgcgttattttcttgctgataataatctttctgacagtgcttctgttaaagcttcgcaaacggcaccgcaagcacactcagcagcgcgctgccgctctgagtctgagtacactcgcctccccaaaaggagggagtggcactgccggaacagaaccctccgatattatcatccctttgcggacgactgagaataactattgtcctcactatgaaaaggtgtctggggactacggccatccagtatatatcgtccaggaaatgccccctcagagcccagctaatatctattacaaagtgtag

SEQ ID NO: 146238 - DNA, 1041 bp, Artificial Sequence
  derived and/or modified sequence
atggccagacccggccagagatggctgggcaagtggctggtggccatggtggtgtgggccctgtgcagactggccacccccctggccaagaacctggagcccgtgagctggagcagcctgaaccccaagttcctgagcggcaagggcctggtgatctaccccaagatcggcgacaagctggacatcatctgccccagagccgaggccggcagaccctacgagtactacaagctgtacctggtgagacccgagcaggccgccgcctgcagcaccgtgctggaccccaacgtgctggtgacctgcaacagacccgagcaggagatcagattcaccatcaagttccaggagttcagccccaactacatgggcctggagttcaagaagcaccacgactactacatcaccagcaccagcaacggcagcctggagggcctggagaacagagagggcggcgtgtgcagaaccagaaccatgaagatcatcatgaaggtgggccaggaccccaacgccgtgacccccgagcagctgaccaccagcagacccagcaaggaggccgacaacaccgtgaagatggccacccaggcccccggcagcagaggcagcctgggcgacagcgacggcaagcacgagaccgtgaaccaggaggagaagagcggccccggcgccagcggcggcagcagcggcgaccccgacggcttcttcaacagcaaggtggccctgttcgccgccgtgggcgccggctgcgtgatcttcctgctgatcatcatcttcctgaccgtgctgctgctgaagctgagaaagagacacagaaagcacacccagcagagagccgccgccctgagcctgagcaccctggccagccccaagggcggcagcggcaccgccggcaccgagcccagcgacatcatcatccccctgagaaccaccgagaacaactactgcccccactacgagaaggtgagcggcgactacggccaccccgtgtacatcgtgcaggagatgcccccccagagccccgccaacatctactacaaggtgtag

SEQ ID NO: 146239 - DNA, 3314 bp, Artificial Sequence
  derived and/or modified sequence
gcacagcggcagcggagggagtctatgcgagctggacagcagtgggaggtttgtgaggctcgcactggccgcagaccctcgggctcgatcgcccgggagccaggactcggcgacgcgaggctgccgggctacccggccgaggcttcgggggcgcaaactaatgggactggctcgctcggcagcatctccccgctcttctaagtacactgagcagggcccgcgctgaagtagaagctgtccgggggcgcgtagcccggagtcccagtgtggcccggaggaacggagcccgtgccagggcggcccagtcgggagcccggggaccgagcttgtgctgtggggaaacccccacttcttccaagggacagcgatcccgggacggtcgaggcgtcggggcggtcaccgagacctctgcgggaagaccccgtcggggagagggcgcgcagccccgaagcgtctcgggaagtcgagcggaatcgggcgggatcacccgggggcgcagagcccccgtcgcgcctcgtgcggcagcggagagcccaggagaacgagccctcgggggccgaagcccatgcccgggttgggggcggctgcccagtgagtcctcctggccggccgggcggagaagagcgacaccgaagccggcgggaggggagcacttcaaggccggcggctgcggaggatgggcgcctgagcggctccgagcgcagcgcggcagaggaaggcgaggcgagctttggtgaggaggcgccaagggatcccgaagtgcagtctgcccccgggaagatggctcggcctgggcagcgttggctcggcaagtggcttgtggcgatggtcgtgtgggcgctgtgccggctcgccacaccgctggccaagaacctggagcccgtatcctggagctccctcaaccccaagttcctgagtgggaagggcttggtgatctatccgaaaattggagacaagctggacatcatctgcccccgagcagaagcagggcggccctatgagtactacaagctgtacctggtgcggcctgagcaggcagctgcctgtagcacagttctcgaccccaacgtgttggtcacctgcaataggccagagcaggaaatacgctttaccatcaagttccaggagttcagccccaactacatgggcctggagttcaagaagcaccatgattactacattacctcaacatccaatggaagcctggaggggctggaaaaccgggagggcggtgtgtgccgcacacgcaccatgaagatcatcatgaaggttgggcaagatcccaatgctgtgacgcctgagcagctgactaccagcaggcccagcaaggaggcagacaacactgtcaagatggccacacaggcccctggtagtcggggctccctgggtgactctgatggcaagcatgagactgtgaaccaggaagagaagagtggcccaggtgcaagtgggggcagcagcggggaccctgatggcttcttcaactccaaggtggcattgttcgcggctgtcggtgccggttgcgtcatcttcctgctcatcatcatcttcctgacggtcctactactgaagctacgcaagcggcaccgcaagcacacacagcagcgggcggctgccctctcgctcagtaccctggccagtcccaaggggggcagtggcacagcgggcaccgagcccagcgacatcatcattcccttacggactacagagaacaactactgcccccactatgagaaggtgagtggggactacgggcaccctgtctacatcgtccaagagatgccgccccagagcccggcgaacatctactacaaggtctgagtgcccggcacggcctcaggcccccgagggacagtcggcctggaccggacctctcctttcgcccccacaccccctccccttgccagctgtgcccacctttgtatttagttttgtagtttcttggcttttataatccccctttttccctgccccctgggcttcggaggggggtgcttgtgcccctaacccccatgctcttgtgccttccccctctggccaggcctctgggctccgtgggggcgccccttcttggaaggcagggctggacactgatggacagcaggcagggagacagtcccctggccctgcccctccctcgccccccttgccaccttcccaggactgcttgtccgctatcatcactgtttttaatgcttttgtgttcattttttagctgtcaactcattttcatctgttttttgaagaaaaatggaaaaatgtaaaaggcagcccctccccaggctttgtgagcctggcccaagccagtacaagagggcctggggcacgatgtggtcagccaggaagcataggatgccatttcttttatagattccttggtatttctggtggggtaaggggcaggccagggctgttcacgcccatgagggaagaggaaagtgccactgggcaaggtgtcccaccctcccctcctgaccctcctacgaggcttatcctggcaatggggtagtcactgccacccttccacacacacacacacacacacacacacaaaaaaaaatcccttccttgtgggattcttgggcatctcctgcctccctcactctcacggtaattaatgtcttaattggctgttgcctggggaacaggagagctgctgcaggcagatgacctcatggggggtggagggaggtgaggtgcccaggtggctatttgccctgcagagctgggagtttcacccccaccccccaccctgttctctccttacctttggcatcctttggcctggtggggaaacagaggcccagggtggagacctaagcgggtataagaccaggtggcctgctccttttctgggccctagcacaggtgggtaacccccacccaacccagctcctgctgctgtcccagtcttgggctggggcctggaaagaggaagaggctgcctggggctgggccagcccgctgtgcactttgaccccagttccttgccagcacggctgctaacagactgccacttgagtgcgccttgcaggcactcccagagcagccatggaaggagctggccctcacaccatccacctccacactgcctcctggccagctgcccaccccagtgccaggtgggagagggagcagaacagccagccccttccaggtggcagtcggaagggtttttgtttttgtttctgttgccatttgtgtaaatactagtctttttggaaaaaaaataatgtaaagatgttttgtataaactctgaattattttcttgttgcttttttcttagaaaaaaatgagaactaaaaaaaaaaaa

SEQ ID NO: 146240 - protein, 387 aa, Artificial Sequence
  derived and/or modified sequence
MTGKLAEKLPVTMSSLLNQLPDNLYPEEIPSALNLFSGSSDSVVHYNQMATENVMDIGLTNEKPNPELSYSGSFQPAPGNKTVTYLGKFAFDSPSNWCQDNIISLMSAGILGVPPASGALSTQTSTASMVQPPQGDVEAMYPALPPYSNCGDLYSEPVSFHDPQGNPGLAYSPQDYQSAKPALDSNLFPMIPDYNLYHHPNDMGSIPEHKPFQGMDPIRVNPPPITPLETIKAFKDKQIHPGFGSLPQPPLTLKPIRPRKYPNRPSKTPLHERPHACPAEGCDRRFSRSDELTRHLRIHTGHKPFQCRICMRSFSRSDHLTTHIRTHTGEKPFACEFCGRKFARSDERKRHAKIHLKQKEKKAEKGGAPSASSAPPVSLAPVVTTCA

SEQ ID NO: 146241 - protein, 228 aa, Artificial Sequence
  derived and/or modified sequence
MDIGLTNEKPNPELSYSGSFQPAPGNKTVTMIPDYNLYHHPNDMGSIPEHKPFQGMDPIRVNPPPITPLETIKAFKDKQIHPGFGSLPQPPLTLKPIRPRKYPNRPSKTPLHERPHACPAEGCDRRFSRSDELTRHLRIHTGHKPFQCRICMRSFSRSDHLTTHIRTHTGEKPFACEFCGRKFARSDERKRHAKIHLKQKEKKAEKGGAPSASSAPPVSLAPVVTTCA

SEQ ID NO: 146242 - DNA, 4342 bp, Artificial Sequence
  derived and/or modified sequence
gatcaatactgaggccgcgtccgacccccttgagccgagatccccccccagcccagcccccaccccaccccccgcacacgccccaccccccccacgacccagcctcataccgcaccagctgaggcacccaagaggattaccccctggggccctctcccgccccccaaaaaagagaagatcccctctcctggcccatcccttcccttcttccctcccccctccccccgaactttccctctcgcatgcttttcccctgcaccacggatcgcctctcggatgccgcttgcctggaagctgcgttaggagcgagcggcggcggtggcggcggtggcggcggcggcggcagctcgggagtgctatgaccggcaaactcgccgagaagctgccggtgaccatgagcagtttgctaaaccaactgcctgacaatctgtaccccgaggagatccccagcgcgctcaacctcttctccggcagcagcgactcggtagtccattacaatcagatggctacagagaatgtaatggacatcggtctgaccaacgagaagcccaacccggaactctcttactccggctccttccagccagcccccggcaacaagaccgtgacctacttgggaaagttcgccttcgactccccttccaactggtgccaggacaacatcattagcctcatgagcgccggcatcttgggggtgcccccggcttcaggggcgctcagcacgcagacgtccacggccagcatggtgcagccaccgcagggtgacgtggaggccatgtatcccgcgctacccccctactccaactgcggcgacctctactcagagcccgtgtctttccacgacccccagggcaatcccgggctcgcctattccccccaggattaccaatcggccaagccggcgttggacagcaatctcttccccatgattcctgactacaacctctaccaccaccccaacgacatgggctccattccggagcacaagcccttccagggcatggaccccatccgggtcaacccgccccctattacccctctggagaccatcaaggcattcaaagacaagcagatccacccgggctttggcagcctgccccagccgccgctcaccctcaagcccatccggccccgcaagtaccccaaccggcctagcaagacaccgctccacgaacggccccacgcgtgcccggccgagggctgcgaccgccgtttcagccgttcggacgagctgacccggcacctgcgcatccacacgggccacaagcccttccagtgccggatctgcatgcggagcttcagccgcagcgaccacctcaccactcacatccgcactcatacgggcgagaagccctttgcctgcgagttctgcgggcgcaagtttgcgcgcagcgacgagcgcaagcgccacgccaagatccacctcaagcaaaaggagaagaaggcggagaagggcggtgcaccctctgcatcctcggcgccccccgtgtcgctggcccccgtggtcaccacctgcgcctgaggatcgggcccccagatccccacttttcccctccagtgcctcccggctgctagcctgaaagcagcgggaaagccagccacggaggcgtaggggccgcgccctggcctctccatggacgtgcggccccttgcttccccttcgatgcccccggttcccaacctttcacgccggccagcggtcaggggccagggctggaggcgccttcccctcgcggtcccccacttagccaaggcgtgggggcggaaaggtggcgtctagcccgctttgttcagttcggatcgccttgatccaggggccgccgggccgcgccaaggacctgcaagggactgaaggcggagcccatccaaccctcgcccgacccaaacacctcattgtttcccccacgtctccctctataccccctcgaagactcgagagggggagggggtaaggagcgcaccaaagcgcagagcttgctgcccgccgcacgcacgcgcgcctgcgtgcggggatgcgcgcgagtgtgtgcgtgctcgcgtgtgtgtgtatgtgtgtgtgtgagtgtgtgtgtgtgcgcgcgcgcaagcgtgtgtgtttaagactcttgagctgaactgggctgtgtttaccccaaactcttccccacctcgggtccccaagccgctgggagatgtcccatgctgggggtccgcacgtggctggaggaggtggtcttccatccgctctgaaatcatgtttcttagagaaatgcctcggatgccgccgacgcggtgctgctgccgccgcttcgggtttggcccctcagaacccctccttttctgagcgcttccctcttaggcctcagggcagtttgatctgtggggagaaagagcagccatcgctgagcctgccttttaaaatatatgtgtatttccttagccccactctaagaaatctatgttcctgagtttgccccctgccctcccactccttccccttctcccctctaaaccttctcccatctctttcaaaatcttttcccagaaaggcaggcttcaaccagccactccagctttgtgtcttctctcaattacatagcaatttctccttcccaccatcatggggaagctggctctgcttttgccctttgtcatcaccaacacaacagatagaatttaaatataagtatatggtgtgcgtgtgtatgtatgtgtatgtatatgcatgcatgtgtataaagatgcacatgcgtacatatacataacatacacacaatatgtattcctagcaaaataaaatctctaaggtacttggttatccagtgcagtgcaccggaataaagagaatttgtaggcgtatacagctttaaatgatttattttttatgaaaatgttaactgatgagattatatctacatacgtgtgttatgtgtgtggatatagatgcacacatatctgtacatatacatgtgagtgtacatatatacacatatacacatctatgtatggatatgtgtgtatacacatatacacatctctgtccaaaatttcctcaaagatatggggattttttcatgaatccatgtggatgaatgaggtgtctcctttccatacccagtctcaccttctccccaccctacctcacctcttctcaggcacccctcttccccagctgtcctgccagcccttctcgtacagggtggctcctttgaagtggagtaatagggaaggttgctctctgccacagcttgcagcatggtcttgactgaatgtactgttcctgttagcgttacttctcctgtggtcagtaagttgcccagagagaaggaacaaaggtctggagtttacagaatgtctgtttttaaagtcactttatgcgttttccacttttttcttttttaagaaaaagaagtaccatttttgttttgttttgttttgatttttggtggtggataaataatactaaaaggactctagtggaaaggggggatatcgaagagcagggggttgtgaatttccaggtacttggactttttgtagaaggagagagaagaagatgaagtttgccaggagggcccatattttttcagctgaagggtaaaatctttctttgcagagacagtattttgctgaatactttttataatgtgatgattattaaaaaagcaaaaattttggtcacttccaagctagaaggaggaatcagataccctttaatattttttcctcgctccttctggtatatgcatgtcactgcatgataattgagttttcctttgttttaataaaactgttctcagacattaagctaaactaagagaaaaataactttgttgccaaaaggttgtgctatccagattttttatatgtctgcatgtttaaaaaaaaaaagcaacaaaagaaaatgcactctaacttatgtgaactgagagaaaaaaatcaggttttaaacaggaaaacctatggggaatgatattttttgaaagacttttgtataaagttgagtacttagaaaaaagacaaaccagatgtaatatattttgtggatgtttttatttcttggatttatagtaccttatactaaggttaaaaaaatatgcttgatattgtgaaaaggtgaaattcttcaccaacatttcatttgctcctttgtcatattgtaatgccaatataatatagttaatgaaaacagcatttttaaaaaccgaaatattgaaatggtgtaatgttgtaccatttgcactgtgagcaaatgctaatacagtaaatatattgtgtttgctgacaatcagccggcctataaatctccttattttatttcttgtttttatagcataaagctttagtttggcctgaaaaaaaa

SEQ ID NO: 146243 - DNA, 1164 bp, Artificial Sequence
  derived and/or modified sequence
atgaccggcaagctggccgagaagctgcccgtgaccatgagcagcctgctgaaccagctgcccgacaacctgtaccccgaggagatccccagcgccctgaacctgttcagcggcagcagcgacagcgtggtgcactacaaccagatggccaccgagaacgtgatggacatcggcctgaccaacgagaagcccaaccccgagctgagctacagcggcagcttccagcccgcccccggcaacaagaccgtgacctacctgggcaagttcgccttcgacagccccagcaactggtgccaggacaacatcatcagcctgatgagcgccggcatcctgggcgtgccccccgccagcggcgccctgagcacccagaccagcaccgccagcatggtgcagcccccccagggcgacgtggaggccatgtaccccgccctgcccccctacagcaactgcggcgacctgtacagcgagcccgtgagcttccacgacccccagggcaaccccggcctggcctacagcccccaggactaccagagcgccaagcccgccctggacagcaacctgttccccatgatccccgactacaacctgtaccaccaccccaacgacatgggcagcatccccgagcacaagcccttccagggcatggaccccatcagagtgaaccccccccccatcacccccctggagaccatcaaggccttcaaggacaagcagatccaccccggcttcggcagcctgccccagccccccctgaccctgaagcccatcagacccagaaagtaccccaacagacccagcaagacccccctgcacgagagaccccacgcctgccccgccgagggctgcgacagaagattcagcagaagcgacgagctgaccagacacctgagaatccacaccggccacaagcccttccagtgcagaatctgcatgagaagcttcagcagaagcgaccacctgaccacccacatcagaacccacaccggcgagaagcccttcgcctgcgagttctgcggcagaaagttcgccagaagcgacgagagaaagagacacgccaagatccacctgaagcagaaggagaagaaggccgagaagggcggcgcccccagcgccagcagcgccccccccgtgagcctggcccccgtggtgaccacctgcgcctag

SEQ ID NO: 146244 - DNA, 4336 bp, Artificial Sequence
  derived and/or modified sequence
gatcaatactgaggccgcgtccgacccccttgagccgagatccccccccagcccagcccccaccccaccccccgcacacgccccaccccccccacgacccagcctcataccgcaccagctgaggcacccaagaggattaccccctggggccctctcccgccccccaaaaaagagaagatcccctctcctggcccatcccttcccttcttccctcccccctccccccgaactttccctctcgcatgcttttcccctgcaccacggatcgcctctcggatgccgcttgcctggaagctgcgttaggagcgagcggcggcggtggcggcggtggcggcggcggcggcagctcgggagtgctatgaccggcaaactcgccgagaagctgccggtgaccatgagcagtttgctaaaccaactgcctgacaatctgtaccccgaggagatccccagcgcgctcaacctcttctccggcagcagcgactcggtagtccattacaatcagatggctacagagaatgtaatggacatcggtctgaccaacgagaagcccaacccggaactctcttactccggctccttccagccagcccccggcaacaagaccgtgacctacttgggaaagttcgccttcgactccccttccaactggtgccaggacaacatcattagcctcatgagcgccggcatcttgggggtgcccccggcttcaggggcgctcagcacgcagacgtccacggccagcatggtgcagccaccgcagggtgacgtggaggccatgtatcccgcgctacccccctactccaactgcggcgacctctactcagagcccgtgtctttccacgacccccagggcaatcccgggctcgcctattccccccaggattaccaatcggccaagccggcgttggacagcaatctcttccccatgattcctgactacaacctctaccaccaccccaacgacatgggctccattccggagcacaagcccttccagggcatggaccccatccgggtcaacccgccccctattacccctctggagaccatcaaggcattcaaagacaagcagatccacccgggctttggcagcctgccccagccgccgctcaccctcaagcccatccggccccgcaagtaccccaaccggcctagcaagacaccgctccacgaacggccccacgcgtgcccggccgagggctgcgaccgccgtttcagccgttcggacgagctgacccggcacctgcgcatccacacgggccacaagcccttccagtgccggatctgcatgcggagcttcagccgcagcgaccacctcaccactcacatccgcactcatacgggcgagaagccctttgcctgcgagttctgcgggcgcaagtttgcgcgcagcgacgagcgcaagcgccacgccaagatccacctcaagcaaaaggagaagaaggcggagaagggcggtgcaccctctgcatcctcggcgccccccgtgtcgctggcccccgtggtcaccacctgcgcctgaggatcgggcccccagatccccacttttcccctccagtgcctcccggctgctagcctgaaagcagcgggaaagccagccacggaggcgtaggggccgcgccctggcctctccatggacgtgcggccccttgcttccccttcgatgcccccggttcccaacctttcacgccggccagcggtcaggggccagggctggaggcgccttcccctcgcggtcccccacttagccaaggcgtgggggcggaaaggtggcgtctagcccgctttgttcagttcggatcgccttgatccaggggccgccgggccgcgccaaggacctgcaagggactgaaggcggagcccatccaaccctcgcccgacccaaacacctcattgtttcccccacgtctccctctataccccctcgaagactcgagagggggagggggtaaggagcgcaccaaagcgcagagcttgctgcccgccgcacgcacgcgcgcctgcgtgcggggatgcgcgcgagtgtgtgcgtgctcgcgtgtgtgtgtatgtgtgtgtgtgagtgtgtgtgtgtgcgcgcgcgcaagcgtgtgtgtttaagactcttgagctgaactgggctgtgtttaccccaaactcttccccacctcgggtccccaagccgctgggagatgtcccatgctgggggtccgcacgtggctggaggaggtggtcttccatccgctctgaaatcatgtttcttagagaaatgcctcggatgccgccgacgcggtgctgctgccgccgcttcgggtttggcccctcagaacccctccttttctgagcgcttccctcttaggcctcagggcagtttgatctgtggggagaaagagcagccatcgctgagcctgccttttaaaatatatgtgtatttccttagccccactctaagaaatctatgttcctgagtttgccccctgccctcccactccttccccttctcccctctaaaccttctcccatctctttcaaaatcttttcccagaaaggcaggcttcaaccagccactccagctttgtgtcttctctcaattacatagcaatttctccttcccaccatcatggggaagctggctctgcttttgccctttgtcatcaccaacacaacagatagaatttaaatataagtatatggtgtgcgtgtgtatgtatgtgtatgtatatgcatgcatgtgtataaagatgcacatgcgtacatatacataacatacacacaatatgtattcctagcaaaataaaatctctaaggtacttggttatccagtgcagtgcaccggaataaagagaatttgtaggcgtatacagctttaaatgatttattttttatgaaaatgttaactgatgagattatatctacatacgtgtgttatgtgtgtggatatagatgcacacatatctgtacatatacatgtgagtgtacatatatacacatatacacatctatgtatggatatgtgtgtatacacatatacacatctctgtccaaaatttcctcaaagatatggggattttttcatgaatccatgtggatgaatgaggtgtctcctttccatacccagtctcaccttctccccaccctacctcacctcttctcaggcacccctcttccccagctgtcctgccagcccttctcgtacagggtggctcctttgaagtggagtaatagggaaggttgctctctgccacagcttgcagcatggtcttgactgaatgtactgttcctgttagcgttacttctcctgtggtcagtaagttgcccagagagaaggaacaaaggtctggagtttacagaatgtctgtttttaaagtcactttatgcgttttccacttttttcttttttaagaaaaagaagtaccatttttgttttgttttgttttgatttttggtggtggataaataatactaaaaggactctagtggaaaggggggatatcgaagagcagggggttgtgaatttccaggtacttggactttttgtagaaggagagagaagaagatgaagtttgccaggagggcccatattttttcagctgaagggtaaaatctttctttgcagagacagtattttgctgaatactttttataatgtgatgattattaaaaaagcaaaaattttggtcacttccaagctagaaggaggaatcagataccctttaatattttttcctcgctccttctggtatatgcatgtcactgcatgataattgagttttcctttgttttaataaaactgttctcagacattaagctaaactaagagaaaaataactttgttgccaaaaggttgtgctatccagattttttatatgtctgcatgtttaaaaaaaaaaagcaacaaaagaaaatgcactctaacttatgtgaactgagagaaaaaaatcaggttttaaacaggaaaacctatggggaatgatattttttgaaagacttttgtataaagttgagtacttagaaaaaagacaaaccagatgtaatatattttgtggatgtttttatttcttggatttatagtaccttatactaaggttaaaaaaatatgcttgatattgtgaaaaggtgaaattcttcaccaacatttcatttgctcctttgtcatattgtaatgccaatataatatagttaatgaaaacagcatttttaaaaaccgaaatattgaaatggtgtaatgttgtaccatttgcactgtgagcaaatgctaatacagtaaatatattgtgtttgctgacaatcagccggcctataaatctccttattttatttcttgtttttatagcataaagctttagtttggcctgtt

SEQ ID NO: 146245 - DNA, 1164 bp, Artificial Sequence
  derived and/or modified sequence
atgacagggaaactggcagagaagttgcctgtgacgatgtcctccctgttgaaccagctcccggacaatctctatcctgaagaaattccatctgccctgaatttgttcagtggcagctccgatagcgttgtgcattataatcagatggccacggaaaatgtgatggatatcgggttgacgaacgaaaaacccaaccccgagctgtcatattctgggagcttccaacccgcgccaggcaacaagaccgtcacttatcttggaaagttcgccttcgatagcccttctaactggtgtcaagacaatattatatcactgatgtcggcggggatactaggagtgcctcccgcctccggagccctcagcacccagacatcaaccgcgtcgatggtgcagcctccccagggcgatgtagaggcgatgtaccctgctctgcccccttatagtaactgcggcgatttgtactcggagcccgtgagcttccacgatccgcagggaaatcctgggcttgcatatagtccacaggactaccagtcggccaagccagcactcgacagtaacctgttccccatgattcctgactacaatctgtaccatcatcctaacgatatggggtccatccccgaacacaaaccttttcagggcatggatcccatccgggtgaatccacctcctataacccctttggaaacaatcaaggccttcaaggacaagcagatccatccagggttcggaagcctgccccagccccctctcacactgaagcccatccgtccgcggaaatatccaaatcggccatccaaaactccattacatgagcgaccccacgcttgtccggcagaggggtgcgatcgtcggttttcgcgcagcgatgagcttacaaggcatctccgtattcatactggacataagcccttccagtgtcggatttgtatgcgatccttctcccggagtgaccatctgacaacacatattcgcacccatactggcgagaaacctttcgcttgcgagttttgtgggcgcaaattcgctagaagcgatgagcggaaaaggcatgcaaaaatccacctgaagcagaaggaaaaaaaggctgagaagggcggcgccccctctgcttcctctgcaccacccgtgtccctggcaccggtagtgacaacatgcgcgtag

SEQ ID NO: 146246 - DNA, 1164 bp, Artificial Sequence
  derived and/or modified sequence
atgaccgggaagctggccgagaagctgcctgtgaccatgagcagcctgctgaaccagctgcctgacaacctgtacccagaggagatccccagcgccctgaacctcttcagcggcagcagtgacagcgtggtgcactacaaccagatggccacagaaaatgtgatggacatcggcctgaccaatgagaagcccaaccctgagctgagctacagcggcagcttccagcctgcccctggcaacaagacagtgacctacctgggcaagtttgcctttgacagccccagcaactggtgccaggacaacatcatcagcctgatgtctgctggcatcctgggcgtgcccccagccagcggggccctgagcacccagaccagcacagcctccatggtgcagcccccccagggagatgtggaggccatgtacccagccctgcccccctacagcaactgtggggacctgtacagcgagcctgtgtccttccatgacccccagggcaaccctggcctggcctacagcccccaggactaccagagcgccaagccagccctggacagcaacctcttccccatgatcccagactacaacctgtaccaccaccccaatgacatgggcagcatccctgagcacaagcccttccagggcatggaccccatccgggtgaaccccccacccatcacccccctggagaccatcaaggccttcaaggacaagcagatccaccctggcttcggcagcctgccccagccccccctgaccctgaagcccatccggcccaggaagtaccccaaccggcccagcaagacccccctgcacgagcggccccacgcctgcccagctgagggctgtgaccggcgcttcagcagaagtgatgagctgaccaggcacctgcgcatccacacaggccacaagcccttccagtgccgcatctgcatgaggagcttcagcagaagtgaccacctgaccacccacatccgcacccacactggagagaagccctttgcctgtgagttctgtggcaggaagtttgcccggagtgatgagaggaagagacatgccaagatccacctgaagcagaaggagaagaaggccgagaagggcggggcccccagcgccagcagcgcccctcctgtgtccctggcccctgtggtgaccacctgtgcctag

SEQ ID NO: 146247 - DNA, 1164 bp, Artificial Sequence
  derived and/or modified sequence
atgaccggcaagctggccgagaagctgcccgtgaccatgagcagccttctaaatcaactgcccgacaacttatatcctgaagagatcccatccgctttgaacctcttctcaggcagtagcgatagcgtggtgcactacaaccagatggctacagagaatgttatggacatcggcctgaccaatgagaagcccaatcctgagctgagttatagtgggagcttccaaccagctcctggcaataagaccgttacgtatctgggaaaatttgcctttgactccccaagtaactggtgccaggataacattattagcttgatgagtgcaggtattctgggggtgccgccggcctccggcgctctgtccacgcagaccagtaccgcctctatggtgcaacccccccagggagatgtcgaggcgatgtaccccgccctgccaccatacagcaattgtggcgacctgtactccgaacctgtgagctttcacgatccgcaaggaaaccctggcctggcatactccccacaggattatcagagtgctaaaccagctctggattctaacctcttcccaatgatccctgattataatttgtatcatcaccccaatgacatgggaagcatcccggaacacaagcccttccagggcatggaccctataagagtgaatccacctccaatcactccactggaaacaatcaaggcgtttaaagacaaacagatacatcctggctttggttcacttccccaacctcctctaaccctaaagccgatccgccctaggaagtaccctaaccgccccagcaagacacctctacacgagcgaccccacgcctgtcccgccgaaggctgtgatcggcgcttcagtcggagtgatgaactgacacggcatctcagaatccataccgggcacaagccctttcagtgtagaatttgcatgcgcagttttagtaggtcagatcaccttacgacccacattcgcactcacaccggcgaaaaaccttttgcatgtgagttttgtggccgaaaatttgccagatccgacgagaggaaacggcacgccaagatacacttgaaacagaaggaaaaaaaggccgagaaaggaggtgcccccagtgcctccagcgcccccccagtgtctctggccccagtggtgaccacctgtgcctag

SEQ ID NO: 146248 - DNA, 1164 bp, Artificial Sequence
  derived and/or modified sequence
atgacaggaaagctggccgagaagttacctgtcacaatgagttcactgctgaaccagctcccagataacctctaccctgaagagatccctagcgcactcaacctgttctcagggtcctccgacagtgtcgtccactacaatcagatggcgactgagaacgttatggacatcggcttaaccaatgagaagccaaatccagaactgtcctactccggtagcttccagcctgcaccagggaataagactgtaacttatttgggaaagtttgccttcgactccccgagcaattggtgccaggacaacatcataagccttatgtccgccggtattcttggagtgccacccgctagcggcgcacttagcacacaaacatcgactgcatctatggtgcaacctccgcagggtgacgtggaggccatgtacccagctctgcccccttactcaaactgcggagacctgtacagcgagccagtttctttccacgacccacagggcaaccccggactggcatactcccctcaggattaccaatcagcaaagcccgcacttgacagcaacctctttcccatgatcccggactataacctgtatcaccaccccaatgatatggggtctatacccgagcacaagccttttcagggaatggatccgatccgggttaaccccccaccaattactccattggaaacaataaaagcgttcaaagacaagcaaatacatcctgggttcggtagcttgcctcagcccccactgactcttaaaccaatcagacctcgtaagtaccccaaccgcccatccaagacaccactgcacgagcggcctcacgcatgcccagcggagggatgtgaccgtcggttctccaggtccgatgagctgacgcggcatttgcgtatccacaccggacacaaaccattccaatgccgaatttgcatgaggtccttttctcgatccgaccatctcacaacccatatcagaacccacaccggcgagaagccatttgcttgtgaattttgcgggcgaaagttcgccagatccgacgagcgcaagaggcacgccaaaattcatctcaaacagaaggagaagaaagcagagaagggtggtgcgccaagcgcctcctcagcaccccctgtttccttagctcctgtggtgaccacgtgcgcctag

SEQ ID NO: 146249 - DNA, 1080 bp, Artificial Sequence
  derived and/or modified sequence
atggagacccagctgtccaacggccctacttgtaacaacacagcaaacgggcccactactataaacaacaattgtagctctccagtggacagcgggaacactgaggactccaaaactaatctgattgttaactatctaccccaaaacatgacacaggaagagctcaagtccctgtttggcagtattggcgaaatcgagagctgtaagttggttcgcgataaaatcactgggcagagcctcggatacggctttgtcaattacattgatcctaaagatgcggaaaaagctattaacactctgaatgggctccgtctacaaactaagactatcaaggtctcttacgccaggcccagttcagcctctatacgggacgcgaacctgtacgtctctgggttacccaagactatgacacagaaagagttggagcagctgttctcacagtacggtcgcataattacctcccgtattcttgttgatcaagtgacagggattagtcggggagttggctttattaggtttgataagcggattgaggcagaggaagctatcaaaggccttaacggccagaaaccgccaggcgcaaccgagcctatcactgtcaaatttgccaataatcccagccagaagacgaatcaggccattctgtcccaattataccagtctcccaaccgtcggtaccccggccctctggcacagcaagcccagcggtttcggcttgacaatctgctgaacatggcgtacggcgtaaaacgcttttctccaatgaccatcgatggcatgacttccctcgccggaatcaacataccaggccacccaggcaccggatggtgcatcttcgtttataatctcgcgcctgatgccgacgagtcgattttgtggcagatgttcggaccctttggggcagtcaccaacgtcaaggtgatccgggacttcaatactaacaagtgtaaaggcttcggctttgtcactatgacgaactacgacgaagccgccatggctattgcaagccttaacggataccgtttgggcgaccgcgtgttacaggtgtcctttaagaccaataagacacacaaggcttag

SEQ ID NO: 146250 - DNA, 1080 bp, Artificial Sequence
  derived and/or modified sequence
atggaaactcaactgtctaacggccctacctgtaataacacagctaacggccctaccaccatcaataacaattgctcttctcccgtagactctggtaacactgaggattccaagaccaatctgattgtgaattatcttcctcagaacatgacccaggaagagttgaagagcttgttcggttccattggggagatcgagtcatgcaagctggttagggacaagattaccggtcaatcacttggctacggctttgtaaattatatcgatccgaaagatgcggagaaagccataaatacgctcaacggactgagattacagactaaaacaatcaaagtcagttatgctcggccaagctcggccagcattcgggacgctaatctatatgtgtcagggctgcccaaaaccatgactcagaaagaactggagcagctctttagccagtacggtcggatcataacttctagaatcttggtggaccaagtcacaggcattagtaggggtgtggggttcattaggtttgacaagcgcatcgaggctgaggaggcaatcaagggcctcaacggacagaaaccaccaggggctactgagccaataaccgtcaaatttgctaataaccctagtcaaaagactaatcaagcaattctttcacagctctaccagtcccccaatcgaaggtatcccggccctctggcccagcaagcccagcgattcagattggacaacctgctgaacatggcttatggggtcaaacgcttctcccccatgaccatagacggcatgaccagcttagcaggcataaacataccaggccacccaggaacagggtggtgcattttcgtgtacaatctggcacctgatgccgacgagtccatactgtggcaaatgtttggaccttttggagccgtgaccaatgtgaaggtgataagggatttcaacacaaacaagtgtaagggcttcggctttgtgacaatgacaaactatgatgaggcggctatggccatcgctagtctaaacggatatagactgggtgatagagttctacaggtgagtttcaagactaataaaacacacaaggcctag

SEQ ID NO: 146251 - DNA, 1080 bp, Artificial Sequence
  derived and/or modified sequence
atggaaacccagctgtcaaatggcccgacctgcaacaacaccgccaacgggccgaccactattaacaacaattgctcatcccctgtcgattcgggcaacaccgaagacagcaagactaaccttattgtgaattacctgccccagaatatgactcaggaagaactgaagtcccttttcggcagtataggggagatcgaatcctgtaaactggtgcgcgacaagattaccggacagtcattgggatatggattcgttaattatatcgatccaaaagatgccgagaaggctattaacaccctcaacggtctgcgtctgcaaaccaagaccatcaaagtatcttacgcgagaccgtcaagtgcatctataagggacgcaaacctgtacgtttcaggcttgcccaagactatgacacaaaaggagctcgagcaactttttagccaatacgggcggataattactagccgtattctagttgaccaggttacagggataagccgcggcgtaggctttattcgattcgataagcgcattgaagcagaagaggctattaagggcctcaatggccaaaagcctcccggagccaccgaaccaattacagtcaaatttgcgaacaaccccagccagaaaacaaaccaggctattctctcccagctatatcaatcccccaacaggcgctatccaggccctctggcacagcaggctcagcgatttagacttgacaacctgctgaatatggcatacggcgtgaagagatttagtcccatgacaattgacggcatgacctctctcgcaggcatcaacattcctggtcatcccgggaccggctggtgcatcttcgtatacaacctggcccctgacgccgatgaatctatcctgtggcaaatgtttggccctttcggcgccgtgaccaatgttaaagtcatccgagactttaatacgaacaaatgtaaagggtttggattcgtgaccatgactaactacgacgaagccgccatggccatcgcctcactaaatggctataggttgggggatagagtgttgcaggtttcgttcaaaaccaataaaacccataaagcctag

SEQ ID NO: 146252 - DNA, 1080 bp, Artificial Sequence
  derived and/or modified sequence
atggagacccagctgagcaatggccccacctgcaacaacacagccaacggccccaccaccatcaacaacaactgcagcagccctgtggacagcggcaacacagaggacagcaagaccaacctgattgtgaactacctgccccagaacatgacccaggaggagctgaagagcctgtttggcagcatcggggagattgagagctgcaagctggtgcgggacaagatcaccggccagagcctgggctacggctttgtgaactacatcgaccccaaggatgctgagaaggccatcaacaccctgaatggcctgcggctgcagaccaagaccatcaaggtgtcctatgcccggcccagcagcgccagcatcagagatgccaacctgtatgtgtctggcctgcccaagaccatgacccagaaggagctggagcagctgttcagccagtatggccgcatcatcaccagccgcatcctggtggaccaggtgacaggcatcagcagaggagtgggcttcatccgctttgacaagagaattgaagctgaggaggccatcaagggcctgaatggccagaagcccccaggggccacagagcccatcaccgtgaagtttgccaacaaccccagccagaagaccaaccaggccatcctgagccagctgtaccagagccccaacagacgctacccaggccccctggcccagcaggcccagcgcttccggctggacaacctgctgaacatggcctatggagtgaagcgcttcagccccatgaccattgatggcatgaccagcctggccggcatcaacatccctggccaccctggcaccggctggtgcatctttgtgtacaacctggccccagatgctgatgagagcatcctgtggcagatgtttggcccctttggagctgtgaccaacgtgaaggtgatccgggacttcaacaccaacaagtgcaagggctttggatttgtgaccatgaccaactatgatgaggccgccatggccatcgccagcctgaatggctaccgcctgggggacagagtgctgcaggtgtccttcaagaccaacaagacccacaaggcctag

SEQ ID NO: 146253 - DNA, 1080 bp, Artificial Sequence
  derived and/or modified sequence
atggagacccagctgagcaacggccccacctgcaacaacaccgccaacggacccactacaatcaacaataattgttcatcacccgttgattctggcaacacggaggacagtaaaaccaatctcattgtgaactatctacctcagaatatgactcaggaggagctaaagtccctatttggctctattggggagattgagtcttgcaagctcgtgagggacaagataacagggcaaagtctgggttatggcttcgtgaactacattgaccccaaggatgccgaaaaggccatcaatactctgaacgggctgaggctgcagacaaaaacaatcaaggttagttacgcacggccctcctcagcgtccatccgagacgcaaacctgtacgtttccggactaccgaagaccatgacacaaaaggaactggaacagctgttttctcagtacggcaggatcatcacgtctcggattctggtggaccaggtgaccgggatttcccgcggggtggggtttattcgatttgacaagaggatcgaagccgaagaggctataaaaggcctcaacggccaaaaacctccaggagcaaccgaaccaatcaccgtgaagtttgcaaataacccatctcagaagaccaaccaagcaatcctttcacagttatatcaatcacccaaccgcaggtaccccggcccacttgctcagcaggcacagagattccgtttagataacctgctgaatatggcttacggtgttaaacgattttcaccgatgactatcgacggcatgacttcacttgcaggaatcaatatcccaggacacccaggcacggggtggtgcattttcgtctataacttagcacccgacgctgacgagtctattctttggcagatgttcggtccctttggggctgtgacgaacgtaaaggtcattcgggatttcaataccaacaaatgcaaggggttcggctttgtgacaatgacgaattatgatgaggctgccatggccattgcttcgctgaacggctacagactgggcgatagagtactacaggtctctttcaaaactaataaaacccacaaagcttag

SEQ ID NO: 146254 - DNA, 1080 bp, Artificial Sequence
  derived and/or modified sequence
atggagacccagctgagcaacggccccacctgcaacaacaccgccaatggtccgaccacaatcaataacaattgctcttcacccgtagactctggcaatacggaggactctaagaccaatctcatcgtgaactaccttccacaaaacatgacgcaggaggagctcaagagcctgttcggttctattggggaaattgagtcttgtaagttggtgcgagataagattacgggccaatctctgggctatggcttcgtaaattacatagaccctaaagatgccgagaaggctatcaataccctcaatggtctcaggttacaaacaaaaactattaaggttagctatgcacggccaagctccgctagcatcagagacgcaaatttatatgtatctggactgcctaagactatgacacaaaaagagctcgaacagctcttttcacagtatggacggatcataacctcgcgaatactggtagatcaggtcaccggtatttccaggggcgtgggcttcattaggtttgacaaacggatagaagcagaagaggccatcaagggtctgaatggtcagaagccaccaggtgcaactgagccaattacagtgaagtttgccaacaaccctagtcagaagactaaccaggccatcctgtctcaattatatcagtccccaaatcgaaggtacccggggccactggcacaacaggctcagagatttaggcttgacaatctcctgaatatggcatatggggtaaaaaggttcagcccaatgacaattgacggcatgacgtctcttgcaggcatcaacattcctgggcaccctggcaccggttggtgcattttcgtgtacaacctggccccggatgctgacgaatccattttatggcagatgtttgggcctttcggcgctgtgaccaacgttaaggtgatccgagacttcaacacaaacaagtgcaagggctttggattcgttacgatgactaactacgatgaggctgccatggccatcgcgtctctgaacggataccgtctgggcgaccgtgtgctgcaggtgtcctttaagaccaataaaacgcataaggcttag

SEQ ID NO: 146255 - DNA, 1080 bp, Artificial Sequence
  derived and/or modified sequence
atggagacccagctgagcaacggccccacctgcaacaacaccgccaacggacctacaacaatcaacaataattgttcatcccccgtcgattccggtaacacagaggactctaagactaatctgattgtgaattacctcccacagaatatgacccaggaagagctgaagagtctctttgggtccattggtgagatcgagagctgcaagctcgtccgcgataaaatcaccgggcagagcctggggtacggctttgtgaattatatagatcctaaagatgccgagaaggccattaacaccctgaacggcttgagacttcagacaaaaacgataaaggtgtcatatgcaaggccatcttctgcatcaattagggatgctaatctgtacgtgtcaggccttcctaaaactatgacccaaaaggagttggaacagttgttttctcagtacgggcgcatcatcaccagccgcattttagtagatcaagtgactgggatctcacgtggagttggattcataagatttgacaaaagaatcgaagctgaagaagctatcaagggactgaacggccagaagccccccggggccaccgagcccatcacagtgaaatttgccaacaatccctcccagaagacaaaccaggccatcctgtctcagctctatcagtcccctaaccgccgctacccgggacctttagctcaacaagcccagaggtttaggctcgacaacctgttgaatatggcatatggagtcaagaggttttctcccatgacaatagatgggatgacctctttggccgggataaatatacctggtcaccccggcaccggatggtgtatattcgtgtataacctggcaccagatgctgacgagagtatcctttggcagatgttcggacccttcggggcggttaccaacgtaaaggttattagagattttaacacaaataaatgtaagggcttcggctttgtgactatgactaattacgacgaggcggccatggctatcgcatcactgaacgggtatcggttgggagatagggtactgcaggtgtcattcaagactaataagactcacaaggcctag

SEQ ID NO: 146256 - DNA, 1080 bp, Artificial Sequence
  derived and/or modified sequence
atggagactcagttgagtaatggtcctacttgcaacaatacagcaaacgggccaactacaataaacaacaactgcagctcaccagtagactcaggtaacactgaagactctaaaacaaatttgattgtcaactacttgccccagaacatgacacaagaggaactaaaaagcctattcggctccatcggggaaatagagtcttgtaagctggtgcgggacaaaatcaccgggcagagtctgggctacggattcgttaattacatcgaccccaaggacgctgagaaagccatcaacaccttgaacggtctccggttgcaaaccaagaccattaaagtgagctatgccaggccctcctccgcatcaattcgtgatgccaatttatacgtgtctgggctgccgaagacaatgacacagaaggaactggagcaactattctcccagtatgggaggattatcaccagcagaatcctagttgatcaggttacagggatcagccgtggagttggcttcatcagatttgataaacggatcgaggccgaagaggccatcaagggattgaatggccagaaaccgcctggagcaacggaaccaataaccgtgaagttcgccaataaccccagtcagaagacgaatcaggcaatcctttctcagttgtaccagtccccgaacaggcggtatcccggaccactcgcccagcaggcacaaagattccgccttgataacctcctcaacatggcttatggcgtcaagagattttcaccgatgacaatcgatggcatgacatctctggctggcatcaatatcccgggacaccctggcaccggttggtgcattttcgtgtataatttggcacctgacgcagacgaatcaattctctggcagatgtttggaccatttggcgctgtgactaatgtgaaagtcatccgcgatttcaacaccaataaatgtaaaggtttcggcttcgtgaccatgaccaactatgacgaagcagcaatggcgatcgcctcgctcaatgggtacagactgggtgatagagtgttgcaggtcagctttaaaacgaacaagacccacaaggcctag

SEQ ID NO: 146257 - DNA, 1080 bp, Artificial Sequence
  derived and/or modified sequence
atggagacgcaattaagcaatggacctacctgtaataatacagcgaacgggcctaccacaataaataacaactgcagctcccctgtggactccggaaatactgaagattccaagactaacctgatcgtgaattatctgccccaaaacatgacccaagaggaactcaagtcccttttcggtagcataggtgaaatcgagtcatgcaagctggtccgtgacaagatcacaggacaaagcttaggatatgggttcgtgaactacatcgatcctaaggacgccgagaaggctatcaacacactgaacggtctgaggctgcaaaccaaaacgattaaggttagctacgctcggccttcttcggcctctatccgagacgccaacctgtatgtgtctggtctgcccaagactatgacccagaaagagctcgaacaactgttcagccagtacggcagaatcatcacgtcccggatcctcgtggatcaagttactggcatttctcgtggcgttggatttatccgctttgacaagcggatcgaggccgaggaggctattaagggcctgaatggccaaaaacctccgggagctacagaacccatcactgtgaaattcgctaataaccctagccagaagacgaaccaggctatactctctcagctgtaccaatcccctaaccggcgttacccagggccattagctcaacaggcccagcggtttcgtttagataatctcctaaacatggcttacggagtgaagagattctctcctatgaccatagacggcatgacttctttggccggaatcaatattcccggacaccctggaactggatggtgtatattcgtgtataacctggctcctgatgcagacgagtctatcctgtggcagatgtttgggccatttggggctgttactaatgtgaaagtcatcagagatttcaatactaataagtgcaaggggttcggcttcgtgacaatgaccaactatgacgaagcagctatggcaatcgccagcctcaatggctaccgactgggggatcgcgtcctccaagtgtcctttaagactaacaaaactcacaaagcatag

SEQ ID NO: 146258 - DNA, 1080 bp, Artificial Sequence
  derived and/or modified sequence
atggagacacagctctcaaacgggcctacttgcaataataccgcaaatggcccaacgacaattaataacaactgctcgagccctgtagattcaggaaatactgaagacagcaaaacaaatctgatcgtcaactatctccctcagaatatgacgcaagaggagttgaaaagcctcttcgggtccatcggcgagatcgaatcttgtaagctggtccgggataagataaccggtcaaagtctgggttatggattcgtgaactatattgatcccaaagatgcagagaaagcgatcaatacactaaacggtttgcggctccaaacaaaaactataaaagttagctatgctcgcccaagctccgcatctatcagagatgctaatctctatgtctcgggactgcccaaaaccatgacacagaaggaactggagcaattgtttagccagtacggccgaatcatcacctctaggattctcgtagaccaagtgacaggaatcagtcgtggtgtgggctttataagatttgacaagaggatagaagccgaggaggcaattaaaggtctcaatggtcagaagcccccaggcgcaaccgagccaattaccgtgaaattcgcaaataacccgtctcagaagacgaaccaagccatactttcccaactgtatcaaagcccaaatcgacgctatcccggtccactcgctcaacaagctcagcgcttccgcctcgacaatctcctcaatatggcctacggagtgaaacgcttcagtcccatgaccatcgacggcatgacctctctggcgggaattaatatacccggacatcctggtaccggctggtgtatctttgtctacaatctggcccctgacgcggatgagagcatcctctggcagatgttcggtccctttggcgctgtcacgaacgtgaaagtcatcagggatttcaatacaaacaagtgcaagggctttggctttgttaccatgacgaactatgacgaggcggctatggctattgcctcacttaatgggtacagactgggcgaccgggttctgcaggttagtttcaagacaaataagactcataaggcatag

SEQ ID NO: 146259 - DNA, 1080 bp, Artificial Sequence
  derived and/or modified sequence
atggagacccagctgagcaacggccccacctgcaacaacaccgccaacggccccaccaccatcaacaacaactgcagcagccccgtggacagcggcaacaccgaggacagcaagaccaacctgatcgtgaactacctgccccagaacatgacccaggaggagctgaagagcctgttcggcagcatcggcgagatcgagagctgcaagctggtgagagacaagatcaccggccagagcctgggctacggcttcgtgaactacatcgaccccaaggacgccgagaaggccatcaacaccctgaacggcctgagactgcagaccaagaccatcaaggtgagctacgccagacccagcagcgccagcatcagagacgccaacctgtacgtgagcggcctgcccaagaccatgacccagaaggagctggagcagctgttcagccagtacggcagaatcatcaccagcagaatcctggtggaccaggtgaccggcatcagcagaggcgtgggcttcatcagattcgacaagagaatcgaggccgaggaggccatcaagggcctgaacggccagaagccccccggcgccaccgagcccatcaccgtgaagttcgccaacaaccccagccagaagaccaaccaggccatcctgagccagctgtaccagagccccaacagaagataccccggccccctggcccagcaggcccagagattcagactggacaacctgctgaacatggcctacggcgtgaagagattcagccccatgaccatcgacggcatgaccagcctggccggcatcaacatccccggccaccccggcaccggctggtgcatcttcgtgtacaacctggcccccgacgccgacgagagcatcctgtggcagatgttcggccccttcggcgccgtgaccaacgtgaaggtgatcagagacttcaacaccaacaagtgcaagggcttcggcttcgtgaccatgaccaactacgacgaggccgccatggccatcgccagcctgaacggctacagactgggcgacagagtgctgcaggtgagcttcaagaccaacaagacccacaaggcctag

SEQ ID NO: 146260 - protein, 815 aa, Artificial Sequence
  derived and/or modified sequence
MEDGFSSYSSLYDTSSLLQFCNDDSASAASSMEVTDRIASLEQRVQMQEDDIQLLKSALADVVRRLNITEEQQAVLNRKGPTKARPLMQTLPLRTTVNNGTVLPKKPTGSLPSPSGVRKETAVPATKSNIKRTSSSERVSPGGRRESNGDSRGNRNRTGSTSSSSSGKKNSESKPKEPVFSAEEGYVKMFLRGRPVTMYMPKDQVDSYSLEAKVELPTKRLKLEWVYGYRGRDCRNNLYLLPTGETVYFIASVVVLYNVEEQLQRHYAGHNDDVKCLAVHPDRITIATGQVAGTSKDGKQLPPHVRIWDSVTLNTLHVIGIGFFDRAVTCIAFSKSNGGTNLCAVDDSNDHVLSVWDWQKEEKLADVKCSNEAVFAADFHPTDTNIIVTCGKSHLYFWTLEGSSLNKKQGLFEKQEKPKFVLCVTFSENGDTITGDSSGNILVWGKGTNRISYAVQGAHEGGIFALCMLRDGTLVSGGGKDRKLISWSGNYQKLRKTEIPEQFGPIRTVAEGKGDVILIGTTRNFVLQGTLSGDFTPITQGHTDELWGLAIHASKSQFLTCGHDKHATLWDAVGHRPVWDKIIEDPAQSSGFHPSGSVVAVGTLTGRWFVFDTETKDLVTVHTDGNEQLSVMRYSPDGNFLAIGSHDNCIYIYGVSDNGRKYTRVGKCSGHSSFITHLDWSVNSQFLVSNSGDYEILYWVPSACKQVVSVETTRDIEWATYTCTLGFHVFGVWPEGSDGTDINAVCRAHEKKLLSTGDDFGKVHLFSYPCSQFRAPSHIYGGHSSHVTNVDFLCEDSHLISTGGKDTSIMQWRVI

SEQ ID NO: 146261 - DNA, 2448 bp, Artificial Sequence
  derived and/or modified sequence
atggaagatggcttcagcagctactcctcactgtatgacacaagtagccttctgcagttctgtaacgatgactccgcctcagctgcctccagcatggaggtgacagatcgcatcgcttctttggagcagcgggtgcagatgcaagaagatgatattcaactgctgaagtcagcccttgctgatgttgtgcggcgactgaacattacagaggaacagcaggccgtcctgaaccgcaagggacccactaaggcccgacccctgatgcaaaccctgcctctcaggaccacagttaacaatggtacggtgctacccaaaaagccaacaggtagtctgccgtctcccagcggcgttcgtaaagagacagccgtgccagctactaaatccaacatcaagcgcacttcaagcagcgagagagtcagcccaggcgggcgacgggagagcaacggagactccagagggaatagaaatcggactggaagtacctcttcttcctcatccggaaagaagaacagcgaatcaaagccaaaggagcccgtattcagcgcggaggagggatacgtaaaaatgttcctacgcggaaggcccgtgacgatgtacatgccgaaggaccaggttgattcttattcactggaagcgaaagtggagttgcctaccaagcggcttaaactggaatgggtttatggataccgcggtcgagactgtcgcaataatctgtatctcctcccaaccggcgagactgtctattttattgctagcgttgtggtcctgtataatgtggaagaacagctgcagcgtcactatgccggtcacaacgacgatgttaagtgcttggctgtccatcctgaccggattactatagctaccggtcaggtggctggaacgtcaaaagacgggaaacaactccccccacatgtgcgcatttgggactccgtgacccttaacactttgcacgtgattggcataggatttttcgatcgggctgtgacctgcattgcattctctaagagtaacggcggaacaaacctgtgtgcggtggacgattctaacgaccatgtgctcagcgtgtgggattggcaaaaagaagagaagctggctgacgtgaaatgcagcaacgaggcggtctttgccgctgatttccaccctactgacacaaacatcatagtgacctgcggcaagagccacctctacttttggacactcgagggctcctccctcaataagaaacaggggctttttgaaaagcaggagaagccaaagtttgttctttgtgttacattcagcgaaaacggggatacaatcacgggagatagctctgggaacattctcgtgtggggaaaagggaccaatagaatttcctatgcagtgcagggcgcgcatgagggggggatcttcgccctctgcatgctgagggatgggacactggtctccggaggcggaaaagaccgaaagttgattagctggtccggaaattaccagaaactaaggaaaaccgagatacctgaacagttcggccccatcaggactgtggcagagggcaaaggcgacgttattctcatcggaaccacaagaaattttgtcctccagggcactttgagcggggactttaccccaattacacagggccatacagacgagttgtgggggctggccatacatgctagtaaaagccaattcctaacttgcggacatgataagcacgcaacactttgggatgccgtgggtcacaggcctgtctgggacaagattatcgaagacccagcacagtctagcgggttccacccttccggctccgtcgtggctgtcggcaccctgactggccgctggttcgtgttcgacaccgaaaccaaggatctcgtgactgtgcataccgatgggaacgaacagctgtcggtcatgcgatacagtccagatggcaattttctcgccattggctctcatgacaactgcatatatatctatggcgtctcagataatggtcgcaaatacacccgcgtaggaaaatgtagcggccattcttccttcatcacccacttggattggagtgttaacagtcagtttctcgtgtccaacagcggcgattacgagatactctactgggttccgagcgcctgtaagcaagtggtcagcgtggagaccacccgtgatattgaatgggcaacatacacatgtacgttggggtttcacgtatttggagtttggcccgagggatccgacgggaccgatattaacgccgtttgtcgggcacacgaaaagaaactcttgtccacgggcgatgactttggtaaagtgcatttatttagttacccttgctcccagttccgggccccttcccacatttatggagggcattcttctcatgtgacaaatgtagactttctttgtgaagacagtcacctcatctccaccggggggaaggatactagcataatgcaatggagagtaatttag

SEQ ID NO: 146262 - DNA, 2448 bp, Artificial Sequence
  derived and/or modified sequence
atggaggatggcttcagcagctacagcagcctgtatgacaccagcagcctgctgcagttctgcaatgatgattctgccagcgctgccagctccatggaggtgacagaccgcatcgccagcctggagcagagggtgcagatgcaggaggatgacatccagctgctgaagagcgccctggctgatgtggtgcggcggctgaacatcacagaggagcagcaggccgtgctgaacaggaagggccccaccaaggcccggcccctgatgcagaccctgcccctgcggaccaccgtgaacaatggaacagtgctgcccaagaagcccaccggcagcctgcccagccccagcggcgtgaggaaggagacagctgtgcctgccaccaagagcaacatcaagaggaccagcagcagcgagcgggtgtccccaggcggccggcgggagagcaatggagacagccggggcaacagaaacagaacaggcagcaccagcagcagcagcagcggcaagaagaacagcgagagcaagcccaaggagcccgtcttctctgctgaggagggctacgtgaagatgttcctgcggggccggcctgtgaccatgtacatgcccaaggaccaggtggacagctacagcctggaggccaaggtggagctgcccaccaagaggctgaagctggagtgggtgtatggctaccggggccgggactgcaggaacaacctgtacctgctgcccactggagagaccgtgtacttcatcgcctctgtggtggtgctgtacaacgtggaggagcagctgcagaggcactacgccggccacaatgatgatgtgaagtgcctggccgtgcacccagaccgcatcaccatcgccaccggccaggtggccggcaccagcaaggatggcaagcagctgcccccccacgtgcgcatctgggacagcgtgaccctgaacaccctgcacgtgattggaattggcttctttgacagagctgtgacctgcatcgccttcagcaagagcaatggaggcaccaacctgtgtgctgtggatgacagcaatgaccacgtgctgtctgtgtgggactggcagaaggaggagaagctggctgatgtgaagtgcagcaatgaagctgtgtttgctgctgacttccaccccacagacaccaacatcatcgtgacctgtgggaagagccacctgtacttctggaccctggagggcagcagcctgaacaagaagcagggcctgtttgagaagcaggagaagcccaagtttgtgctgtgtgtgaccttctctgaaaatggagacaccatcaccggggacagcagcggcaacatcctggtgtggggcaagggcaccaaccgcatctcctatgctgtgcagggcgcccatgaaggaggcatctttgccctgtgcatgctgagagatggcaccctggtgtctgggggcggcaaggacaggaagctgatctcctggagcggcaactaccagaagctgaggaagacagagatccctgagcagtttggccccatcagaacagtggccgagggcaaaggagatgtgatcctgattggcaccaccaggaactttgtgctgcagggcaccctgagcggggacttcacccccatcacccagggccacacagatgagctgtggggcctggccatccacgccagcaagagccagttcctgacctgtggccatgacaagcacgccaccctgtgggatgctgtgggccacaggcctgtgtgggacaagatcatcgaggaccctgcccagagcagcggcttccaccccagcggctctgtggtggccgtgggcaccctgaccggccgctggtttgtgtttgacacagagaccaaggacctggtgacagtgcacacagatggaaatgagcagctgtctgtgatgagatacagcccagatggcaacttcctggccatcggcagccatgacaactgcatctacatctatggagtgtctgacaatggaaggaagtacaccagggtgggcaaatgttctggccacagcagcttcatcacccacctggactggagcgtgaacagccagttcctggtgagcaacagcggggactatgagatcctgtactgggtgcccagcgcctgcaagcaggtggtgtctgtggagaccacccgggacatcgagtgggccacctacacctgcaccctgggcttccacgtgtttggagtgtggccagagggcagtgatggaacagacatcaatgctgtgtgccgggcccacgagaagaagctgctgagcactggagatgactttgggaaggtgcacctgttctcctacccctgcagccagttccgggcccccagccacatctacggcggccacagcagccacgtgaccaacgtggacttcctgtgtgaggacagccacctgatcagcactggaggcaaggacaccagcatcatgcagtggagggtcatctag

SEQ ID NO: 146263 - DNA, 2448 bp, Artificial Sequence
  derived and/or modified sequence
atggaggacggcttcagcagctacagcagcctgtacgacaccagcagcttactccagttttgcaatgacgactccgcctccgccgcctccagcatggaggttacagaccggatagcgtctctggaacaaagagtccagatgcaggaggatgatatccagcttttgaaatctgcccttgccgatgtagtcagaagactcaacattaccgaggaacaacaggcagtcttaaatcggaaagggcctactaaggcacggccactgatgcagaccttgcccctacggacaacggtgaacaacggaaccgtcctccctaagaagccaaccgggtctctgccgagtccatccggcgtcaggaaggagaccgcggtgccagcaacaaaaagcaacattaaaaggacttcatctagcgaacgtgtctcacctggtggtagacgagagagcaatggagacagtagagggaatcgtaacaggacgggctcaacctcttcgagctctagcggcaagaagaattctgagagcaagcccaaagagccggtgtttagcgcagaggagggatatgttaagatgttcctgagaggtagacctgtgaccatgtacatgcctaaggatcaagtggactcatactctctggaagctaaggtggaactgccgaccaaaagattgaaactggaatgggtgtacggttaccgcgggcgagactgtagaaataacctctacttgttgcccaccggtgaaactgtgtatttcattgcttccgtcgtcgtgctgtacaacgttgaggaacaactacagcggcactacgcgggccacaacgacgatgtgaaatgtttggctgtgcatcctgaccgcattacaattgccacaggccaggtggcgggcacgtctaaagatggtaagcaattaccaccacacgtaagaatttgggacagcgtgaccctcaatacacttcatgtgattggcataggattctttgatcgcgctgttacatgcatagctttttctaagtcaaacgggggtacaaatctgtgtgccgttgacgactctaacgatcacgtactgtcagtttgggactggcagaaggaggagaagttagccgacgtcaagtgttccaatgaagcagtgttcgctgccgatttccacccgactgacactaacatcattgtcacctgcggaaaatcccacttgtatttttggaccctggagggctcatcactgaataagaagcagggtctgttcgaaaagcaagagaagcccaaattcgtcctgtgtgttaccttttccgaaaatggcgacaccatcactggtgactcgtctggaaacatactggtgtggggcaaaggaaccaatcggatctcatatgctgtccagggagcccatgagggcggaatcttcgcactgtgtatgctgagggacgggacacttgtgtctggaggaggcaaagatagaaagcttatcagctggagcggcaactaccagaagttacgtaagactgagatccctgaacagttcgggccaatccggacagtggctgagggcaagggtgacgtaatcctgatcgggaccacacgaaatttcgtcctgcagggcacactatccggcgactttacacctatcactcagggccataccgatgagctctggggtttggccatccatgcttctaagtctcagttcctcacttgtggacacgataaacatgccacgctgtgggacgcagttggccatcggcctgtttgggacaagattattgaggacccggcccagagcagtggcttccacccatccggaagcgttgtggcggttggaacccttaccggcaggtggttcgtattcgacacagagaccaaggatctggtgacagtgcacactgacggaaacgagcagcttagtgtgatgagatattcacccgacgggaacttcctggcaatagggtcccatgataactgtatctatatctatggtgtgagcgacaatgggagaaaatatacccgggtgggtaaatgcagcgggcactcctcattcatcactcacttggattggagcgtgaactctcagtttttagttagcaactcaggcgactatgagattctatattgggtgccttctgcttgtaagcaggttgtctctgtcgagaccacgagggacatcgaatgggcaacctatacttgtaccctgggcttccacgtgtttggtgtgtggccggaggggagcgatggcactgatataaacgcggtgtgcagggcacatgagaaaaaactgttatctaccggagatgattttggcaaggtccatcttttctcctacccatgctcccagttccgagccccttcacacatatacggaggccactcaagccacgtcactaatgtcgatttcctgtgtgaggactctcatctgatctccacaggtggtaaggatacatcaatcatgcagtggcgagttatatag

SEQ ID NO: 146264 - DNA, 2448 bp, Artificial Sequence
  derived and/or modified sequence
atggaggatggctttagcagctactcatccctgtacgacactagctctcttctgcagttttgcaacgatgatagcgcgtcagcagccagttcaatggaagtcactgatagaatcgcgtctctggagcaaagagtccagatgcaggaggatgatatccagctgctgaagtccgccctggcggacgtggtgaggcgcctgaatattactgaggagcagcaggccgtactgaataggaagggtcctaccaaggctcgcccactaatgcagacgttgccgctgcgaaccaccgtaaacaatgggaccgttctgcctaaaaagccaactgggtctctaccatcaccttccggtgtgaggaaggagaccgccgtacccgctacaaaatccaacatcaagagaacatcctcttcagagcgcgtctctcccggtggccgaagggaatctaacggcgattcccgcggaaatcggaataggactgggagcacgtcctcctcttcttctgggaaaaagaactctgagagcaagcctaaggaacctgtgttttcagctgaggagggctacgttaagatgttcttacggggtcgtcccgtcaccatgtacatgcctaaagaccaggtggattcttactcccttgaggccaaggtggaactccccaccaagcgactgaaactggaatgggtgtacggctaccgagggagggactgtcggaataatctttatttactccccaccggagaaacagtctatttcattgcctccgtggtggtgctctacaacgtggaagagcaacttcagcggcactacgccggtcataatgatgatgtaaagtgtctggccgttcatccagaccgaatcactattgctaccgggcaagtggcgggaactagcaaggatggaaagcagctgccaccgcatgtgcggatttgggatagcgtcacgcttaatacattacacgtgatagggataggcttcttcgaccgcgctgtgacttgtatcgcgttcagtaaatcaaatggagggacaaatctgtgtgccgttgacgactctaacgaccatgtgctgtctgtttgggactggcagaaagaagagaaacttgcggacgtgaaatgctccaacgaggccgtgttcgccgctgactttcaccccaccgatacaaatattatcgtaacgtgtggcaagagccatctgtacttctggacactggagggtagcagcctcaacaaaaaacagggactgttcgagaagcaagaaaagccaaaattcgtgctttgcgtcacatttagcgagaatggggacaccataactggcgacagcagcggcaacatcttggtgtggggcaaagggactaataggatcagttacgcagtgcagggggctcacgaagggggtatatttgccctgtgcatgctgagggacggcaccctggtgtccggaggcggaaaggaccgcaagctgatcagctggtcagggaattaccaaaaacttcggaaaaccgagatcccggagcagtttggaccgataagaacggtcgccgaggggaaaggcgatgttatccttattggcacgacacgcaatttcgttctacagggtaccctatccggagacttcacccctatcactcaggggcacaccgacgagctttgggggctcgccatccacgcttcaaaatctcagttcttgacctgcggacacgataagcacgctacactgtgggatgccgtcggccacagacccgtttgggacaagattatcgaagatcctgcgcagtcctctggctttcatccttctggaagcgttgttgcggtcggtaccctcaccggccgatggttcgtgtttgacacagagactaaagatcttgttacggtgcatactgacgggaatgagcagctgtccgtaatgagatacagcccggatggtaacttcctggccataggaagtcatgataattgtatctacatctatggagtgagcgacaatggaagaaagtatacccgcgtcggcaagtgctccggccactccagtttcattacgcacctcgattggtcagttaactctcagttcttagttagtaacagtggtgattatgagatcctgtattgggtgccatctgcctgcaagcaggttgtaagtgtggaaaccacccgtgacatcgaatgggccacctacacatgtaccttgggcttccacgtgttcggggtctggcccgagggttcagacggtaccgacatcaacgctgtctgtcgggcacacgaaaaaaaactattgagtaccggggatgactttggcaaagtgcacctcttttcttatccctgctctcagttcagggccccatctcacatctatgggggtcacagtagtcatgttacaaatgtcgattttttatgcgaggactcccatctgatttcgactggcggaaaggataccagtattatgcagtggcgcgtgatatag

SEQ ID NO: 146265 - DNA, 2448 bp, Artificial Sequence
  derived and/or modified sequence
atggaggacggcttcagcagctacagcagcctgtacgacaccagcagcctgctgcagttctgcaacgacgacagcgccagcgccgccagcagcatggaggtgaccgacagaatcgccagcctggagcagagagtgcagatgcaggaggacgacatccagctgctgaagagcgccctggccgacgtggtgagaagactgaacatcaccgaggagcagcaggccgtgctgaacagaaagggccccaccaaggccagacccctgatgcagaccctgcccctgagaaccaccgtgaacaacggcaccgtgctgcccaagaagcccaccggcagcctgcccagccccagcggcgtgagaaaggagaccgccgtgcccgccaccaagagcaacatcaagagaaccagcagcagcgagagagtgagccccggcggcagaagagagagcaacggcgacagcagaggcaacagaaacagaaccggcagcaccagcagcagcagcagcggcaagaagaacagcgagagcaagcccaaggagcccgtgttcagcgccgaggagggctacgtgaagatgttcctgagaggcagacccgtgaccatgtacatgcccaaggaccaggtggacagctacagcctggaggccaaggtggagctgcccaccaagagactgaagctggagtgggtgtacggctacagaggcagagactgcagaaacaacctgtacctgctgcccaccggcgagaccgtgtacttcatcgccagcgtggtggtgctgtacaacgtggaggagcagctgcagagacactacgccggccacaacgacgacgtgaagtgcctggccgtgcaccccgacagaatcaccatcgccaccggccaggtggccggcaccagcaaggacggcaagcagctgcccccccacgtgagaatctgggacagcgtgaccctgaacaccctgcacgtgatcggcatcggcttcttcgacagagccgtgacctgcatcgccttcagcaagagcaacggcggcaccaacctgtgcgccgtggacgacagcaacgaccacgtgctgagcgtgtgggactggcagaaggaggagaagctggccgacgtgaagtgcagcaacgaggccgtgttcgccgccgacttccaccccaccgacaccaacatcatcgtgacctgcggcaagagccacctgtacttctggaccctggagggcagcagcctgaacaagaagcagggcctgttcgagaagcaggagaagcccaagttcgtgctgtgcgtgaccttcagcgagaacggcgacaccatcaccggcgacagcagcggcaacatcctggtgtggggcaagggcaccaacagaatcagctacgccgtgcagggcgcccacgagggcggcatcttcgccctgtgcatgctgagagacggcaccctggtgagcggcggcggcaaggacagaaagctgatcagctggagcggcaactaccagaagctgagaaagaccgagatccccgagcagttcggccccatcagaaccgtggccgagggcaagggcgacgtgatcctgatcggcaccaccagaaacttcgtgctgcagggcaccctgagcggcgacttcacccccatcacccagggccacaccgacgagctgtggggcctggccatccacgccagcaagagccagttcctgacctgcggccacgacaagcacgccaccctgtgggacgccgtgggccacagacccgtgtgggacaagatcatcgaggaccccgcccagagcagcggcttccaccccagcggcagcgtggtggccgtgggcaccctgaccggcagatggttcgtgttcgacaccgagaccaaggacctggtgaccgtgcacaccgacggcaacgagcagctgagcgtgatgagatacagccccgacggcaacttcctggccatcggcagccacgacaactgcatctacatctacggcgtgagcgacaacggcagaaagtacaccagagtgggcaagtgcagcggccacagcagcttcatcacccacctggactggagcgtgaacagccagttcctggtgagcaacagcggcgactacgagatcctgtactgggtgcccagcgcctgcaagcaggtggtgagcgtggagaccaccagagacatcgagtgggccacctacacctgcaccctgggcttccacgtgttcggcgtgtggcccgagggcagcgacggcaccgacatcaacgccgtgtgcagagcccacgagaagaagctgctgagcaccggcgacgacttcggcaaggtgcacctgttcagctacccctgcagccagttcagagcccccagccacatctacggcggccacagcagccacgtgaccaacgtggacttcctgtgcgaggacagccacctgatcagcaccggcggcaaggacaccagcatcatgcagtggagagtgatctag

SEQ ID NO: 146266 - DNA, 4535 bp, Artificial Sequence
  derived and/or modified sequence
atggtaaccggcagcagcagccgccacagcagggccggccccagcgccagcgccggtcgcggtcgggctcagctcagtgtgtggtgagcggcggcggcgcggccgggccggggagcgggcgcggcccggcggcctcagcatggaggacggcttctccagctacagcagcctgtacgacacgtcctcgctgctccagttctgcaacgatgacagcgcttctgctgcaagtagcatggaggtgacagaccgcattgcttcactggagcagagagtccagatgcaagaagacgacatccagctgctcaaatcagctctagctgatgtggttcggcggctgaacattactgaggaacagcaggccgtgcttaacaggaaaggacctaccaaagcaagaccactgatgcagaccctgcctttaagaaccacggtcaacaatggcactgtgttaccaaagaaacctactggctctctaccatccccctccggggtcaggaaagaaactgctgtgccagcaaccaaaagtaacatcaagaggaccagctcttctgaacgagtgtctcctgggggtcgaagggaaagcaatggggattccagaggaaaccggaatcgcacaggctccaccagcagctcttccagtggcaaaaagaacagtgaaagcaaacccaaggagcctgtattcagtgcagaagaaggctatgtaaaaatgtttcttcgtggacgccctgttaccatgtacatgcccaaagatcaagtggattcttacagcttggaagcaaaagtagaacttccaaccaagagactcaagctggaatgggtctatgggtacaggggtcgagactgccgtaacaacctgtacttgcttccgacgggagagaccgtctacttcatcgcatccgtggtggtgttatacaacgtggaggagcaactgcagaggcattacgctggccacaacgatgacgtgaagtgcctagcagttcatcctgatcggatcacgatagcaacaggacaagttgcgggcacatcgaaggatggaaaacaattgcccccacatgtgcgcatctgggattctgtgacattgaatactctccacgtcattggaataggtttttttgaccgagcagtcacctgtattgcattctcaaaatctaatggaggaaccaatctctgtgctgtggatgactccaacgaccatgtgctctctgtatgggactggcagaaagaagaaaaactagcagatgtgaagtgctctaatgaagctgtgtttgctgcggatttccaccccacggacaccaacatcatagttacttgtggaaaatcacatctctacttttggacactagaaggaagctcccttaataagaagcaaggattattcgagaaacaagaaaagccaaagtttgtcctctgtgtgactttctctgaaaacggtgacaccattactggagattcaagtggcaacatcttagtatggggaaaaggtacaaatcgaataagctatgcagttcagggggcccatgagggtggcatttttgcactttgtatgttaagagatggcacactggtgtcgggaggtgggaaagaccgaaagctcatttcttggagcggaaactatcaaaaacttcgtaaaacggagattccagaacagtttggtccaatacggacagtggccgaggggaaaggcgatgtgatcttgattggcacaactcgaaactttgtcctgcagggcactctgtcaggggacttcacacccattactcagggtcacactgatgagctctggggactggccatccatgcctcaaaatctcagttcttgacctgtgggcatgacaagcatgccactctctgggacgctgtgggtcaccgtcccgtctgggacaaaataatagaggatccagctcagtcttctggttttcatccttcagggtctgtggttgcagtcggaacactcactgggaggtggtttgtgtttgacacagaaacaaaagacttggtcaccgttcacacagatggaaacgaacagctctctgtaatgcgatactcaccagatgggaatttcttagccataggctcacatgacaactgcatctatatatatggcgttagtgacaacgggaggaagtacacgcgagtgggcaagtgctcgggtcattccagcttcattactcacctggactggtctgtaaactcacagttcctcgtgtcaaattccggagactacgaaatcctctactgggttccctctgcctgtaagcaagtcgtaagtgtggaaactacaagagacattgaatgggctacctatacctgcactttgggattccatgtttttggagtgtggccagaaggctcggacggaaccgacatcaatgccgtctgtcgggcccatgagaagaaactcctgtcaacaggcgacgactttggcaaagtgcacctcttctcatacccctgctcgcagttcagggctccaagccacatctacggcgggcacagcagccatgtcaccaatgtcgatttcctctgtgaagacagccacctcatctccacgggcgggaaagacacaagcatcatgcagtggcgcgtcatttagtacccaccgagagctgtggggagcagcatgggcaaggaagacacagactcgcattacccttggtcactgtgatttctgttttgtttaaaaaattcttacaaacctcaggaaaactgtgccctccgccggctaccttagcttagcgtgtcagcgggcgccacagcggatcagcggttccgtgttcacttttgttgtacaatatatgacacagtgcacattgaataccaacaaggttgcaacgtttacattatagccacatcaacagaagtaactggtatattcttagtaacttttctatgaactcttcaaaaatggtcacagaatgccttttaaaacattgtatataatcttcactgtttcaccatctagcttgctaagtcaaatatttatgatgataatgaggtactgaaccacgatggctgttgaggaattggtcctaaaaggacagatcacttcagaagagtgaataactgatttgcacagctgaatcaggagacacaaagatgagactgtgtttggttacattttccaaagtttcattgcattctcccttggggaggctgtgagagagggcttgtatccctcttgtgctaagcagactctactcctaactgacttcaatatttcagcagggtacacaggcgtttccaagtttcagtgacaccgtcctgcctaaccagatgcggtcagcctcttcacacccacctggcttgcatcccccatcccttgttcacacgccctgattcacggtgagacattttgccaccttcttgtgtatattacttggcatgagatgatattgtacttgtataggattctagcaattcataataaatatgtaagactaggctttactgtcttatgcttatggacattgtatatttgtattttatgaccaagtagaccaagtcagaaagatctctctcgagcgtaccataaacctgcagagagaagtctcgaaaggctccaccaggtaccaagggcagctgcttttcctgtcttttgtgcatgggcgacccattacagtatgagataagattgagttctgatgcgttaaacggaggtggcagaaatttgtcaagaaggccttatccatttcgattgtgtgacagattgaaatttattgtttacattggggaatgtatctcaaatttttaaatagaagagtaataaacagactttaaagcaaatattaagatttttactcattcaaggcaagtaaatgaatggaattatctgagctctatggcactggttgtttagagtgactgatgaagtgcaactttcaaaaacatttttgatgacatcaccagcctactgcagaagtgcagggcaccagtaaacaccatgtattattgaagatgaatctgtttgtatgtatccttgtcaaatatattctataatgaaataaaatctgaaaagtggatttcttattgacctatattcatgaaagcatataaattaaaatatttaaaattagatatgattcacactatattctgtttcatatgcagattttattctcacctgggccatttgcagatgagactgtagtttgcagatgagactgtagtttgcagatggcgtggaagcattcatcaggggagataaccataaaggatttggcctaattaccatactcaattgtcagtttacgtggttttgtgaatactggcaaaagcaattgtttttaaattaacaatggagagaatgataagatgagggaaggaaaaggcattcattattgacttacatgtcagtaaggtctgcttttatttctatgtactcctgtttgccaagctcaataatggacaaaggatacaaacacacacacatctactattttagataaatgtactgttatatatatatgtaaactactattgctctctttataatgattaatcactttattatgaatgaatgaatgaatttgatggatttaaaa

SEQ ID NO: 146267 - protein, 297 aa, Artificial Sequence
  derived and/or modified sequence
MRALRAGLTLASGAGLGAVVEGWRRRREDARAAPGLLGRLPVLPVAAAAELPPVPGGPRGPGELAKYGLPGLAQLKSRESYVLCYDPRTRGALWVVEQLRPERLRGDGDRRECDFREDDSVHAYHRATNADYRGSGFDRGHLAAAANHRWSQKAMDDTFYLSNVAPQVPHLNQNAWNNLEKYSRSLTRSYQNVYVCTGPLFLPRTEADGKSYVKYQVIGKNHVAVPTHFFKVLILEAAGGQIELRTYVMPNAPVDEAIPLERFLVPIESIERASGLLFVPNILARAGSLKAITAGSK

SEQ ID NO: 146268 - DNA, 894 bp, Artificial Sequence
  derived and/or modified sequence
atgcgcgccctgagagccgggctgacattggccagcggagcaggcttgggcgcagtggtcgagggctggcgaagacgtcgagaggacgcacgagcagcccctggattgttgggccggctgcctgtgttacccgtggcggccgctgcagagctccccccggtaccaggtggacctcgtggccccggcgagctggcaaagtacggcctgccaggcctggcacaacttaagtctagggagtcctatgttctctgctacgaccctcgcactagaggcgccctctgggtggttgaacagctgcgacccgaaaggctccgcggagatggtgaccgcagggagtgcgacttcagagaggatgactccgtgcacgcctaccatagggccaccaatgcggattatagaggatccggattcgataggggacatctggccgccgcggctaaccacagatggtctcagaaagctatggacgacaccttctacctttccaatgtagccccccaagtcccccacctgaatcagaacgcttggaacaacctcgaaaagtattcacggagcctgacacgttcttaccagaacgtgtatgtctgtacaggcccgctcttcctgcctcggaccgaagcagatgggaagtcatatgtcaagtatcaggtgatcggcaaaaaccatgtggcggtgcccacccattttttcaaagtccttatccttgaagccgcgggtggacagatagagctaagaacttatgtcatgccgaatgcccccgtggatgaggccatccccctggaaagatttctggtccctattgagagcattgagcgagcttcagggcttttgttcgtgcccaatatccttgcacgcgccggcagtctgaaggccattaccgcaggatcgaaatag

SEQ ID NO: 146269 - DNA, 894 bp, Artificial Sequence
  derived and/or modified sequence
atgagggccctgcgggccggcctgaccctggccagcggggccggcctgggcgctgtggtggagggctggaggagaagaagagaagatgcccgggccgcccctggcctgctgggccgcctgcctgtgctgcctgtggccgctgctgctgagctgccccctgtgcctgggggcccccggggccctggagagctggccaagtatggcctgcccggcctggcccagctgaagagccgggagagctatgtgctgtgctatgaccccaggaccaggggggccctgtgggtggtggagcagctgcggcctgagcggctgcggggagatggagaccggcgggagtgtgacttcagagaagatgacagcgtgcacgcctaccaccgggccaccaatgctgactaccggggcagcggctttgaccggggccacctggccgctgctgccaaccaccgctggagccagaaggccatggatgacaccttctacctgagcaatgtggccccccaggtgccccacctgaaccagaatgcctggaacaacctggagaagtacagccgcagcctgaccaggagctaccagaatgtgtatgtgtgcaccggccccctcttcctgcccaggacagaagcagatggcaagagctatgtgaagtaccaggtgattggcaagaaccacgtggccgtgcccacccacttcttcaaggtgctgatcctggaggccgccggcggccagatcgagctgcggacctacgtgatgcccaatgcccctgtggatgaggccatccccctggagcgcttcctggtgcccatcgagagcattgaaagagccagcggcctgctgtttgtgcccaacatcctggcccgggccggcagcctgaaggccatcacagctggcagcaagtag

SEQ ID NO: 146270 - DNA, 894 bp, Artificial Sequence
  derived and/or modified sequence
atgcgggccctgcgggccggcctgaccctggccagcggcgccggcctgggagcagttgtggaaggatggcgccggcgcagagaggacgcccgtgctgctcctgggttgctgggtagactgcccgtcttgcctgtggcggcagcagccgagctgccacctgtcccagggggtcctcggggcccaggcgaacttgcaaagtacggtctgcctggactcgcacagttaaagtcacgggagtcctatgtcctttgctacgatccccggactcggggcgctctgtgggtggtcgaacagctgcgtcccgaacggctgagaggggacggcgaccgtcgtgagtgcgactttcgcgaggacgatagcgtgcacgcttatcacagagctaccaacgctgactacagagggtccggcttcgatagggggcatctcgcagcagccgccaaccataggtggtctcagaaggccatggatgacacattttacctatcaaacgtcgccccccaggttccccacctcaatcagaatgcatggaataaccttgagaagtattcgcgatctctgactcgttcctaccagaacgtttatgtgtgtaccggcccgctcttcctgccaaggaccgaagccgacgggaagtcatatgtaaagtaccaggtgattggtaagaaccacgttgcagtccctacacatttttttaaggtgcttattctcgaagccgccgggggccagatcgagcttcgaacctacgtaatgcccaacgctccagtggatgaagcaatcccacttgagagatttctggtgccgatcgagtcaatcgaacgcgccagtggtttattgtttgtgccgaatatcttagcgcgtgctggcagccttaaagctatcaccgccggctccaaatag

SEQ ID NO: 146271 - DNA, 894 bp, Artificial Sequence
  derived and/or modified sequence
atgcgggctttgcgcgctggcctgacactggcgagtggtgccggtctcggggcagttgttgaaggatggcggcgtcggagagaggatgctcgggctgcacctggcctgctgggcaggctgcctgtgcttccagttgctgctgctgcagagctaccgccagtgcccggagggccacggggtcctggagagctggcaaaatatgggctacctggactggcccagcttaagtcccgtgagtcttatgtattgtgttacgacccgcgaacccgcggtgcattatgggttgtggaacagctgagacccgagagactgaggggagacggtgataggcgagaatgcgattttcgtgaggacgactctgtacatgcctaccaccgagcaaccaatgccgactatagaggatctgggtttgacagggggcaccttgctgctgcagctaaccatcgttggtcacagaaggcaatggacgacaccttctacctctcgaatgtggccccacaggtgccgcacctgaatcagaatgcttggaacaatttggaaaagtactccaggtcactgacacggtcctatcagaacgtgtacgtgtgcaccggcccactctttctgcccagaaccgaagcagatggtaagtcatatgtaaaataccaggtgatcggcaagaatcacgtggctgtgccaacacatttcttcaaggtacttatactcgaggctgcagggggtcagattgaactgagaacatatgttatgccgaacgctccggtggatgaggcaatccctctcgaacgattcctggttccgatcgaaagcatcgaacgcgcttccggactgctcttcgtacctaacatcctggcgcgtgccggttcattgaaagcaattactgccggaagtaaatag

SEQ ID NO: 146272 - DNA, 894 bp, Artificial Sequence
  derived and/or modified sequence
atgagagccctgagagccggcctgaccctggccagcggcgccggcctgggcgccgtggtggagggctggagaagaagaagagaggacgccagagccgcccccggcctgctgggcagactgcccgtgctgcccgtggccgccgccgccgagctgccccccgtgcccggcggccccagaggccccggcgagctggccaagtacggcctgcccggcctggcccagctgaagagcagagagagctacgtgctgtgctacgaccccagaaccagaggcgccctgtgggtggtggagcagctgagacccgagagactgagaggcgacggcgacagaagagagtgcgacttcagagaggacgacagcgtgcacgcctaccacagagccaccaacgccgactacagaggcagcggcttcgacagaggccacctggccgccgccgccaaccacagatggagccagaaggccatggacgacaccttctacctgagcaacgtggccccccaggtgccccacctgaaccagaacgcctggaacaacctggagaagtacagcagaagcctgaccagaagctaccagaacgtgtacgtgtgcaccggccccctgttcctgcccagaaccgaggccgacggcaagagctacgtgaagtaccaggtgatcggcaagaaccacgtggccgtgcccacccacttcttcaaggtgctgatcctggaggccgccggcggccagatcgagctgagaacctacgtgatgcccaacgcccccgtggacgaggccatccccctggagagattcctggtgcccatcgagagcatcgagagagccagcggcctgctgttcgtgcccaacatcctggccagagccggcagcctgaaggccatcaccgccggcagcaagtag

SEQ ID NO: 146273 - DNA, 1172 bp, Artificial Sequence
  derived and/or modified sequence
aaatgcgcaaagaaaggacgccggggacacccggttgggctctgctgctcccttctgggttccgaggcccaagcccttggcagtgtttgtgagtggaagggaggtcacgctatcgtccgcggccccagcagccctgtgccctcgttggatcccgcgacgcggctcctttaagagcctcgcgggtcgcccgccgctaggtcgctccccggccatgcgggcgctgcgggccggcctgaccctggcgtcgggcgcggggctgggtgcggtcgtcgagggctggcggcggcggcgggaggacgcgcgggcggcgccgggactgctgggccggctgcccgtgctgcccgtggcggcggcagccgagttgccccctgtgcccgggggaccccgcggcccgggcgagctggccaagtacgggctgccggggctggcgcagctcaagagccgcgagtcgtacgtgctgtgctacgacccgcgcacccgcggcgcgctctgggtggtggagcagctgcgacccgagcgtctccgcggcgacggcgaccggcgcgagtgcgacttccgcgaggacgactcggtgcacgcgtaccaccgtgccaccaacgccgactaccgcggcagtggcttcgaccgcggtcacctggccgccgccgccaaccaccgctggagccagaaggccatggacgacacgttctacctgagcaacgtcgcgccccaggtgccccacctcaaccagaatgcctggaacaacctggagaaatatagccgcagcttgacccgcagctaccaaaacgtctatgtctgcacagggccactcttcctgcccaggacagaggctgatgggaaatcctacgtaaagtaccaggtcatcggcaagaaccacgtggcagtgcccacacacttcttcaaggtgctgatcctggaggcagcaggtgggcaaattgagctccgcacctacgtgatgcccaacgcacctgtggatgaggccatcccactggagcgcttcctggtgcccatcgagagcattgagcgggcttcggggctgctctttgtgccaaacatcctggcgcgggcaggcagcctcaaggccatcacggcgggcagtaagtgagggtggagcccagtgagactgtgggtgtgtgcaggccggggagtattaaaggtggtgatttttggag

SEQ ID NO: 146274 - protein, 1037 aa, Artificial Sequence
  derived and/or modified sequence
MRGSGPRGAGRRRPPSGGGDTPITPASLAGCYSAPRRAPLWTCLLLCAALRTLLASPSNEVNLLDSRTVMGDLGWIAFPKNGWEEIGEVDENYAPIHTYQVCKVMEQNQNNWLLTSWISNEGASRIFIELKFTLRDCNSLPGGLGTCKETFNMYYFESDDQNGRNIKENQYIKIDTIAADESFTELDLGDRVMKLNTEVRDVGPLSKKGFYLAFQDVGACIALVSVRVYYKKCPSVVRHLAVFPDTITGADSSQLLEVSGSCVNHSVTDEPPKMHCSAEGEWLVPIGKCMCKAGYEEKNGTCQVCRPGFFKASPHIQSCGKCPPHSYTHEEASTSCVCEKDYFRRESDPPTMACTRPPSAPRNAISNVNETSVFLEWIPPADTGGRKDVSYYIACKKCNSHAGVCEECGGHVRYLPRQSGLKNTSVMMVDLLAHTNYTFEIEAVNGVSDLSPGARQYVSVNVTTNQAAPSPVTNVKKGKIAKNSISLSWQEPDRPNGIILEYEIKYFEKDQETSYTIIKSKETTITAEGLKPASVYVFQIRARTAAGYGVFSRRFEFETTPVFAASSDQSQIPVIAVSVTVGVILLAVVIGVLLSGSCCECGCGRASSLCAVAHPSLIWRCGYSKAKQDPEEEKMHFHNGHIKLPGVRTYIDPHTYEDPNQAVHEFAKEIEASCITIERVIGAGEFGEVCSGRLKLPGKRELPVAIKTLKVGYTEKQRRDFLGEASIMGQFDHPNIIHLEGVVTKSKPVMIVTEYMENGSLDTFLKKNDGQFTVIQLVGMLRGISAGMKYLSDMGYVHRDLAARNILINSNLVCKVSDFGLSRVLEDDPEAAYTTRGGKIPIRWTAPEAIAFRKFTSASDVWSYGIVMWEVVSYGERPYWEMTNQDVIKAVEEGYRLPSPMDCPAALYQLMLDCWQKERNSRPKFDEIVNMLDKLIRNPSSLKTLVNASCRVSNLLAEHSPLGSGAYRSVGEWLEAIKMGRYTEIFMENGYSSMDAVAQVTLEDLRRLGVTLVGHQKKIMNSLQEMKVQLVNGMVPL

SEQ ID NO: 146275 - DNA, 3114 bp, Artificial Sequence
  derived and/or modified sequence
atgcgcgggtcgggccctcgtggcgctggtcggcggcgcccccccagcggtggcggcgacactcctatcactcccgcctcactggcaggctgttactctgccccccggagagcccccctgtggacctgcctgctgctgtgcgcagctcttaggacgctgctggcatccccctccaacgaggtaaacctactggacagtagaaccgttatgggagacctaggttggatcgcattccccaagaacggatgggaggaaatcggcgaggtagacgagaactacgcacctattcacacataccaagtctgcaaagttatggagcagaatcagaacaactggcttctgactagttggatcagtaatgaaggcgctagtaggattttcatcgaactgaaattcacactaagagactgcaacagcctccccggcggacttggcacctgcaaggaaactttcaacatgtattacttcgaatccgacgatcaaaacgggaggaatatcaaagagaaccaatatatcaaaattgatacgattgcagcagacgagagctttacagagctggacctgggtgatagggtgatgaagctaaataccgaggtgagagacgtgggtccactaagtaagaagggattctacctggcctttcaggacgttggcgcttgtatcgctctggtgtccgtgagagtttattacaagaagtgcccctccgtcgtgcggcacctcgcggtgttcccagatacgatcacgggggctgacagcagccagttactggaggtttccggctcttgcgtgaatcatagtgtgacagatgagcctcccaaaatgcattgctctgctgaaggggaatggctggtgccaattggaaagtgtatgtgcaaggcagggtacgaggagaagaatggaacttgtcaggtgtgccgtcctggcttcttcaaagcttcgccccacatacagtcatgcggaaaatgcccgccccacagttatacccacgaggaggcaagtacatcttgcgtgtgcgaaaaggactactttagacgggaaagtgatccacccaccatggcttgcacaagaccacctagcgcccccagaaacgctatttccaacgtcaatgaaaccagcgtatttttagagtggattccccctgccgacactggaggacgcaaggacgtgagctattatattgcctgtaaaaaatgcaatagccacgccggcgtgtgcgaagagtgcggcggtcacgtccgctacctacctcgtcaaagcgggcttaaaaatacctcagtgatgatggtggatctgctagcccataccaattacacttttgaaatagaagccgtgaacggcgtctctgacctctcaccgggcgcacgccagtatgtgtccgtgaacgtcaccaccaatcaggcagctccatctccggtgaccaatgttaaaaaagggaaaattgcgaagaatagcataagcctaagctggcaggagcccgatcggccgaacggcattattttggaatatgaaattaaatacttcgagaaagaccaggagacttcttacacgatcattaagtcgaaagagaccacaattaccgctgagggccttaaaccagcgtcagtctacgtatttcagatcagggctcgaaccgctgccggctatggcgttttcagccgccgtttcgaattcgagaccacaccagtatttgccgcttcatcggatcagtctcaaatccctgtgatcgctgtctcggttacagtgggcgtgattttattggctgtagtaatcggcgtcctcctgtctggatcttgttgcgaatgtggatgcgggcgcgcatccagtctgtgcgctgtggcccacccctctctgatatggaggtgtggctactccaaggctaaacaggaccctgaagaggagaagatgcacttccataatggccacataaagctgccaggagtacggacatatatagacccccacacttacgaagaccctaatcaggcagtacacgagttcgcaaaagaaatagaggcttcctgcatcactatcgagagagtgataggcgccggcgaattcggtgaggtgtgctcaggtcggttgaagcttcctggcaaacgcgagttacctgtggctatcaaaacacttaaagtgggatacaccgagaagcaacgccgcgatttcttaggggaggcttccattatgggccagttcgaccatcctaacattatacacttggagggcgtggtcacgaaaagcaaaccggtcatgatcgtaacagaatacatggaaaacggaagcctggacacctttctgaagaagaacgacggccagtttactgtcatacagttggtcggtatgctgcgcgggatttcagccggtatgaagtacctgtccgatatgggatacgtccaccgcgacctggctgcaaggaatattttgatcaacagcaatttagtttgcaaagtcagcgatttcggattgtccagggttttggaggacgatcccgaggcagcttacaccacccgtggaggcaagatcccgattagatggacagctcccgaagctatcgcattcaggaaattcacttctgcctccgatgtgtggagctatggtatcgtgatgtgggaggtcgtttcttatggagagcgaccctactgggagatgacgaatcaggacgttatcaaggctgtggaggaaggttatagactgccctctcccatggactgccctgccgcactatatcaattgatgctggactgctggcagaaagaaaggaattcacggccaaaatttgacgagatcgtcaacatgctggacaagctgattcggaacccctcatcgctgaagaccctcgtcaatgcttcttgtcgtgtctccaaccttttggccgagcactctcccttggggtccggagcctatcggtccgtgggtgagtggctggaagccatcaagatgggccgatacactgaaattttcatggagaacgggtacagcagcatggatgcggtggcccaagtcacactggaggacctgcgacgtctcggcgtcacactggttggccaccagaaaaagatcatgaactctctccaggagatgaaggtgcagctggtcaacggcatggttccactttag

SEQ ID NO: 146276 - DNA, 3114 bp, Artificial Sequence
  derived and/or modified sequence
atgaggggcagcggccccagaggagctggaagaagaagaccacccagcggcggcggggacacccccatcaccccagccagcctggccggctgctacagcgccccccggcgggcccccctgtggacctgcctgctgctgtgtgccgccctgcggaccctgctggccagccccagcaatgaggtgaacctgctggacagcaggacagtgatgggagacctgggctggatcgccttccccaagaatggctgggaggagatcggggaggtggatgaaaattatgcccccatccacacctaccaggtgtgcaaggtgatggagcagaaccagaacaactggctgctgacctcctggatcagcaatgaaggagccagccgcatcttcatcgagctgaagttcaccctgcgggactgcaacagcctgcccggcggcctgggcacctgcaaggagaccttcaacatgtactactttgaaagtgatgaccagaatggaagaaacatcaaggagaaccagtacatcaagattgacaccatcgctgctgatgagagcttcacagagctggacctgggggacagagtgatgaagctgaacacagaggtgagagatgtgggccccctgagcaagaagggcttctacctggccttccaggatgtgggcgcctgcatcgccctggtgtctgtgcgggtgtactacaagaagtgccccagcgtggtgcgccacctggccgtgtttcctgacaccatcaccggggctgacagcagccagctgctggaggtgtctggcagctgtgtgaaccacagcgtgacagatgagccccccaagatgcactgcagcgctgagggggagtggctggtgcccatcggcaagtgcatgtgcaaggccggctatgaggagaagaatggcacctgccaggtgtgcaggcctggcttcttcaaggccagcccccacatccagagctgtgggaaatgtcctccccacagctacacccatgaggaggccagcaccagctgtgtgtgtgagaaggactacttccggcgggagagtgacccccccaccatggcctgcaccaggcctccttctgcccccagaaatgccatcagcaatgtgaatgagaccagcgtcttcctggagtggatccccccagctgacacaggaggcaggaaggatgtgtcctactacatcgcctgcaagaagtgcaacagccacgccggcgtgtgtgaagaatgtggcggccacgtgcgctacctgccccggcagagcggcctgaagaacacctctgtgatgatggtggacctgctggcccacaccaactacacctttgaaattgaagctgtgaatggagtgtctgacctgagccctggggcccggcagtatgtgtctgtgaatgtgaccaccaaccaggccgcccccagccctgtgaccaacgtgaagaagggcaagatcgccaagaacagcatcagcctgtcctggcaggagccagaccggcccaacggcatcatcctggagtatgagatcaagtactttgagaaggaccaggagaccagctacaccatcatcaagagcaaggagaccaccatcacagctgagggcctgaagccagcctctgtgtatgtgttccagatccgggccaggacagctgctggctacggcgtcttcagcagaagatttgaatttgagaccacccctgtgtttgctgccagcagtgaccagagccagatccctgtgattgctgtgtctgtgacagtgggcgtcatcctgctggccgtggtgattggagtgctgctgagcggcagctgctgtgaatgtggctgcggccgggccagcagcctgtgtgctgtggcccaccccagcctcatctggaggtgtggctacagcaaggccaagcaggaccctgaggaggagaagatgcacttccacaacggccacatcaagctgcccggggtgaggacctacatcgacccccacacctatgaggaccccaaccaggccgtgcatgaatttgccaaggagattgaggccagctgcatcaccatcgagcgggtgattggagctggggagtttggagaggtgtgcagcggccgcctgaagctgcccgggaagcgggagctgcctgtggccatcaagaccctgaaggtgggctacacagagaagcagaggcgggacttcctgggggaggccagcatcatgggccagtttgaccaccccaacatcatccacctggagggcgtggtgaccaagagcaagcctgtgatgattgtgacagagtacatggagaatggcagcctggacaccttcctgaagaagaatgatggccagttcaccgtcatccagctggtgggcatgctgcggggcatctctgctggcatgaagtacctgagtgacatgggctacgtgcaccgggacctggccgccaggaacatcctgatcaacagcaacctggtgtgcaaggtgtctgactttggcctgagccgggtgctggaggatgatcctgaggccgcctacaccacccggggcggcaagatccccatccgctggacagcccctgaggccatcgccttcaggaagttcaccagcgccagtgatgtgtggagctatggcatcgtgatgtgggaggtggtgtcctatggagagcggccctactgggagatgaccaaccaggacgtcatcaaggctgtggaggagggctaccgcctgcccagccccatggactgcccagctgccctgtaccagctgatgctggactgctggcagaaggagaggaacagccggcccaagtttgatgagatcgtgaacatgctggacaagctgatccggaaccccagcagcctgaagaccctggtgaatgccagctgccgggtgagcaacctgctggccgagcacagccccctgggcagcggggcctacagatctgtgggggagtggctggaggccatcaagatgggccgctacacagagatcttcatggagaatggctacagctccatggatgctgtggcccaggtgaccctggaggacctgcggcggctgggcgtgaccctggtgggccaccagaagaagatcatgaacagcctgcaggagatgaaggtgcagctggtgaatggcatggtgcccctgtag

SEQ ID NO: 146277 - DNA, 3114 bp, Artificial Sequence
  derived and/or modified sequence
atgcggggcagcggcccccggggcgccggccggcggcggccccccagcgggggaggtgacacccccatcactccagcctctctggccgggtgttactcagcccccagacgcgcgcccttgtggacttgcctgctgctgtgtgccgcgcttcgtaccttgctcgcctctccaagtaatgaagtaaatctgttagatagccgcacggtgatgggggatcttggctggattgcattccccaaaaacggttgggaggaaatcggggaagtggacgagaactatgcacctattcatacctatcaggtgtgtaaggtcatggagcaaaatcagaacaactggctgttaacaagctggatttccaatgagggggcctctagaatcttcatcgagctcaagttcacacttagggactgtaactctttgcctggcgggcttggaacatgtaaagaaaccttcaacatgtattactttgagtccgacgatcaaaacgggcgtaatatcaaggagaatcaatacattaagatagacaccattgcagcagacgagtccttcaccgaattggatctgggggatagagtcatgaaactgaatactgaagtcagggacgtagggccactgtcaaagaaaggcttttatttggccttccaagacgtgggtgcatgcatcgccctggtatccgtaagggtttactacaaaaagtgtccgtctgttgttagacacctcgccgtatttcctgatacaatcaccggggcggactcatctcagctcctggaggtctcaggctcgtgcgtgaaccactctgttacagacgaaccacccaagatgcactgctcagcagaaggggaatggctcgtcccaataggaaaatgcatgtgcaaggcaggatacgaggaaaaaaacggaacttgccaggtgtgtcgtcccggattctttaaggctagcccccatatacagagctgcggaaagtgtccaccccattcttacactcacgaggaagcatctacgtcctgtgtgtgtgaaaaagactatttccgccgggaatccgaccctccaacgatggcatgtacaaggccaccttcggccccacggaacgccatcagtaacgtgaatgagacctctgtcttcctggagtggatcccaccagcagacactggcgggcgcaaagatgtctcctactacatcgcttgtaagaaatgcaactcccacgccggcgtctgcgaagaatgtggcggacacgtcaggtacttaccccgccagtccggcctcaaaaacacatctgtcatgatggttgatctgttagcccatactaattacaccttcgagattgaggctgtaaacggcgtgagcgacctgtcccctggcgcacgccagtatgtcagcgtgaatgtgaccacgaatcaagcagcaccctcgcccgttaccaatgttaaaaaagggaagatagctaaaaactctatctccctaagctggcaggaacccgaccgacctaacggtataatcttggaatatgaaattaagtactttgagaaggatcaggagacatcatacactatcatcaaatctaaagaaactacaattactgctgagggattgaaacccgcatctgtgtacgtttttcagatacgtgctagaactgcagcggggtatggagtgtttagtaggcgtttcgaatttgagaccacccctgttttcgctgcaagttcagaccagagtcaaataccagtcattgctgtctcagttacagtgggggtgatcctcttggctgtggttattggggtgctgctcagcggctcatgctgcgaatgtggctgtggccgtgctagctcactgtgtgctgtggcgcatccatcgttgatctggcgctgtggctatagcaaagctaaacaagaccccgaggaggaaaagatgcacttccacaatggacacattaagctgccgggagtgaggacatacatcgacccccacacatatgaggacccaaaccaggcagtccatgagtttgcaaaggaaattgaagccagctgcattacgattgagcgcgtgattggggcaggtgaatttggtgaagtgtgtagtggtaggctgaaactccctggcaagcgggagctgcctgtcgccattaagacactgaaagtcgggtacacagagaaacagagacgggacttcctcggggaagctagtattatgggccaattcgatcacccgaatattatacacctggagggtgtagtgactaaaagcaaacccgtgatgatagtgactgaatacatggagaacggcagcctcgacacatttctgaaaaagaacgacggtcagttcaccgtcatccaattggttggcatgttgagagggatctccgctggaatgaagtatctttcggacatgggttatgtccatcgcgacctggcagccaggaacatcctcatcaatagtaacctggtctgtaaagtgtcagatttcgggctgtcacgagtgttagaggatgaccctgaagccgcttacactactcgtggtggaaagatccccattcgctggacagccccagaggcaattgcgttccgcaaattcacctccgcgagcgacgtctggtcctatggcatcgtcatgtgggaggtggtcagctacggtgagagaccatattgggagatgactaaccaggacgttatcaaggcagtggaggaggggtacagactgccatcgccaatggattgtcctgcagccttgtatcagctaatgcttgattgctggcaaaaagagaggaattctcgacccaaatttgacgaaatcgtgaacatgttggacaagctgattcggaacccaagctcgctgaaaaccctggtaaatgcgtcgtgcagggtttctaacctgctggccgagcacagcccccttggatctggcgcctaccgttctgttggtgagtggttagaagctatcaagatggggagatacaccgaaatatttatggagaacggctactcaagcatggacgctgtcgcgcaggtgacgttggaggacctacggcgtctgggagtgacattggttggccatcagaaaaaaattatgaatagcttacaagagatgaaagtccaactcgtgaacggcatggttcctctgtag

SEQ ID NO: 146278 - DNA, 3114 bp, Artificial Sequence
  derived and/or modified sequence
atgcgcggttccggaccaagaggagctggccgacggagacctcccagtggcggtggcgatactccgataacacccgcatccctggcaggatgttactccgcacccaggagagcgcctctctggacgtgtctgttattatgcgcagccctgcgaacactgctcgcatctcctagcaacgaggtgaacctgctggactcccgaactgtgatgggtgatttaggctggatagcatttcctaaaaacggctgggaggaaatcggggaggtggacgagaattatgccccaatccacacctatcaggtttgtaaggtcatggagcagaatcagaacaactggctcctgacttcctggattagtaatgagggggctagcaggatcttcatcgagctgaagttcacattgcgggattgcaatagtttgccgggtggccttggaacctgcaaggagaccttcaacatgtactactttgagtctgacgaccagaatggcaggaacatcaaagaaaatcagtacattaaaatcgataccatagccgctgacgagagctttacagagctggacttgggcgaccgggtcatgaagctcaataccgaagtacgggatgttggaccgttatccaaaaaagggttttacttagcgtttcaggacgttggagcgtgtattgcactggtgtcagttagagtgtactacaagaagtgcccctcggtggtaaggcatctagcagtattccctgataccatcactggagccgactcttctcagctactggaggtgtcaggaagctgtgtgaatcattccgtgaccgacgagccccctaaaatgcactgtagcgcagaaggtgagtggctggtccccattggaaagtgcatgtgtaaggcaggatacgaagagaagaatggaacctgccaggtttgtcgaccaggattcttcaaggctagcccccacatacagtcttgcggaaagtgccccccacactcgtacacccacgaggaagcctcaacaagctgtgtgtgtgagaaggactattttaggagggaaagcgacccgcctaccatggcttgcaccaggccaccttcagccccacgtaacgctatcagtaatgttaatgaaactagcgtatttctcgagtggatacccccagctgatacaggaggaaggaaagacgtgtcttactatatcgcgtgcaaaaagtgcaattcccacgccggagtctgtgaagagtgtgggggacacgtacgttatcttcccaggcaatcagggctgaagaatacaagcgtgatgatggtggacctcctggctcatactaactacacatttgagatcgaggccgtcaacggcgtgagtgacttgtcaccgggagccagacagtatgtgagtgtgaacgtcacaacaaatcaggccgctccatcccctgttactaatgtcaagaaagggaagattgcgaagaatagtatctccctgagctggcaggagccagaccgccctaatgggatcattttggagtatgagattaagtactttgaaaaggatcaggagacctcttacaccataattaagagcaaggagaccaccatcacagcagagggcctgaagcctgccagcgtgtacgtgtttcagataagagcacgtacggccgcaggctacggtgtgttcagtagacgatttgagtttgaaaccactcctgtattcgcagcaagcagcgatcaaagccagatcccagtaatagctgtctcagtcacagttggcgtgatcctactggccgtagtgatcggggtactcctcagtggatcttgttgcgagtgcggctgtggtcgagcatcatctctctgcgcagttgcccatccatcgttaatttggcgttgcggctactcgaaagccaagcaggatcccgaggaagaaaagatgcacttccataatgggcacatcaagctcccaggcgtgcgcacctatattgatccacacacatacgaggatccaaatcaggctgtgcacgagtttgcaaaagaaatcgaggcaagctgcattaccattgagagagtcataggggcaggggaattcggggaagtttgttccggcaggcttaagctgcccggtaagcgagagctgccagtggccatcaagaccctcaaggttggctatactgagaagcagcggagagacttcctgggggaggcatcaataatggggcagttcgatcaccctaatattattcacctggagggggtggtgaccaagagcaagccagtcatgatagtcaccgagtacatggagaacgggtccctggacacattcttgaagaagaacgacggacagtttactgtcatccagttggtgggcatgctgcggggaattagcgccggtatgaagtacttgagcgacatgggctacgtacaccgagacctggccgctcgcaacatccttataaactcaaacctggtctgcaaggtgagtgatttcggtctgagccgcgtactagaggatgaccctgaagccgcatatactacccgaggaggcaagattcccattagatggaccgcacctgaagcgatcgcctttcgcaaatttacttccgcaagcgacgtttggtcttacggcattgtgatgtgggaggtcgtgtcttacggcgaaagaccttactgggagatgactaaccaagacgtcattaaggcagtggaggagggttaccgtttgccttcgcccatggattgccccgctgccttataccaactgatgctggactgttggcaaaaagaaaggaactccaggccaaagtttgacgagatagtgaatatgctcgataaactcataaggaacccctcttcactcaaaacgctggtaaacgcgagctgtcgagtgtcaaacctgctggccgaacacagccctctgggaagcggagcttaccgaagcgtgggagagtggctcgaggctatcaaaatggggcgatatacggagatatttatggagaacggatactcatcgatggacgcagttgcccaagtgaccctcgaggatctgagaaggctgggggtcactcttgtgggccaccagaagaaaatcatgaacagtctccaggagatgaaagtgcagttggtaaacggaatggtgccgctgtag

SEQ ID NO: 146279 - DNA, 3114 bp, Artificial Sequence
  derived and/or modified sequence
atgagaggcagcggccccagaggcgccggcagaagaagaccccccagcggcggcggcgacacccccatcacccccgccagcctggccggctgctacagcgcccccagaagagcccccctgtggacctgcctgctgctgtgcgccgccctgagaaccctgctggccagccccagcaacgaggtgaacctgctggacagcagaaccgtgatgggcgacctgggctggatcgccttccccaagaacggctgggaggagatcggcgaggtggacgagaactacgcccccatccacacctaccaggtgtgcaaggtgatggagcagaaccagaacaactggctgctgaccagctggatcagcaacgagggcgccagcagaatcttcatcgagctgaagttcaccctgagagactgcaacagcctgcccggcggcctgggcacctgcaaggagaccttcaacatgtactacttcgagagcgacgaccagaacggcagaaacatcaaggagaaccagtacatcaagatcgacaccatcgccgccgacgagagcttcaccgagctggacctgggcgacagagtgatgaagctgaacaccgaggtgagagacgtgggccccctgagcaagaagggcttctacctggccttccaggacgtgggcgcctgcatcgccctggtgagcgtgagagtgtactacaagaagtgccccagcgtggtgagacacctggccgtgttccccgacaccatcaccggcgccgacagcagccagctgctggaggtgagcggcagctgcgtgaaccacagcgtgaccgacgagccccccaagatgcactgcagcgccgagggcgagtggctggtgcccatcggcaagtgcatgtgcaaggccggctacgaggagaagaacggcacctgccaggtgtgcagacccggcttcttcaaggccagcccccacatccagagctgcggcaagtgccccccccacagctacacccacgaggaggccagcaccagctgcgtgtgcgagaaggactacttcagaagagagagcgacccccccaccatggcctgcaccagaccccccagcgcccccagaaacgccatcagcaacgtgaacgagaccagcgtgttcctggagtggatcccccccgccgacaccggcggcagaaaggacgtgagctactacatcgcctgcaagaagtgcaacagccacgccggcgtgtgcgaggagtgcggcggccacgtgagatacctgcccagacagagcggcctgaagaacaccagcgtgatgatggtggacctgctggcccacaccaactacaccttcgagatcgaggccgtgaacggcgtgagcgacctgagccccggcgccagacagtacgtgagcgtgaacgtgaccaccaaccaggccgcccccagccccgtgaccaacgtgaagaagggcaagatcgccaagaacagcatcagcctgagctggcaggagcccgacagacccaacggcatcatcctggagtacgagatcaagtacttcgagaaggaccaggagaccagctacaccatcatcaagagcaaggagaccaccatcaccgccgagggcctgaagcccgccagcgtgtacgtgttccagatcagagccagaaccgccgccggctacggcgtgttcagcagaagattcgagttcgagaccacccccgtgttcgccgccagcagcgaccagagccagatccccgtgatcgccgtgagcgtgaccgtgggcgtgatcctgctggccgtggtgatcggcgtgctgctgagcggcagctgctgcgagtgcggctgcggcagagccagcagcctgtgcgccgtggcccaccccagcctgatctggagatgcggctacagcaaggccaagcaggaccccgaggaggagaagatgcacttccacaacggccacatcaagctgcccggcgtgagaacctacatcgacccccacacctacgaggaccccaaccaggccgtgcacgagttcgccaaggagatcgaggccagctgcatcaccatcgagagagtgatcggcgccggcgagttcggcgaggtgtgcagcggcagactgaagctgcccggcaagagagagctgcccgtggccatcaagaccctgaaggtgggctacaccgagaagcagagaagagacttcctgggcgaggccagcatcatgggccagttcgaccaccccaacatcatccacctggagggcgtggtgaccaagagcaagcccgtgatgatcgtgaccgagtacatggagaacggcagcctggacaccttcctgaagaagaacgacggccagttcaccgtgatccagctggtgggcatgctgagaggcatcagcgccggcatgaagtacctgagcgacatgggctacgtgcacagagacctggccgccagaaacatcctgatcaacagcaacctggtgtgcaaggtgagcgacttcggcctgagcagagtgctggaggacgaccccgaggccgcctacaccaccagaggcggcaagatccccatcagatggaccgcccccgaggccatcgccttcagaaagttcaccagcgccagcgacgtgtggagctacggcatcgtgatgtgggaggtggtgagctacggcgagagaccctactgggagatgaccaaccaggacgtgatcaaggccgtggaggagggctacagactgcccagccccatggactgccccgccgccctgtaccagctgatgctggactgctggcagaaggagagaaacagcagacccaagttcgacgagatcgtgaacatgctggacaagctgatcagaaaccccagcagcctgaagaccctggtgaacgccagctgcagagtgagcaacctgctggccgagcacagccccctgggcagcggcgcctacagaagcgtgggcgagtggctggaggccatcaagatgggcagatacaccgagatcttcatggagaacggctacagcagcatggacgccgtggcccaggtgaccctggaggacctgagaagactgggcgtgaccctggtgggccaccagaagaagatcatgaacagcctgcaggagatgaaggtgcagctggtgaacggcatggtgcccctgtag

SEQ ID NO: 146280 - DNA, 8266 bp, Artificial Sequence
  derived and/or modified sequence
tccctcccctcttcagcactcagcccgcagctatttccttctgccagtctctttgaactctggatctttgcttttgctcgctgctctcctgtttttcattctccacattttctcaagtcctctttctttatccttagccaccctgcttttttcctccttttttaaaaaatcggagatttcgtcttaaaatgatttgccttccttaccttcgtccatttcaacactgaaggctgcaaagaaccttcacctttcccctagtggtatttaaaaattctcaatccgtaaaaagtctttttgaaaggcaaaggaacaggacccaggaccctctcgacacccttgatccgagtccagatctgcactagcaaccagaactaatatttcatttaaccccaccaaagggggaggcgagaggagccagaagcaaacttcagctgtctcagccggatccgtggttcctacatttggaggagccgcgtgccagaaggcgtaggaccccaaggggggacaaggaggactcccgagtctcccttcgccgctctgcgaggccgaagcggtggactgagccgctcgggacagcggcaccggaggaggctcggagaagatgcggggctcggggccccggggtgcgggacgccggcggcccccaagcggcggcggcgacacccccatcaccccagcgtccctggccggctgctactctgcacctcgacgggctcccctctggacgtgccttctcctgtgcgccgcactccggaccctcctggccagccccagcaacgaagtgaatttattggattcacgcactgtcatgggggacctgggatggattgcttttccaaaaaatgggtgggaagagattggtgaagtggatgaaaattatgcccctatccacacataccaagtatgcaaagtgatggaacagaatcagaataactggcttttgaccagttggatctccaatgaaggtgcttccagaatcttcatagaactcaaatttaccctgcgggactgcaacagccttcctggaggactggggacctgtaaggaaacctttaatatgtattactttgagtcagatgatcagaatgggagaaacatcaaggaaaaccaatacatcaaaattgataccattgctgccgatgaaagctttacagaacttgatcttggtgaccgtgttatgaaactgaatacagaggtcagagatgtaggacctctaagcaaaaagggattttatcttgcttttcaagatgttggtgcttgcattgctctggtttctgtgcgtgtatactataaaaaatgcccttctgtggtacgacacttggctgtcttccctgacaccatcactggagctgattcttcccaattgctcgaagtgtcaggctcctgtgtcaaccattctgtgaccgatgaacctcccaaaatgcactgcagcgccgaaggggagtggctggtgcccatcgggaaatgcatgtgcaaggcaggatatgaagagaaaaatggcacctgtcaagtgtgcagacctgggttcttcaaagcctcacctcacatccagagctgcggcaaatgtccacctcacagttatacccatgaggaagcttcaacctcttgtgtctgtgaaaaggattatttcaggagagagtctgatccacccacaatggcatgcacaagacccccctctgctcctcggaatgccatctcaaatgttaatgaaactagtgtctttctggaatggattccgcctgctgacactggtggaaggaaagacgtgtcatattatattgcatgcaagaagtgcaactcccatgcaggtgtgtgtgaggagtgtggcggtcatgtcaggtaccttccccggcaaagcggcctgaaaaacacctctgtcatgatggtggatctactcgctcacacaaactatacctttgagattgaggcagtgaatggagtgtccgacttgagcccaggagcccggcagtatgtgtctgtaaatgtaaccacaaatcaagcagctccatctccagtcaccaatgtgaaaaaagggaaaattgcaaaaaacagcatctctttgtcttggcaagaaccagatcgtcccaatggaatcatcctagagtatgaaatcaagtattttgaaaaggaccaagagaccagctacacgattatcaaatctaaagagacaactattactgcagagggcttgaaaccagcttcagtttatgtcttccaaattcgagcacgtacagcagcaggctatggtgtcttcagtcgaagatttgagtttgaaaccaccccagtgtttgcagcatccagcgatcaaagccagattcctgtaattgctgtgtctgtgacagtgggagtcattttgttggcagtggttatcggcgtcctcctcagtggaagttgctgcgaatgtggctgtgggagggcttcttccctgtgcgctgttgcccatccaagcctaatatggcggtgtggctacagcaaagcaaaacaagatccagaagaggaaaagatgcattttcataatgggcacattaaactgccaggagtaagaacttacattgatccacatacctatgaggatcccaatcaagctgtccacgaatttgctaaggagatagaagcatcatgtatcaccattgagagagttattggagcaggtgaatttggtgaagtttgtagtggacgtttgaaactaccaggaaaaagagaattacctgtggctatcaaaacccttaaagtaggctatactgaaaagcaacgcagagatttcctaggtgaagcaagtatcatgggacagtttgatcatcctaacatcatccatttagaaggtgtggtgaccaaaagtaaaccagtgatgatcgtgacagagtatatggagaatggctctttagatacatttttgaagaaaaacgatgggcagttcactgtgattcagcttgttggcatgctgagaggtatctctgcaggaatgaagtacctttctgacatgggctatgtgcatagagatcttgctgccagaaacatcttaatcaacagtaaccttgtgtgcaaagtgtctgactttggactttcccgggtactggaagatgatcccgaggcagcctacaccacaaggggaggaaaaattccaatcagatggactgccccagaagcaatagctttccgaaagtttacttctgccagtgatgtctggagttatggaatagtaatgtgggaagttgtgtcttatggagagagaccctactgggagatgaccaatcaagatgtgattaaagcggtagaggaaggctatcgtctgccaagccccatggattgtcctgctgctctctatcagttaatgctggattgctggcagaaagagcgaaatagcaggcccaagtttgatgaaatagtcaacatgttggacaagctgatacgtaacccaagtagtctgaagacgctggttaatgcatcctgcagagtatctaatttattggcagaacatagcccactaggatctggggcctacagatcagtaggtgaatggctagaggcaatcaagatgggccggtatacagagattttcatggaaaatggatacagttcaatggacgctgtggctcaggtgaccttggaggatttgagacggcttggagtgactcttgtcggtcaccagaagaagatcatgaacagccttcaagaaatgaaggtgcagctggtaaacggaatggtgccattgtaacttcatgtaaatgtcgcttcttcaagtgaatgattctgcactttgtaaacagcactgagatttattttaacaaaaaaagggggaaaagggaaaacagtgatttctaaaccttagaaaacatttgcctcagccacagaatttgtaatcatggttttactgaagtatccagttcttagtccttagtcttcatttttcatgaagcaaacatatcttgcattaaaagggacatgaagttagacatcatcttaagttacaacaacagaatccttcccactacttctacaaaattttgtacatgaaatatataattatatagcacttttatagactgaattaaggcaacccctttcaaaacttccagggatctacttgaaaggaaatgttttatagccatttgtgagctaacaaaagctacagtttactgaagtttacttcaagtcttaattgtctacaaaagtgtattgaagagcaatatgattagattatttcttaatagatatcttcttttgtaattttaaaatgctgttacacagcgttaagttatagaaactagtgtgtaaacatgttgcttgatcaagaaaaagtacaatacagggtgtatatttattttttgtgttataaagtttacttttagttgctcttctagagattattaggtaataaatgtgtatatactgtataatttgcaatatacccaggaactgatttaagatggaattgtgtgtgtgtttgcttgcacatgtgtgtgttaccattctgcttgcatttctaatagtgtttcaattttagcaacatataggagcaagtgttccagaatgtaatatgaataggagaaatagggaagcagtaaaacaaaatttaacacaagcttgtgtctcttttcctctcatgtgtccaaaagctaatctctttattcactaaaaggaaatgtgtataagactaaatcccctttggctttttaaaaacattttgtgatatcagtgacaatgcagttcttctagccattaatcttgtacccctgtaagaaatttcacctttctgagtcctgaaaagtatcttgtcaagcaaagttgacaccgaagggcacattttcagcaggatgtagaaggatttaactgtgcaggcttctgttaatgttgttaaatccaggcacatagcacgaagcatcacccttaagtgttaatccgttgtaaccattcccattttgactcagttctagaaattttgactctaaggcagcaatggaattatgacaaatatatatatatacacatacacacacacaaatatatatatatgcttatttcccttcagaattttatttcaataattgataagttttatttttaatggatgtttattcatttgttaatttcagtttgtattcagttacatggctttgagtttattttattgaaccaatccaaggtattatgtaattaggcttattaaggaatataacatatcttctatgtatgctctatataccacacatgatgaagacttatatttgtgatacaaattatgcagtgtattagaaattgtccaaaactgagctcctgagataaccaacatttttgtattattacactttataaaaattatggaatgtcatgtgattagtcaaaatcagagcatttaaataaaatacagcctactcatgattatcaatgttaatagtacagtagatcagagaagcctggattaatgaaatttatcagaaatatagccacgttatattaatggtattcttttttccaagcacttgttttatttgaatattagcacatataagaataaacttttgggaaataactacttcctattctgcccaccctttacttaagcagtaaagtacctcttttctaaagaaccaggaaacatcaaaataaccacaacaaaaatctaaacagttttcaaataatacattcagttctcataataataagggctatataccatgggtccacacaaactgtgctgcaaacatataatctattagtttagtaaaatttccagagatgtgaatttaatattttcttgataaaatcataaaaaagcatcaccattattaaagatgcatttgttcatttcaataaacagaaattaatgaaacaaattacttttgtacaaaataaatgatgattatgtggcactttattgaattttatagaaatattccaatctaagtgataaagtaacaactgagaaacttcagaatgaaagccttattgattcaaaaggaaaattaccatatgctttagggctgatgaacttgccacaattgcttagacataacaaagatattttctacattgttttccaactttatatgctgaaagataattaggaggtccgggtggagtgtatctaaatgactagaactttaagttgcaatatagattttctctttttaacaaaggaagaatataaattaatttggatcaaatttatttgccttctttgcaatcttggtgatcattttggaaagtaaattgaaaggaaagttaaatagccacatagttttcttttgcatctcaatttggttgagaatttctaaggaaggttaatatgactttagaatgaataaagagactgtcaaacaacaagtactctccctaaaaaagaggaaagaatgccttcctaaaatatttgtttcctattgtatatgtcaccaattggaaaatgccaatctcatctgcaagtgtgagaaatggaacaaggagaggagccaactctagtaaaatgtagtgaggccataatccaaggcaaagtttaacaaatcttgattgtgtaatttcttattctgttgattcattttgtcacccaccagactaccaaaaataaagcacagacatgacaattttagtatatacaacagatttggcaaataatacataatcttattgtaattgccagtagcaatatcttaaggggcatgagtctttcacagtattggactttgaaaaattggtacagggagtaattttcaacagactgatacttgaagtcactcaattactactttgacctatcataatttgtttctaatcttgtcatttgctcatatatactattaatataaccagttgctcttttcataatgtactatttctatgtaaagatgtaaagattttgattttcctatgttttaaaattgtaatgtgcatgatcttttatttcttgtgtttcaattaccaagtcagtattctaaggttgtaagattactgtaaaaattatattccaatattttatctaaacttaagtgtggccagcattattggtttcagagttgcctaaacaacacagaatatccttaattcagtttgtaaaagagttttgaccagtgtaaaaaagtgaagacacagtttcatgtttcaagtttaaaatggaaagttaatatcatttgagcacttatgtgttttcatgtcttctacttaatctgtatgtgaaagtaaaatatttttaacaccattatttatgccatgtaaagtgggttctcagaagcacaagcacagatatttaccttctgaagacatttttggctataaaagtgcattggatggcaaacactatttgagtcaggtgttagaaatttattagatgtattatattacatagtagaataaggtccctttctcattttgtttttcctaaaaataagaaaaaaaagaagtgtgatagtaaactgtctttgctaatgtcctgccagatgtttaacttcaaattaagcaaaaagtaggtacaatatgatgatgatcctgatgatgatgatgatgatgatgatgaagaataaatggaatcaaaatgctagctttatttgacattaataagtaaaataagtcatcattttttcaactctgtagcacagctgtttacattgaataattttctctattgtgctgttaattatatagtaatgtatcaaaatagaaataggaactttcttttcatttcttattcatttatgaagaaatcttttcacacataaatgattgaatgttcttgttcagaatgaccacataatcattgcttagaagaagataccaattcttttaaaagaaaaaaagtctgtttataataatcagaatcaaatgttgtttgtttcttctaaacgttaatggagaaaattgaaggtggtaaaatgtcatgtttattcaggctgggaactgtattcacagtagaagtttcagtggtcaacatatctatgactctttaggctgctgtagttttacagtcaattatttaaaagtgagtagttacatttataagagcctgagaatacttagactcagtcatttgttagtatttttaccaaaatctcttagtttcagacatgtcagaagcagctatatagcatatcttattctatgatatacatcaggctatctcaagttcctgtctcacagttaattcaaagaaggattaggatttctgtattttttctcatttgaatctttatgtgcatttggtttgtgtacatgctttttgtagtgtaagatatgaaattttatattttttcagaaaataaaaaccctttgaatacagtta

SEQ ID NO: 146281 - protein, 279 aa, Artificial Sequence
  derived and/or modified sequence
MVFQTRYPSWIILCYIWLLRFAHTGEAQAAKEVLLLDSKAQQTELEWISSPPNGWEEISGLDENYTPIRTYQVCQVMEPNQNNWLRTNWISKGNAQRIFVELKFTLRDCNSLPGVLGTCKETFNLYYYETDYDTGRNIRENLYVKIDTIAADESFTQGDLGERKMKLNTEVREIGPLSKKGFYLAFQDVGACIALVSVKVYYKKCWSIIENLAIFPDTVTGSEFSSLVEVRGTCVSSAEEEAENAPRMHCSAEGEWLVPIGKCICKAGYQQKGDTCERK

SEQ ID NO: 146282 - protein, 998 aa, Artificial Sequence
  derived and/or modified sequence
MVFQTRYPSWIILCYIWLLRFAHTGEAQAAKEVLLLDSKAQQTELEWISSPPNGWEEISGLDENYTPIRTYQVCQVMEPNQNNWLRTNWISKGNAQRIFVELKFTLRDCNSLPGVLGTCKETFNLYYYETDYDTGRNIRENLYVKIDTIAADESFTQGDLGERKMKLNTEVREIGPLSKKGFYLAFQDVGACIALVSVKVYYKKCWSIIENLAIFPDTVTGSEFSSLVEVRGTCVSSAEEEAENAPRMHCSAEGEWLVPIGKCICKAGYQQKGDTCEPCGRGFYKSSSQDLQCSRCPTHSFSDKEGSSRCECEDGYYRAPSDPPYVACTRPPSAPQNLIFNINQTTVSLEWSPPADNGGRNDVTYRILCKRCSWEQGECVPCGSNIGYMPQQTGLEDNYVTVMDLLAHANYTFEVEAVNGVSDLSRSQRLFAAVSITTGQAAPSQVSGVMKERVLQRSVELSWQEPEHPNGVITEYEIKYYEKDQRERTYSTVKTKSTSASINNLKPGTVYVFQIRAFTAAGYGNYSPRLDVATLEEATGKMFEATAVSSEQNPVIIIAVVAVAGTIILVFMVFGFIIGRRHCGYSKADQEGDEELYFHFKFPGTKTYIDPETYEDPNRAVHQFAKELDASCIKIERVIGAGEFGEVCSGRLKLPGKRDVAVAIKTLKVGYTEKQRRDFLCEASIMGQFDHPNVVHLEGVVTRGKPVMIVIEFMENGALDAFLRKHDGQFTVIQLVGMLRGIAAGMRYLADMGYVHRDLAARNILVNSNLVCKVSDFGLSRVIEDDPEAVYTTTGGKIPVRWTAPEAIQYRKFTSASDVWSYGIVMWEVMSYGERPYWDMSNQDVIKAIEEGYRLPAPMDCPAGLHQLMLDCWQKERAERPKFEQIVGILDKMIRNPNSLKTPLGTCSRPISPLLDQNTPDFTTFCSVGEWLQAIKMERYKDNFTAAGYNSLESVARMTIEDVMSLGITLVGHQKKIMSSIQTMRAQMLHLHGTGIQV

SEQ ID NO: 146283 - DNA, 2997 bp, Artificial Sequence
  derived and/or modified sequence
atggtgttccagaccagataccccagctggatcatcctgtgctacatctggctgctgagattcgcccacaccggcgaggcccaggccgccaaggaggtgctgctgctggacagcaaggcccagcagaccgagctggagtggatcagcagcccccccaacggctgggaggagatcagcggcctggacgagaactacacccccatcagaacctaccaggtgtgccaggtgatggagcccaaccagaacaactggctgagaaccaactggatcagcaagggcaacgcccagagaatcttcgtggagctgaagttcaccctgagagactgcaacagcctgcccggcgtgctgggcacctgcaaggagaccttcaacctgtactactacgagaccgactacgacaccggcagaaacatcagagagaacctgtacgtgaagatcgacaccatcgccgccgacgagagcttcacccagggcgacctgggcgagagaaagatgaagctgaacaccgaggtgagagagatcggccccctgagcaagaagggcttctacctggccttccaggacgtgggcgcctgcatcgccctggtgagcgtgaaggtgtactacaagaagtgctggagcatcatcgagaacctggccatcttccccgacaccgtgaccggcagcgagttcagcagcctggtggaggtgagaggcacctgcgtgagcagcgccgaggaggaggccgagaacgcccccagaatgcactgcagcgccgagggcgagtggctggtgcccatcggcaagtgcatctgcaaggccggctaccagcagaagggcgacacctgcgagccctgcggcagaggcttctacaagagcagcagccaggacctgcagtgcagcagatgccccacccacagcttcagcgacaaggagggcagcagcagatgcgagtgcgaggacggctactacagagcccccagcgaccccccctacgtggcctgcaccagaccccccagcgccccccagaacctgatcttcaacatcaaccagaccaccgtgagcctggagtggagcccccccgccgacaacggcggcagaaacgacgtgacctacagaatcctgtgcaagagatgcagctgggagcagggcgagtgcgtgccctgcggcagcaacatcggctacatgccccagcagaccggcctggaggacaactacgtgaccgtgatggacctgctggcccacgccaactacaccttcgaggtggaggccgtgaacggcgtgagcgacctgagcagaagccagagactgttcgccgccgtgagcatcaccaccggccaggccgcccccagccaggtgagcggcgtgatgaaggagagagtgctgcagagaagcgtggagctgagctggcaggagcccgagcaccccaacggcgtgatcaccgagtacgagatcaagtactacgagaaggaccagagagagagaacctacagcaccgtgaagaccaagagcaccagcgccagcatcaacaacctgaagcccggcaccgtgtacgtgttccagatcagagccttcaccgccgccggctacggcaactacagccccagactggacgtggccaccctggaggaggccaccggcaagatgttcgaggccaccgccgtgagcagcgagcagaaccccgtgatcatcatcgccgtggtggccgtggccggcaccatcatcctggtgttcatggtgttcggcttcatcatcggcagaagacactgcggctacagcaaggccgaccaggagggcgacgaggagctgtacttccacttcaagttccccggcaccaagacctacatcgaccccgagacctacgaggaccccaacagagccgtgcaccagttcgccaaggagctggacgccagctgcatcaagatcgagagagtgatcggcgccggcgagttcggcgaggtgtgcagcggcagactgaagctgcccggcaagagagacgtggccgtggccatcaagaccctgaaggtgggctacaccgagaagcagagaagagacttcctgtgcgaggccagcatcatgggccagttcgaccaccccaacgtggtgcacctggagggcgtggtgaccagaggcaagcccgtgatgatcgtgatcgagttcatggagaacggcgccctggacgccttcctgagaaagcacgacggccagttcaccgtgatccagctggtgggcatgctgagaggcatcgccgccggcatgagatacctggccgacatgggctacgtgcacagagacctggccgccagaaacatcctggtgaacagcaacctggtgtgcaaggtgagcgacttcggcctgagcagagtgatcgaggacgaccccgaggccgtgtacaccaccaccggcggcaagatccccgtgagatggaccgcccccgaggccatccagtacagaaagttcaccagcgccagcgacgtgtggagctacggcatcgtgatgtgggaggtgatgagctacggcgagagaccctactgggacatgagcaaccaggacgtgatcaaggccatcgaggagggctacagactgcccgcccccatggactgccccgccggcctgcaccagctgatgctggactgctggcagaaggagagagccgagagacccaagttcgagcagatcgtgggcatcctggacaagatgatcagaaaccccaacagcctgaagacccccctgggcacctgcagcagacccatcagccccctgctggaccagaacacccccgacttcaccaccttctgcagcgtgggcgagtggctgcaggccatcaagatggagagatacaaggacaacttcaccgccgccggctacaacagcctggagagcgtggccagaatgaccatcgaggacgtgatgagcctgggcatcaccctggtgggccaccagaagaagatcatgagcagcatccagaccatgagagcccagatgctgcacctgcacggcaccggcatccaggtgtag

SEQ ID NO: 146284 - DNA, 6588 bp, Artificial Sequence
  derived and/or modified sequence
cggtgcgagcgaacaggagtgggggggaaattaaaaaaagctaaacgtggagcagccgatcggggaccgagaaggggaatcgatgcaaggagcacaataaaacaaaagctacttcggaacaaacagcatttaaaaatccacgactcaagataactgaaacctaaaataaaacctgctcatgcaccatggtttttcaaactcggtacccttcatggattattttatgctacatctggctgctccgctttgcacacacaggggaggcgcaggctgcgaaggaagtactactgctggattctaaagcacaacaaacagagttggagtggatttcctctccacccaatgggtgggaagaaattagtggtttggatgagaactataccccgatacgaacataccaggtgtgccaagtcatggagcccaaccaaaacaactggctgcggactaactggatttccaaaggcaatgcacaaaggatttttgtagaattgaaattcaccctgagggattgtaacagtcttcctggagtactgggaacttgcaaggaaacatttaatttgtactattatgaaacagactatgacactggcaggaatataagagaaaacctctatgtaaaaatagacaccattgctgcagatgaaagttttacccaaggtgaccttggtgaaagaaagatgaagcttaacactgaggtgagagagattggacctttgtccaaaaagggattctatcttgcctttcaggatgtaggggcttgcatagctttggtttctgtcaaagtgtactacaagaagtgctggtccattattgagaacttagctatctttccagatacagtgactggttcagaattttcctctttagtcgaggttcgagggacatgtgtcagcagtgcagaggaagaagcggaaaacgcccccaggatgcactgcagtgcagaaggagaatggttagtgcccattggaaaatgtatctgcaaagcaggctaccagcaaaaaggagacacttgtgaaccctgtggccgtgggttctacaagtcttcctctcaagatcttcagtgctctcgttgtccaactcacagtttttctgataaagaaggctcctccagatgtgaatgtgaagatgggtattacagggctccatctgacccaccatacgttgcgtgcacaaggcctccatctgcaccacagaacctcattttcaacatcaaccaaaccacagtaagtttggaatggagtcctcctgcagacaatgggggaagaaacgatgtgacctacagaatattgtgtaagcggtgcagttgggagcagggcgaatgtgttccctgtgggagtaacattggatacatgccccagcagactggattagaggataactatgtcactgtcatggacctgctagcccacgctaattatacttttgaagttgaagctgtaaatggagtttctgacttaagccgatcccagaggctctttgctgctgtcagtatcaccactggtcaagcagctccctcgcaagtgagtggagtaatgaaggagagagtactgcagcggagtgtcgagctttcctggcaggaaccagagcatcccaatggagtcatcacagaatatgaaatcaagtattacgagaaagatcaaagggaacggacctactcaacagtaaaaaccaagtctacttcagcctccattaataatctgaaaccaggaacagtgtatgttttccagattcgggcttttactgctgctggttatggaaattacagtcccagacttgatgttgctacactagaggaagctacaggtaaaatgtttgaagctacagctgtctccagtgaacagaatcctgttattatcattgctgtggttgctgtagctgggaccatcattttggtgttcatggtctttggcttcatcattgggagaaggcactgtggttatagcaaagctgaccaagaaggcgatgaagagctttactttcattttaaatttccaggcaccaaaacctacattgaccctgaaacctatgaggacccaaatagagctgtccatcaattcgccaaggagctagatgcctcctgtattaaaattgagcgtgtgattggtgcaggagaattcggtgaagtctgcagtggccgtttgaaacttccagggaaaagagatgttgcagtagccataaaaaccctgaaagttggttacacagaaaaacaaaggagagactttttgtgtgaagcaagcatcatggggcagtttgaccacccgaatgttgtccatttggaaggggttgttacaagagggaaaccagtcatgatagtaatagagttcatggaaaatggagccctagatgcatttctcaggaaacatgatgggcaatttacagtcattcagttagtaggaatgctgagaggaattgctgctggaatgagatatttggctgatatgggatatgttcacagggaccttgcagctcgcaatattcttgtcaacagcaatctcgtttgtaaagtgtcagattttggcctgtcccgagttatagaggatgatccagaagctgtctatacaactactggtggaaaaattccagtaaggtggacagcacccgaagccatccagtaccggaaattcacatcagccagtgatgtatggagctatggaatagtcatgtgggaagttatgtcttatggagaaagaccttattgggacatgtcaaatcaagatgttataaaagcaatagaagaaggttatcgtttaccagcacccatggactgcccagctggccttcaccagctaatgttggattgttggcaaaaggagcgtgctgaaaggccaaaatttgaacagatagttggaattctagacaaaatgattcgaaacccaaatagtctgaaaactcccctgggaacttgtagtaggccaataagccctcttctggatcaaaacactcctgatttcactaccttttgttcagttggagaatggctacaagctattaagatggaaagatataaagataatttcacggcagctggctacaattcccttgaatcagtagccaggatgactattgaggatgtgatgagtttagggatcacactggttggtcatcaaaagaaaatcatgagcagcattcagactatgagagcacaaatgctacatttacatggaactggcattcaagtgtgatatgcatttctcccttttaagggagattacagactgcaagagaacagtactggccttcagtatatgcatagaatgctgctagaagacaagtgatgtcctgggtccttccaacagtgaagagaagatttaagaagcacctatagacttgaactcctaagtgccaccagaatatataaaaagggaatttaggatccaccatcggtggccaggaaaatagcagtgacaataaacaaagtactacctgaaaaacatccaaacaccttgagctctctaacctcctttttgtcttatagactttttaaaatgtacataaagaatttaagaaagaatatatttgtcaaataaaatcatgatcttattgttaaaattaatgaaatattttccttaaatatgtgatttcagactattcctttttaaaatcatttgtgtttattcttcataaggactttgttttagaaagctgtttatagctttggacctttttagtgttaaatctgtaacattactacactgggtacctttgaaagaatctcaaatttcaaaagaaatagcatgattgaagatacatctctgttagaacattggtatcctttttgtgccattttattctgtttaatcagtgctgttttgatattgtttgctaattggcaggtagtcaagaaaatgcaagttgccaagagctctgatattttttaaaaagaatttttttgtaaagatcagacaacacactatcttttcaatgaaaaaagcaataatgatccatacatactataaggcacttttaacagattgtttatagagtgattttactagaaagaatttaataaactcgaagtttaggtttatgagtatataaacaaatgaggcacttcatctgaagaatgttggtgaaggcaagtctctgaaagcagaactatccagtgttatctaaaaattaatctgagcacatcaagattttttcattctcgtgacattaggaaatttaggataaatagttgacatatattttatatcctcttctgttgaatgcagtccaaacatgaaaggaaataattgttttatattataactctgaagcatgataaaggggcagttcacaattttcaccatttaaacacaaatttgctgcacagaatatcaccattgcagttcaaaacaaaacaaaacaaaaagtcttttgtttgtgaacactgatgcaagaaacttgttaaatgaaaggactctttaccctagaaggaagaggtgaaggatctggcttgtttttaaagctttatttattaaaccatattatttgattactgtgttagaatttcataagcaataattaaatgtgtctttatagatattgcaggaatgtatacatattgtgattaatgctttcaaaacttatgaaaatcatgaactaccccagaattgaactgttgtacttccaaagagaattgggctgtttataatgattttaatagagaaagatcccagggatcggtcataattggtcttgtttgataatgtgggcatccacaaacaaacaaacaaataacagaaacaaaatctgtaaatgttcctttgtaaaacttgtaaattttatttatactgtcttgttttgtacacacatttctctgtagtgggctctgaatacattgaaaatgcactatatttttctattttacttgcagagcatcacaaaagaacaggtattttcagtgctacataatgtgttttcccacatttaggaccaaagacggctatagaaaaactcaaatggattgcttcccaaacccctccccaccctttttttttggttttaaatcactgtacagtgttatttgatattttaatttattttttgattgactagaaaaatcattttaatttcactaaaatgttttttgtccctaaggaaaagtaatctgtaaaaataattttaattagcataatacagtcacctagacacttccatttgtaatctttgtaatagactgtaaatatatttttggaactataacacaatgtgcttgagggttatttttcagtgtctgcagtgtgtacaagtgtttatactaagtccagcactttacaattctaatcagtagcattggcctttgtgagaatgagtgaaagagtttgagtgagtgttcttaattccttttggattctagactcactaataatgaagttcttttcttgttcatagcttaaggtgcttattttttctattaaaattaaattaacaaaagccattctagaaatagaagacatagtatggtacatgcaaacggtgtctttcctgcttttttctagcactagatttatagttgagtagtctttcttgagtagaagggcagaataaaagtttttttgagtttttttcaaaaataaatttttccttcagcaatatacctcatctgccttaaattttttacagctctttacagggaaaggggagaagggatgggaaagacacacagcacaataggaagtgtatgattacatcactatctcgtttgtaagtttcttttcctaatcaacattatgatttcgaaatacatgtatgtgaaacaaatattaagagaaaaagaattaacattgtaatgctgattgtaatactctcttccagaaagagatgagatggtataacgataagaatgtacaacttgcaccttgaaatctttttttttaaataaattagtgctcaggggaggaaaagtagagaaagtgaacgtcaaaaatagaattccaaaattataaaaatgcaaaaggaaatggcctccttgctttaatagagccaccttttttagaacactgtcctcacacttgacctgtgttttgcattcagtactgaaataaaagtaacttgttctacatttgaatctaacattttctcagcaattgatctggtccttgtttactagaactggtggtttatgcttgtcagagcactattagttgaatcatattgtatacttatgtaatctacattagctagtactgtttaggactatattttaattgctcttcttatccgtgtttttaagacaattaaaatggtgtgattcacctctcttttttatttaggtaatgctgatattctcccttttgtttcttgagtagcctagaactatgctactcactgatgtgcatgttcaaataaattactgatgtgtatttttttgctatatgtggagaaatcatggggaactcggggcgagatgtgcttttcgttggttgaatttgtccctccttgcctaagaaatactacaggggtcatccttttataaggacaaactgcttttgaacagtgtcttcaatgtatcaagcacaaataactctttcttcaacatgaatcataagtctctttttaccagcttaaaataataaacaagtctattagacaatgtaaagaaaa

SEQ ID NO: 146285 - DNA, 2997 bp, Artificial Sequence
  derived and/or modified sequence
atggtgtttcagactcggtacccaagctggattattctgtgttatatctggctgttgagattcgcccatactggcgaggcccaagctgccaaggaagtcctgttgctggatagcaaagcccagcagaccgagctagaatggatctccagtcccccaaatggctgggaagagatttccgggttggatgaaaattacaccccaatcagaacctaccaggtatgtcaggtcatggaacccaaccagaataattggctgaggaccaactggatcagtaagggcaacgcgcagcgtatattcgtggaactgaaattcaccttgagagattgcaattcgttacccggcgttctgggtacatgtaaggagactttcaatctgtactattatgagaccgattatgataccggccggaatattcgggaaaacctgtatgtcaaaatagatactatcgccgcagacgagtccttcacgcaaggagatctcggcgaaagaaagatgaagttgaacacagaggtccgcgagatcggacctctgtccaaaaagggcttctatcttgctttccaggacgtaggagcttgcatcgccctggtttcggtgaaggtgtattacaaaaaatgctggtcgattatcgagaacctagctatcttccctgataccgtgactggctcggagttttcctctttggtagaggtgcggggcacatgtgtctctagtgctgaggaagaggcagagaacgcaccgcggatgcactgcagcgctgagggggagtggctggtaccgataggcaaatgcatctgcaaagctggataccagcagaagggggatacttgtgagccttgcggcagaggcttctacaaatcttctagccaggacctccagtgttcgagatgccccacccatagtttcagcgacaaggaggggagctcacggtgcgagtgcgaggatggctattacagggccccgtccgaccctccctacgtagcatgcacacggccaccatcagcacctcaaaatctgatctttaacataaatcaaactaccgtcagcttggaatggtctccacccgcggataatgggggaaggaacgacgtcacatatcggatcctctgcaaaagatgtagttgggaacaaggcgagtgcgtaccatgcggcagcaatattggctacatgcctcagcagaccgggctcgaggataactatgttactgttatggatctccttgcccacgccaactatacctttgaagttgaggctgtgaacggcgtgagcgacttgtctcggtctcagcgcctgttcgcagccgtgagcatcaccacaggccaggctgctccttcgcaggtctctggcgtgatgaaagagcgtgtacttcagcgctcagtcgaactgtcttggcaggaacccgagcacccgaacggagtgattaccgagtatgagatcaagtactacgaaaaggatcaacgggagcgtacgtactctacagtgaagactaaaagcacatccgcctccattaataacttgaagccaggtaccgtgtacgtttttcagatccgagccttcactgcagccggttatggtaactattcacctcgcctggatgtagcaactctggaagaggccacgggtaaaatgtttgaggccacagccgtgagcagcgagcaaaatcccgtgattatcattgctgtggttgcagtcgctggtacaatcatcctggtgttcatggtgttcgggtttattatcggaaggaggcactgcggatatagcaaggccgatcaggaaggtgatgaggagctgtactttcacttcaagttcccagggactaaaacttacatcgatcctgagacctacgaagatccgaatcgggccgtccaccagtttgccaaagaactcgacgcctcatgcattaagatcgaacgtgtgataggggcaggcgagttcggagaggtgtgttctggccgattgaagctcccaggaaagcgggatgttgccgtggccatcaaaacacttaaagtcggctacaccgaaaaacagagacgcgacttcctctgcgaggcctcgatcatgggtcagtttgaccacccaaatgttgtacatttggagggtgtggtgactcgcggaaagccagtcatgattgtgattgaattcatggaaaacggcgcactggatgcttttttgagaaagcatgacgggcagttcaccgtcatccagctggtggggatgttacgcgggatagcagcgggaatgagatatctcgccgacatgggatatgtgcaccgtgacctcgctgcgcggaacatactcgtgaatagtaacctcgtctgcaaagtgtcagactttgggttgtctagagtgatagaggacgacccagaagcagtatacacaacaacaggtggcaagattccagtccgttggaccgcccccgaagccatacagtacaggaagtttacaagtgctagcgacgtgtggagctatggtatcgtgatgtgggaggtgatgtcttacggagagaggccttactgggatatgtccaatcaagacgtcatcaaggcgatcgaggaggggtacaggctgcccgctcctatggactgtcctgcaggactccatcaactgatgctcgactgctggcagaaagaacgggctgagcgacccaagttcgagcagattgtcgggatcctggataagatgatcagaaatccaaattcactgaaaacacccctcgggacgtgcagccgaccaatcagtccactactggaccagaacactcctgatttcaccacgttctgcagcgtgggggaatggttgcaggccatcaaaatggaaaggtataaagacaacttcacagcagctgggtacaactctttggagagcgttgcacgaatgacaattgaggacgttatgagtctgggaattactctggttggccaccagaagaaaatcatgagctccatccagacaatgcgggcccagatgctacatctccacggaactgggatccaagtctag

SEQ ID NO: 146286 - DNA, 2997 bp, Artificial Sequence
  derived and/or modified sequence
atggtgttccagacccgctaccccagctggatcatcctgtgctacatctggctgctgcgctttgcccacactggagaggcccaggccgccaaggaggtgctgctgctggacagcaaggcccagcagacagagctggagtggatcagcagccccccaaatggctgggaggagatcagcggcctggatgagaactacacccccatccgcacctaccaggtgtgccaggtgatggagcccaaccagaacaactggctgcggaccaactggatcagcaaaggaaatgcccagaggatctttgtggagctgaagttcaccctgcgggactgcaacagcctgcccggggtgctgggcacctgcaaggagaccttcaacctgtactactatgaaacagattatgacaccggcaggaacatccgggagaacctgtatgtgaagattgacaccatcgctgctgatgagagcttcacccagggcgacctgggggagaggaagatgaagctgaacacagaggtgcgggagatcggccccctgagcaagaagggcttctacctggccttccaggatgtgggcgcctgcatcgccctggtgtctgtgaaggtgtactacaagaagtgctggagcatcatcgagaacctggccatcttcccagacacagtgacaggcagcgagttcagcagcctggtggaggtgcggggcacctgtgtgtcctctgctgaggaggaggctgaaaatgcccccaggatgcactgcagcgctgagggggagtggctggtgcccatcggcaagtgcatctgcaaggccggctaccagcagaagggggacacctgtgagccctgtggccggggcttctacaagagcagcagccaggacctgcagtgcagccgctgccccacccacagcttcagtgacaaggagggcagcagccgctgtgaatgtgaagatggctactaccgggcccccagcgaccccccctacgtggcctgcaccaggcctccttctgccccccagaacctgatcttcaacatcaaccagaccaccgtgtccctggagtggagccccccagctgacaatggaggaagaaatgatgtgacctaccgcatcctgtgcaagcgctgctcctgggagcagggagaatgtgtgccctgtggcagcaacatcggctacatgccccagcagacaggcctggaggacaactacgtgacagtgatggacctgctggcccacgccaactacacctttgaggtggaggccgtgaatggagtgtctgacctgagccgcagccagaggctgtttgctgctgtgtccatcaccaccggccaggccgcccccagccaggtgtctggagtgatgaaggagcgggtgctgcagaggtctgtggagctgtcctggcaggagcctgagcaccccaacggggtcatcacagaatatgagatcaagtactatgagaaggaccagcgggagaggacctacagcacagtgaagaccaagagcaccagcgccagcatcaacaacctgaagccaggcaccgtgtatgtgttccagatccgggccttcaccgctgctggctacggcaactacagcccccggctggatgtggccaccctggaggaggccaccgggaagatgtttgaggccacagctgtgagcagcgagcagaaccctgtgatcatcatcgctgtggtggccgtggccggcaccatcatcctggtgttcatggtgtttggcttcatcatcggccgccgccactgcggctacagcaaggctgaccaggagggagatgaggagctgtacttccacttcaagtttcctggcaccaagacctacattgatcctgagacctatgaggaccccaacagagctgtgcaccagtttgccaaggagctggatgccagctgcatcaagattgagcgggtgattggagctggggagtttggagaggtgtgcagcggccgcctgaagctgcccgggaagagagatgtggccgtggccatcaagaccctgaaggtgggctacacagagaagcagaggcgggacttcctgtgtgaggccagcatcatgggccagtttgaccaccccaacgtggtgcacctggagggcgtggtgacccggggcaagcctgtgatgattgtgattgagttcatggagaatggagccctggatgccttcctgaggaagcatgatggccagttcaccgtcatccagctggtgggcatgctgcggggcattgctgctggcatgagatacctggccgacatgggctacgtgcaccgggacctggccgccaggaacatcctggtgaacagcaacctggtgtgcaaggtgtctgactttggcctgagccgggtgattgaagatgatcctgaggccgtgtacaccaccaccggcggcaagatccctgtgcgctggacagcccctgaggccatccagtacaggaagttcaccagcgccagtgatgtgtggagctatggcatcgtgatgtgggaggtgatgtcctatggagagcggccctactgggacatgagcaaccaggacgtcatcaaggccatcgaggagggctaccgcctgcctgcccccatggactgcccagctggcctgcaccagctgatgctggactgctggcagaaggagcgggcagagcggcccaagtttgagcagatcgtgggcatcctggacaagatgatccggaaccccaacagcctgaagacccccctgggcacctgcagccggcccatcagccccctgctggaccagaacaccccagacttcaccaccttctgcagcgtgggggagtggctgcaggccatcaagatggagcgctacaaggacaacttcaccgctgctggctacaacagcctggagagcgtggccaggatgaccattgaagatgtgatgagcctgggcatcaccctggtgggccaccagaagaagatcatgagcagcatccagaccatgagggcccagatgctgcacctgcacggcaccggcatccaggtgtag

SEQ ID NO: 146287 - DNA, 2997 bp, Artificial Sequence
  derived and/or modified sequence
atggtgttccagacccggtaccccagctggatcatcctgtgctacatttggctcttgaggttcgcacatacaggcgaagcccaggccgccaaagaggtcctccttctggactctaaagctcagcaaacagaactggaatggattagctccccccccaatggatgggaagagatcagcgggctggacgaaaactacactcctatacgcacttatcaggtgtgtcaggtgatggaaccaaaccagaataactggctgcggacaaactggattagcaaaggcaacgcacaaagaatttttgtggagttgaagttcacactgcgcgattgtaactctctaccaggtgtgctgggtacgtgcaaggagacctttaacctgtattactatgaaactgactacgacaccgggagaaatatccgggagaacctgtacgtcaaaattgatacgattgccgcagatgagtctttcacccagggggacctcggtgaaagaaagatgaagctcaacaccgaggtgagggaaatcggccccctgtctaaaaaagggttttatcttgcatttcaggatgtaggagcttgtatcgccctcgtcagcgtgaaggtgtactataagaagtgttggtcaatcatagagaacttagccattttccctgacaccgtcacaggcagtgagtttagctccctggtggaagtgcgcggaacatgtgtgagctcagcggaagaggaagcagaaaacgcgcctcgcatgcactgcagtgcggagggagagtggttggtccccatcggaaagtgcatttgtaaagccggctaccagcaaaagggcgacacttgcgagccttgcggaagggggttctacaagtcctcaagccaagatcttcagtgctcccggtgccctactcactccttctctgacaaagagggcagctcgaggtgcgagtgtgaggacggatactacagggcgcccagtgatcctccttatgttgcctgtacccggcctccaagtgccccccagaacttgatttttaacatcaaccagacaaccgtgagcttggaatggagccctccagcagataacggagggcggaacgacgtgacatatagaatactctgtaaacgatgctcatgggaacagggcgagtgtgttccctgcggaagcaacattgggtacatgcctcagcagacaggtttggaggacaattacgtgaccgtcatggacctgttagcccacgcaaactatacctttgaagtggaggccgtaaatggcgtttcagaccttagccgcagtcagcgactctttgccgccgttagtatcactactggacaagccgcaccatcccaagtgagcggtgtgatgaaggaaagagtgctgcaacgatcagtcgagctttcatggcaagagccggagcatcccaacggcgtgatcacagaatacgagatcaagtattacgaaaaagatcaacgagagcgtacatactcaacggttaagacgaaatccacttccgcttccattaacaatttaaagcctggaacagtttatgtgttccagatccgagcatttacggcggctgggtatgggaattacagcccccgcctggatgtggccactctcgaagaggcaactggtaagatgtttgaagcaaccgccgtttcgagcgaacagaatccagttattataatcgccgtagtggccgttgctggtactatcatcctagtgtttatggtgtttgggtttattataggacgccgccactgcggctatagcaaagccgaccaggaaggtgatgaggagttatacttccacttcaagttccccggaacaaagacatacatcgatccagaaacctacgaagacccgaaccgggctgtccatcagttcgctaaagagctggacgctagctgcatcaagatagagcgggtaattggagccggtgagtttggcgaggtctgctctggccgcctgaagctccccgggaagagagacgtcgcagtcgcaatcaagaccctcaaggttggctacaccgagaagcagcgtagggacttcctttgtgaagcctctatcatgggccagttcgatcacccaaatgtggtgcatcttgagggggtcgtgactcgggggaagcccgtgatgattgtgattgaattcatggaaaatggcgctttggatgctttcctgcgaaagcacgatgggcagttcactgtgattcagcttgtcgggatgctgcgcggtatcgctgccggaatgcgctaccttgctgacatgggctatgttcaccgagacctggccgccagaaacatcctcgtcaatagcaacctcgtctgtaaggtctctgactttggcctctctagggtaatcgaggatgaccctgaggcagtgtacaccaccactggaggcaagattccggtgcggtggactgcccccgaagctattcaatataggaagttcaccagcgcaagcgatgtgtggtcctacggcattgtaatgtgggaggtaatgtcttacggagaaagaccctactgggacatgtcaaatcaggatgtgatcaaagccatcgaggagggatacaggctgccggctcctatggattgccccgccggtctacaccaactgatgctggactgttggcagaaggagcgtgccgagcggccaaagttcgaacagatcgtggggattttagacaagatgattcgaaatcctaatagtctgaagaccccactcgggacatgctcacgacctatctcgccccttctggaccagaatacccctgacttcacaacgttctgcagtgttggtgagtggctgcaggccattaagatggagcggtacaaagataacttcacagccgcgggctataattccctggaatccgtggcccgtatgacaatagaagacgtaatgtccctgggcattacactggtgggccatcagaaaaagattatgtcttctattcaaacaatgcgcgcacagatgctgcatctgcacggtactggaatccaagtgtag

SEQ ID NO: 146288 - DNA, 2997 bp, Artificial Sequence
  derived and/or modified sequence
atggtgtttcaaaccagataccctagctggattattctgtgctacatttggcttctgaggttcgcccacacgggggaagcccaggctgctaaggaggttctcctgcttgatagcaaagcccagcaaacagagctggagtggatttcatcaccgcctaatggatgggaagagatttccggtttggacgagaactacacacctataagaacataccaggtttgccaggtgatggagccgaatcagaacaattggctgcgtaccaattggatttccaagggcaatgcccaacggatttttgtcgaattaaaatttacactcagagattgcaacagcctcccaggggtgctcggtacttgtaaagaaacattcaatctgtattactatgagactgactatgacaccgggcgaaatattagggaaaatctttatgtgaaaatcgataccatcgcagccgatgagtctttcacccagggcgatttgggcgaacgcaagatgaaattaaacactgaggtacgagaaataggacccctgtctaagaaaggcttttatctggccttccaggacgtgggcgcatgtattgcattagtgagcgttaaggtttattataagaaatgttggagtatcatcgaaaatttggctatattccccgacactgttaccgggagcgaattttcctccctcgtggaggtgaggggaacctgcgtgtcttccgccgaggaagaggccgagaatgcccctagaatgcattgtagtgccgaaggagagtggctcgtgcctatcggaaaatgcatttgcaaagcaggttaccaacagaagggggatacatgtgagccttgcggacgaggtttttataagtcgagttcccaggacctgcagtgttctcgatgtcccacccatagcttcagcgacaaagagggatcgtccagatgtgagtgtgaggatggttactacagagctcctagcgaccccccttacgtggcctgcacccggccaccctcagctccgcagaatctcatctttaatatcaaccagaccaccgtgtcactcgaatggagtccccctgccgataacggcggaaggaacgacgtaacttacaggattctgtgtaagcgatgttcctgggaacaaggtgagtgcgtaccctgtgggtccaacatcggttacatgcctcagcagacaggactcgaagataattatgttacggtgatggatctcctggcccatgccaattatacttttgaggtggaggctgtgaacggggtcagcgatctgtcccgttctcagcgcctctttgcagctgtcagcattacaacaggtcaagctgcacccagccaggtatcaggcgtaatgaaagaacgcgtattgcagcgtagcgtggaactatcctggcaggagccagaacaccctaacggggttatcactgagtacgagatcaaatactatgaaaaggaccagagagagcggacttactcgacggtcaaaactaagtcaaccagtgcaagcatcaataacctgaaacccggaactgtatacgtgttccagattcgtgcatttaccgcagctggctacggcaactattcccctagactcgacgtggctactcttgaggaggccacagggaaaatgttcgaggccaccgctgtgagttctgaacagaatccagtgattattattgctgtggtcgccgtggcgggaaccatcatcctcgtgttcatggttttcgggttcatcattggcagacgccactgtgggtacagcaaagctgatcaggaaggagacgaggagctgtacttccacttcaagtttcctggaacaaagacttatatcgaccctgaaacttatgaagatccgaaccgcgctgttcatcaatttgctaaggagttggatgcaagctgcatcaaaatcgagcgcgttatcggcgcaggcgaattcggggaagtatgcagcggtcggcttaaactgccagggaagcgcgatgtggccgtagccattaaaaccctgaaagtcggttatacggaaaaacagcgcagagacttcctatgcgaggcttcgatcatgggccagttcgaccacccgaacgttgtccacctcgaaggtgtcgtcactagagggaagcctgtgatgatcgtgattgaattcatggagaacggcgcattggacgcttttcttcggaaacatgatggacagtttaccgtgattcaacttgtggggatgcttagggggatcgccgcaggaatgcgttacctggcagatatggggtacgtccatcgggatcttgcggctcggaatatcctcgtcaacagcaacctggtgtgtaaggttagcgactttggtctgagccgtgtgatcgaagatgatccggaggcagtctacaccaccacagggggtaagatcccggtacgctggacagctcctgaagccattcagtaccgaaaatttacctcagctagtgacgtttggtcctacggtattgtcatgtgggaagtgatgtcatatggtgagagaccatattgggatatgagcaaccaggatgtaatcaaggccattgaagagggctaccgcctgcccgctcccatggactgcccagcaggcctgcatcagctgatgctggactgctggcaaaaagagagggctgagagacctaagtttgaacagatcgtgggcatcctggataaaatgatcagaaacccaaattctctgaagaccccccttgggacctgctcccgcccaatatctcccttactagaccagaacaccccagatttcacgacgttttgtagtgtaggggaatggctgcaggctataaaaatggagcggtataaagacaattttacggccgctggatacaactcactcgagagcgtggctagaatgacaatcgaggacgttatgagccttgggattacattggttgggcaccagaaaaaaattatgagcagcatccagactatgcgcgctcaaatgttacacttacacggtactggcatccaggtttag

SEQ ID NO: 146289 - protein, 984 aa, Artificial Sequence
  derived and/or modified sequence
MALDYLLLLLLASAVAAMEETLMDTRTATAELGWTANPASGWEEVSGYDENLNTIRTYQVCNVFEPNQNNWLLTTFINRRGAHRIYTEMRFTVRDCSSLPNVPGSCKETFNLYYYETDSVIATKKSAFWSEAPYLKVDTIAADESFSQVDFGGRLMKVNTEVRSFGPLTRNGFYLAFQDYGACMSLLSVRVFFKKCPSIVQNFAVFPETMTGAESTSLVIARGTCIPNAEEVDVPIKLYCNGDGEWMVPIGRCTCKPGYEPENSVACKACPAGTFKASQEAEGCSHCPSNSRSPAEASPICTCRTGYYRADFDPPEVACTSVPSGPRNVISIVNETSIILEWHPPRETGGRDDVTYNIICKKCRADRRSCSRCDDNVEFVPRQLGLTECRVSISSLWAHTPYTFDIQAINGVSSKSPFPPQHVSVNITTNQAAPSTVPIMHQVSATMRSITLSWPQPEQPNGIILDYEIRYYEKEHNEFNSSMARSQTNTARIDGLRPGMVYVVQVRARTVAGYGKFSGKMCFQTLTDDDYKSELREQLPLIAGSAAAGVVFVVSLVAISIVCSRKRAYSKEAVYSDKLQHYSTGRGSPGMKIYIDPFTYEDPNEAVREFAKEIDVSFVKIEEVIGAGEFGEVYKGRLKLPGKREIYVAIKTLKAGYSEKQRRDFLSEASIMGQFDHPNIIRLEGVVTKSRPVMIITEFMENGALDSFLRQNDGQFTVIQLVGMLRGIAAGMKYLAEMNYVHRDLAARNILVNSNLVCKVSDFGLSRYLQDDTSDPTYTSSLGGKIPVRWTAPEAIAYRKFTSASDVWSYGIVMWEVMSFGERPYWDMSNQDVINAIEQDYRLPPPMDCPAALHQLMLDCWQKDRNSRPRFAEIVNTLDKMIRNPASLKTVATITAVPSQPLLDRSIPDFTAFTTVDDWLSAIKMVQYRDSFLTAGFTSLQLVTQMTSEDLLRIGITLAGHQKKILNSIHSMRVQISQSPTAMA

SEQ ID NO: 146290 - protein, 545 aa, Artificial Sequence
  derived and/or modified sequence
MHQVSATMRSITLSWPQPEQPNGIILDYEIRYYEKEHNEFNSSMARSQTNTARIDGLRPGMVYVVQVRARTVAGYGKFSGKMCFQTLTDDDYKSELREQLPLIAGSAAAGVVFVVSLVAISIVCSRKRAYSKEAVYSDKLQHYSTGRGSPGMKIYIDPFTYEDPNEAVREFAKEIDVSFVKIEEVIGAGEFGEVYKGRLKLPGKREIYVAIKTLKAGYSEKQRRDFLSEASIMGQFDHPNIIRLEGVVTKSRPVMIITEFMENGALDSFLRQNDGQFTVIQLVGMLRGIAAGMKYLAEMNYVHRDLAARNILVNSNLVCKVSDFGLSRYLQDDTSDPTYTSSLGGKIPVRWTAPEAIAYRKFTSASDVWSYGIVMWEVMSFGERPYWDMSNQDVINAIEQDYRLPPPMDCPAALHQLMLDCWQKDRNSRPRFAEIVNTLDKMIRNPASLKTVATITAVPSQPLLDRSIPDFTAFTTVDDWLSAIKMVQYRDSFLTAGFTSLQLVTQMTSEDLLRIGITLAGHQKKILNSIHSMRVQISQSPTAMA

SEQ ID NO: 146291 - DNA, 2955 bp, Artificial Sequence
  derived and/or modified sequence
atggccctcgattacctcttgctgctccttcttgcttctgcagtcgcagccatggaggaaacactgatggatacaaggactgccactgccgaacttggctggaccgctaatcccgcaagtggatgggaggaagttagtggctatgatgaaaatctaaatacaatccgcacttaccaggtttgtaatgtgttcgaacccaatcagaataactggttactgactacattcattaaccgacgcggcgctcacaggatttatactgagatgcggttcacggtgagggactgcagttcgttgcctaatgtcccaggaagctgcaaagagaccttcaacctgtattattatgagacagacagcgtgatagctacgaaaaagtctgcattctggagcgaggccccgtacctgaaggtcgacaccatcgctgccgatgaatccttcagtcaagtggatttcggggggcggctgatgaaggtgaatacagaggtacggagttttggccctttgacgagaaacggcttctatttggcgttccaggattacggagcttgcatgtccctcctgagcgtgcgagtattctttaaaaaatgcccgagcattgttcaaaacttcgcagtattcccggaaaccatgaccggtgcggaaagtacatctctcgttattgctcgtgggacgtgcataccaaatgccgaagaggtggacgttccgataaagctttattgcaatggcgatggcgaatggatggtcccaataggccggtgtacatgtaaaccaggctatgaacccgaaaacagtgtcgcttgcaaggcttgtccggcagggacctttaaggcttcccaagaggccgaggggtgtagccattgtccctcaaactcacgcagccccgcagaggcttctcctatttgtacttgtcgaactggctattatagagcagatttcgatccaccagaagtggcatgcacttctgtaccttcaggacctaggaatgtcatcagcatcgttaatgaaacttccatcatcttggaatggcaccccccccgcgagacgggcggccgggacgatgtaacttacaacatcatctgtaaaaaatgccgagctgaccgccgatcttgcagtcggtgtgatgacaacgtagaatttgtgcctcggcaactgggcctcactgagtgtcgtgtgagcatttcgagtctctgggcacacacgccttacaccttcgacattcaggcaataaacggggtaagtagcaagtccccctttcctccccagcacgtgtccgtgaacattaccacgaaccaggctgcccccagcaccgtgccaatcatgcatcaagtgtccgccaccatgaggagtatcactctatcctggcctcaaccagaacagcccaacggtatcatccttgattacgaaatcaggtattatgagaaggaacataacgaattcaatagttccatggccagaagccagacgaatacagctcggattgatgggctacgacccggaatggtgtacgtagttcaggtgcgggctcgcaccgttgccgggtacggaaagttttctggtaaaatgtgcttccaaacgctcactgacgacgattacaagagcgagttgcgggaacagctcccactgatagctggatccgccgccgccggcgttgtcttcgtggtgtcacttgtagctattagcatagtgtgctctagaaaaagagcatactcaaaagaggcagtttactccgataagctccagcattacagtaccggaaggggttcacctggcatgaagatttacatcgatccctttacatatgaggatcccaacgaggccgtgagggaattcgccaaagagattgacgtgagttttgtgaagattgaggaggtgattggtgctggagagttcggcgaggtgtacaagggcaggctgaagttgcccggtaaaagggagatctatgtggccattaaaacgcttaaggctggttacagcgagaaacaaagaagggattttttgagtgaagcgagcatcatgggacagttcgaccaccctaacatcatccgcctggaaggcgtggtgaccaagagccgtcctgtcatgatcattactgaatttatggagaacggcgccttagacagtttcctcaggcagaatgatggacagttcacagtcattcagctcgtgggcatgctccgtgggatcgcggccggcatgaagtatcttgccgaaatgaactacgtgcaccgggacctggctgctcggaatatcctcgtgaactccaatttagtgtgcaaggtgtcagactttggcctcagccgctacctgcaggacgacacctctgacccaacctacacgtcttccctggggggaaaaattcctgtgcgatggaccgcaccggaggccattgcctatcggaaattcaccagcgccagcgatgtatggagttacgggatcgtaatgtgggaagttatgagctttggcgagcggccttattgggatatgtctaaccaggacgtcatcaacgcaatcgaacaggactatagactgcccccccccatggactgcccagctgccctccatcagctgatgctggactgttggcagaaagaccggaattctcgccctcgcttcgctgagattgtgaacactctggataaaatgattagaaaccctgcctcactgaaaaccgttgcaacgattaccgcagtgccttctcagcccctgttagataggagcattcctgactttactgccttcacaacagttgacgactggttgtctgcaatcaaaatggttcagtaccgggacagtttcctgaccgccggattcacgagcctccagttggttacccagatgacttctgaggatctccttcgtatcggtatcacactagcaggacaccaaaagaaaattttgaattcaatccactccatgcgggtacagatcagccagagcccgaccgcaatggcatag

SEQ ID NO: 146292 - DNA, 2955 bp, Artificial Sequence
  derived and/or modified sequence
atggccctggactacctgctgctgctgctgctggccagcgctgtggccgccatggaggagaccctgatggacaccaggacagccacagctgagctgggctggacagccaacccagccagcggctgggaggaggtgtctggctatgatgagaacctgaacaccatccgcacctaccaggtgtgcaatgtgtttgagcccaaccagaacaactggctgctgaccaccttcatcaacagaagaggagcccaccgcatctacacagagatgaggttcaccgtgcgggactgcagcagcctgcccaacgtgcccggcagctgcaaggagaccttcaacctgtactactatgaaacagattctgtgattgccaccaagaagagcgccttctggagcgaggccccctacctgaaggtggacaccatcgccgcagatgagagcttcagccaggtggactttggaggccgcctgatgaaggtgaacacagaggtgcgcagctttggccccctgaccagaaatggcttctacctggccttccaggactatggagcctgcatgagcctgctgtctgtgcgggtcttcttcaagaagtgccccagcatcgtgcagaactttgctgtgtttcctgagaccatgactggagctgagagcaccagcctggtgattgcccggggcacctgcatccccaatgctgaggaggtggatgtgcccatcaagctgtactgcaatggagatggagagtggatggtgcccatcggccgctgcacctgcaagccaggctatgagcctgagaacagcgtggcctgcaaggcctgcccagctggcaccttcaaggccagccaggaggccgagggctgcagccactgccccagcaacagccgcagccctgctgaggccagccccatctgcacctgcaggacaggctactacagagctgactttgaccccccagaggtggcctgcacctctgtgcccagcggccccagaaatgtcatcagcatcgtgaatgagaccagcatcatcctggagtggcaccccccccgggagaccggcggcagagatgatgtgacctacaacatcatctgcaagaagtgcagagctgacagaagaagctgcagccgctgtgatgacaacgtggagtttgtgccccggcagctgggcctgacagagtgccgggtgtccatcagcagcctgtgggcccacaccccctacacctttgacatccaggccatcaacggggtgagcagcaagagccccttccccccccagcacgtgtctgtgaacatcaccaccaaccaggccgcccccagcacagtgcccatcatgcaccaggtgtctgccaccatgaggagcatcaccctgtcctggccccagcctgagcagcccaacggcatcatcctggactatgagatccgctactatgagaaggagcacaatgagttcaacagctccatggcccggagccagaccaacacagccagaattgatggcctgcggcccggcatggtgtatgtggtgcaggtgcgggccaggacagtggccggctacggcaagttcagcggcaagatgtgcttccagaccctgacagatgatgactacaagtctgagctgcgggagcagctgcccctgattgctggcagcgctgctgctggggtggtgtttgtggtgtccctggtggccatcagcatcgtgtgcagcaggaagagggcctacagcaaggaggccgtgtacagcgacaagctgcagcactacagcacaggccggggcagccctggcatgaagatctacatcgaccccttcacctatgaggaccccaatgaggccgtgcgggagtttgccaaggagattgatgtgtcctttgtgaagattgaggaggtgattggagctggggagtttggagaggtgtacaagggccgcctgaagctgcccgggaagcgggagatctacgtggccatcaagaccctgaaggccggctacagcgagaagcagaggcgggacttcctgtctgaggccagcatcatgggccagtttgaccaccccaacatcatccggctggagggcgtggtgaccaagagcaggcctgtgatgatcatcacagagttcatggagaatggagccctggacagcttcctgcggcagaatgatggccagttcaccgtcatccagctggtgggcatgctgcggggcattgctgctggcatgaagtacctggccgagatgaactacgtgcaccgggacctggccgccaggaacatcctggtgaacagcaacctggtgtgcaaggtgtctgactttggcctgagccgctacctgcaggatgacaccagtgaccccacctacaccagcagcctgggcggcaagatccctgtgcgctggacagcccctgaggccatcgcctacaggaagttcaccagcgccagtgatgtgtggagctatggcatcgtgatgtgggaggtgatgagctttggagagcggccctactgggacatgagcaaccaggacgtcatcaatgccatcgagcaggactaccgcctgcccccacccatggactgcccagctgccctgcaccagctgatgctggactgctggcagaaggacaggaacagccggcccaggtttgctgagatcgtgaacaccctggacaagatgatcagaaatcctgccagcctgaagacagtggccaccatcacagctgtgcccagccagcccctgctggacaggagcatcccagacttcaccgccttcaccaccgtggatgactggctgagcgccatcaagatggtgcagtacagagacagcttcctgacagctggcttcaccagcctgcagctggtgacccagatgaccagcgaggacctgctgcgcatcggcatcaccctggccggccaccagaagaagatcctgaacagcatccacagcatgagggtgcagatcagccagagccccacagccatggcctag

SEQ ID NO: 146293 - DNA, 2955 bp, Artificial Sequence
  derived and/or modified sequence
atggccctggactacctgctgctgctgctgctggccagcgccgtggccgctatggaggaaaccctaatggatacacggactgccactgcagagctggggtggactgcgaatcctgcctcaggttgggaggaggtctctggttacgacgaaaacctgaatactattagaacctaccaagtttgtaatgtcttcgagccgaatcagaacaactggttattgaccacctttattaaccgcagaggcgcacaccgaatatatactgagatgcgatttactgtgcgagactgctctagcttgcccaatgtcccagggtcatgcaaggagacctttaacctctactactatgagactgacagcgtaatcgccaccaagaagtctgctttctggagcgaggcgccctaccttaaggtggatacaatcgccgccgatgagtcttttagccaggtggattttggcggaaggctgatgaaagtgaatacagaggtccgcagctttggcccattgacacgaaatgggttttatctggcttttcaagattacggggcctgcatgtctttattgtctgtgagggtcttttttaaaaagtgtccatcaatcgtccagaacttcgctgtgtttccagagacaatgacaggcgccgagagcaccagccttgtgatagccaggggtacatgcattccaaacgcggaggaagtggatgtcccaatcaaactctactgtaacggtgatggtgagtggatggtgcctatcggtcgatgcacctgtaaaccgggttacgagccagagaactccgtggcctgcaaagcctgcccagctgggacttttaaggcttcacaagaagccgaggggtgtagccactgcccatccaactctcgctctccagctgaagcgtcccccatttgtacatgtcggactggctactacagagctgactttgacccccccgaggtcgcgtgcacaagcgtgccatccgggccacggaacgtaatctccatcgttaatgaaactagcatcattctggagtggcacccaccacgggaaacaggtgggcgcgatgatgtcacctacaacataatctgcaaaaagtgccgggctgaccggcgcagctgttccagatgcgacgataacgtagagtttgtgccaaggcagcttggtctaacagagtgccgagtgtccatctccagtctgtgggcccatactccgtacacatttgatattcaagccataaacggagtatcaagcaagagcccctttcctccgcagcatgtatccgtgaacatcaccacgaaccaagccgcacccagtaccgttccaatcatgcatcaggtttccgctacaatgagaagtatcactctctcatggccccaaccagagcagccaaacgggatcattctggactacgagatccgctactatgaaaaagagcacaatgagttcaacagttctatggcgaggagccagacgaacacagctaggatcgacgggctgcgcccaggcatggtatatgtggttcaggtacgcgcccgaaccgtagccgggtatgggaagttttcgggtaagatgtgctttcagaccttgaccgacgacgattacaagagtgaattacgtgagcagctccccctgatcgcagggtctgctgcagccggagttgtgttcgtcgtctccctggtggcaatcagtattgtctgcagtcggaaaagggcctacagtaaggaggcggtttatagtgacaaactgcagcactattctacaggaagggggtctcccggaatgaagatctatatcgaccccttcacctatgaggatcccaatgaagccgtccgcgaatttgccaaagaaatcgatgtttcgtttgtgaaaatcgaggaggtgataggcgccggagagtttggcgaggtctataagggtcgactgaagcttcctgggaagcgagagatctacgtggccatcaaaaccttgaaggccggctatagcgagaagcaacggagggacttcctgtccgaagcctctataatgggccaattcgaccaccccaatattataaggcttgagggagtggtgactaagtctaggccggttatgatcattactgaatttatggagaacggggcactggattcattcctgcgtcagaacgatggtcaatttactgttatccagctagttggtatgctcaggggtattgctgcaggaatgaaatacctcgcggaaatgaactacgtccatcgggacctcgctgccagaaacatcctggtgaatagcaacctggtgtgtaaggtcagcgattttggtctctcccgctatctgcaggatgacactagcgacccgacttacacgagtagccttggcgggaagattcctgtccggtggacagccccagaggccatcgcctaccgcaagtttacaagtgccagcgacgtatggagttacggcatcgtcatgtgggaggtcatgtcattcggcgagcgtccttactgggacatgagcaatcaagacgtcatcaacgctattgaacaggactatcggctacctccacctatggactgtcccgccgcgctgcatcagttgatgctggactgttggcagaaggatagaaattccagaccccgtttcgctgagatagtgaacaccctagacaagatgataagaaacccagctagtctgaagactgtggcgaccatcacggcagtgccctctcaacccctgttagaccgttccatcccagatttcactgcattcactaccgttgacgactggttgagtgccattaaaatggtgcagtaccgggacagtttccttaccgcgggattcacctcattgcagctcgtgactcaaatgacgtctgaggatctgctgcgaattggcataaccctagctgggcaccagaagaaaatcttgaatagtatccattcaatgcgggtccagatctctcagagtccaactgctatggcttag

SEQ ID NO: 146294 - DNA, 2955 bp, Artificial Sequence
  derived and/or modified sequence
atggccctggactacctcttgttgctgttgttggcgagtgccgtcgccgcaatggaagagacactcatggacaccaggactgcaacggctgagttaggctggacagccaatcctgccagtggctgggaggaggtgtccgggtatgacgagaacctgaacacaatccgcacctatcaagtttgcaatgtgttcgagccgaaccagaacaattggctccttacgacattcatcaacaggcgcggtgcacacagaatttataccgaaatgagattcacagtgagagattgttcttctctgccaaacgtgccaggatcttgcaaggaaacttttaacctatattattacgaaaccgattcagtcatagccactaagaaatccgcgttctggtcggaggcgccttatctgaaagtcgatacaattgccgcagacgaatccttttctcaggtggatttcgggggacgcctgatgaaggtgaacaccgaggttcgttcttttggacctctgacacgtaacggcttctatctcgcctttcaagactacggcgcttgcatgtccctgcttagcgttagggtatttttcaaaaagtgtcctagtatcgtccagaatttcgccgtttttccagaaactatgaccggagcagaaagtacatccctcgtgatcgcgaggggtacttgtatcccaaacgccgaagaggttgatgtccctattaagctctattgtaacggcgacggagaatggatggtccctataggacggtgtacatgcaaacccggatatgagccagagaactctgtagcttgcaaagcttgccctgccggaaccttcaaggcaagtcaagaggcagaagggtgctctcactgcccctcgaactcaagaagccctgctgaggctagcccgatatgcacctgccgaactggctactatcgggctgattttgatccgcctgaggttgcgtgtaccagcgtgccttcaggtcctaggaatgtgatctcaatcgtgaatgagactagtatcatcctagagtggcatcctccccgtgagaccggaggcagggatgacgtaacctacaacatcatctgcaagaaatgtagagcggacagacgctcgtgctcacgatgcgacgataatgtggaattcgtgcctcgccagctcggcctgacagagtgcagagtgtcaataagttcactgtgggcccacaccccctatacttttgatatacaggcaataaacggagtgagcagtaagtctccctttccccctcagcatgtgagcgtcaacataacgacgaatcaggccgcaccttccacagtgccaatcatgcatcaagtaagtgccactatgcggagcattacactgagctggccacagcccgaacaaccaaacggcattattctcgattatgagatcaggtactacgaaaaggagcacaacgaattcaacagctcaatggccagaagccaaacaaacaccgccagaatcgacggactgagacccggtatggtctatgtggtgcaggtgagagctcgcacagtggcaggctacggaaagttttctgggaagatgtgcttccagactcttacagacgacgactacaagagtgagctgcgtgagcagcttcctttgatcgccggtagtgcagccgctggcgtcgtttttgtcgttagtcttgtcgcaatctcaatagtgtgtagtcgcaaacgggcatatagtaaagaggctgtgtacagtgataagttacaacattacagcactggtcgtggctctccaggcatgaagatatacatcgacccattcacctacgaagatcctaatgaggccgttcgagagtttgctaaagaaatcgacgtatcattcgtgaagattgaagaagtgatcggggcaggcgagttcggggaggtgtataagggcaggcttaagctgcctggcaagcgcgaaatctacgtcgccatcaaaactcttaaagccggttatagcgaaaaacagaggcgggatttcctttctgaagcaagcatcatgggccagtttgaccatccaaatatcatcagattggaaggcgtagtgacaaaaagccggcctgtcatgatcattaccgagtttatggagaacggagcactcgattcctttctccgacaaaacgacggtcagttcaccgtcattcaactcgtcggcatgttacggggaattgccgcaggcatgaagtacttggccgagatgaattacgtgcatagagacttggccgctagaaacatactggttaacagtaacttagtttgtaaagtatctgatttcggtctgtctagatatctgcaggacgacacatcggatcctacatatacaagctctctgggcggtaaaattcctgttcgatggacagccccagaggcaatcgcctatcggaaattcacgtctgcttctgacgtctggagctacgggatcgtgatgtgggaggtgatgagtttcggagaacgaccctattgggacatgtctaatcaggatgtgattaatgccattgagcaggactaccgactgccgcctcccatggactgccctgctgcgttgcaccagctgatgcttgattgctggcagaaagacaggaactcacgcccacgattcgccgagatcgtcaatactctggacaagatgataaggaacccagccagcctgaaaacggtcgcgacaatcacagcggtcccctcccagcctctgttagaccgtagcattcccgattttaccgcttttacaacggtggacgactggctcagtgccataaaaatggtgcagtacagggattccttccttacggctggcttcacgagcctccaacttgtgacccagatgacatccgaggaccttttacgaatcggaattaccttggcagggcaccagaaaaagattctgaattctattcactcaatgcgggtgcagatttcacaatcccctacggccatggcctag

SEQ ID NO: 146295 - DNA, 2955 bp, Artificial Sequence
  derived and/or modified sequence
atggccctggactacctgctgctgctgctgctggccagcgccgtggccgccatggaggagaccctgatggacaccagaaccgccaccgccgagctgggctggaccgccaaccccgccagcggctgggaggaggtgagcggctacgacgagaacctgaacaccatcagaacctaccaggtgtgcaacgtgttcgagcccaaccagaacaactggctgctgaccaccttcatcaacagaagaggcgcccacagaatctacaccgagatgagattcaccgtgagagactgcagcagcctgcccaacgtgcccggcagctgcaaggagaccttcaacctgtactactacgagaccgacagcgtgatcgccaccaagaagagcgccttctggagcgaggccccctacctgaaggtggacaccatcgccgccgacgagagcttcagccaggtggacttcggcggcagactgatgaaggtgaacaccgaggtgagaagcttcggccccctgaccagaaacggcttctacctggccttccaggactacggcgcctgcatgagcctgctgagcgtgagagtgttcttcaagaagtgccccagcatcgtgcagaacttcgccgtgttccccgagaccatgaccggcgccgagagcaccagcctggtgatcgccagaggcacctgcatccccaacgccgaggaggtggacgtgcccatcaagctgtactgcaacggcgacggcgagtggatggtgcccatcggcagatgcacctgcaagcccggctacgagcccgagaacagcgtggcctgcaaggcctgccccgccggcaccttcaaggccagccaggaggccgagggctgcagccactgccccagcaacagcagaagccccgccgaggccagccccatctgcacctgcagaaccggctactacagagccgacttcgacccccccgaggtggcctgcaccagcgtgcccagcggccccagaaacgtgatcagcatcgtgaacgagaccagcatcatcctggagtggcacccccccagagagaccggcggcagagacgacgtgacctacaacatcatctgcaagaagtgcagagccgacagaagaagctgcagcagatgcgacgacaacgtggagttcgtgcccagacagctgggcctgaccgagtgcagagtgagcatcagcagcctgtgggcccacaccccctacaccttcgacatccaggccatcaacggcgtgagcagcaagagccccttccccccccagcacgtgagcgtgaacatcaccaccaaccaggccgcccccagcaccgtgcccatcatgcaccaggtgagcgccaccatgagaagcatcaccctgagctggccccagcccgagcagcccaacggcatcatcctggactacgagatcagatactacgagaaggagcacaacgagttcaacagcagcatggccagaagccagaccaacaccgccagaatcgacggcctgagacccggcatggtgtacgtggtgcaggtgagagccagaaccgtggccggctacggcaagttcagcggcaagatgtgcttccagaccctgaccgacgacgactacaagagcgagctgagagagcagctgcccctgatcgccggcagcgccgccgccggcgtggtgttcgtggtgagcctggtggccatcagcatcgtgtgcagcagaaagagagcctacagcaaggaggccgtgtacagcgacaagctgcagcactacagcaccggcagaggcagccccggcatgaagatctacatcgaccccttcacctacgaggaccccaacgaggccgtgagagagttcgccaaggagatcgacgtgagcttcgtgaagatcgaggaggtgatcggcgccggcgagttcggcgaggtgtacaagggcagactgaagctgcccggcaagagagagatctacgtggccatcaagaccctgaaggccggctacagcgagaagcagagaagagacttcctgagcgaggccagcatcatgggccagttcgaccaccccaacatcatcagactggagggcgtggtgaccaagagcagacccgtgatgatcatcaccgagttcatggagaacggcgccctggacagcttcctgagacagaacgacggccagttcaccgtgatccagctggtgggcatgctgagaggcatcgccgccggcatgaagtacctggccgagatgaactacgtgcacagagacctggccgccagaaacatcctggtgaacagcaacctggtgtgcaaggtgagcgacttcggcctgagcagatacctgcaggacgacaccagcgaccccacctacaccagcagcctgggcggcaagatccccgtgagatggaccgcccccgaggccatcgcctacagaaagttcaccagcgccagcgacgtgtggagctacggcatcgtgatgtgggaggtgatgagcttcggcgagagaccctactgggacatgagcaaccaggacgtgatcaacgccatcgagcaggactacagactgcccccccccatggactgccccgccgccctgcaccagctgatgctggactgctggcagaaggacagaaacagcagacccagattcgccgagatcgtgaacaccctggacaagatgatcagaaaccccgccagcctgaagaccgtggccaccatcaccgccgtgcccagccagcccctgctggacagaagcatccccgacttcaccgccttcaccaccgtggacgactggctgagcgccatcaagatggtgcagtacagagacagcttcctgaccgccggcttcaccagcctgcagctggtgacccagatgaccagcgaggacctgctgagaatcggcatcaccctggccggccaccagaagaagatcctgaacagcatccacagcatgagagtgcagatcagccagagccccaccgccatggcctag

SEQ ID NO: 146296 - DNA, 4672 bp, Artificial Sequence
  derived and/or modified sequence
tctggccggctccgtcctcccgtaggctccgctgtagctagcaatgtgacaccaggacgcactcgctctcgcgcgctctcccaggctcgttctccctcgccctctctctctcacacacgcacgcacacacccacctctcccataaacacacacacacacatgcacacccacacccacgcgcgcccgcaccgccccacgcgcacacactcctgcccacgcccacgcagcgctccgggaagtccggtccgggcgagagcgcgaaaggataccgagaagccacccgcggagagcgcagcggcgccctgggacgcggcgctctcccggcgctgctgcctcggcttggtctcggcctgcgggccgtcggccggcgatggccctggattatctactactgctcctcctggcatccgcagtggctgcgatggaagaaacgttaatggacaccagaacggctactgcagagctgggctggacggccaatcctgcgtccgggtgggaagaagtcagtggctacgatgaaaacctgaacaccatccgcacctaccaggtgtgcaatgtcttcgagcccaaccagaacaattggctgctcaccaccttcatcaaccggcggggggcccatcgcatctacacagagatgcgcttcactgtgagagactgcagcagcctccctaatgtcccaggatcctgcaaggagaccttcaacttgtattactatgagactgactctgtcattgccaccaagaagtcagccttctggtctgaggccccctacctcaaagtagacaccattgctgcagatgagagcttctcccaggtggactttgggggaaggctgatgaaggtaaacacagaagtcaggagctttgggcctcttactcggaatggtttttacctcgcttttcaggattatggagcctgtatgtctcttctttctgtccgtgtcttcttcaaaaagtgtcccagcattgtgcaaaattttgcagtgtttccagagactatgacaggggcagagagcacatctctggtgattgctcggggcacatgcatccccaacgcagaggaagtggacgtgcccatcaaactctactgcaacggggatggggaatggatggtgcctattgggcgatgcacctgcaagcctggctatgagcctgagaacagcgtggcatgcaaggcttgccctgcagggacattcaaggccagccaggaagctgaaggctgctcccactgcccctccaacagccgctcccctgcagaggcgtctcccatctgcacctgtcggaccggttattaccgagcggactttgaccctccagaagtggcatgcactagcgtcccatcaggtccccgcaatgttatctccatcgtcaatgagacgtccatcattctggagtggcaccctccaagggagacaggtgggcgggatgatgtgacctacaacatcatctgcaaaaagtgccgggcagaccgccggagctgctcccgctgtgacgacaatgtggagtttgtgcccaggcagctgggcctgacggagtgccgcgtctccatcagcagcctgtgggcccacaccccctacacctttgacatccaggccatcaatggagtctccagcaagagtcccttccccccacagcacgtctctgtcaacatcaccacaaaccaagccgccccctccaccgttcccatcatgcaccaagtcagtgccactatgaggagcatcaccttgtcatggccacagccggagcagcccaatggcatcatcctggactatgagatccggtactatgagaaggaacacaatgagttcaactcctccatggccaggagtcagaccaacacagcaaggattgatgggctgcggcctggcatggtatatgtggtacaggtgcgtgcccgcactgttgctggctacggcaagttcagtggcaagatgtgcttccagactctgactgacgatgattacaagtcagagctgagggagcagctgcccctgattgctggctcggcagcggccggggtcgtgttcgttgtgtccttggtggccatctctatcgtctgtagcaggaaacgggcttatagcaaagaggctgtgtacagcgataagctccagcattacagcacaggccgaggctccccagggatgaagatctacattgaccccttcacttacgaggatcccaacgaagctgtccgggagtttgccaaggagattgatgtatcttttgtgaaaattgaagaggtcatcggagcaggggagtttggagaagtgtacaaggggcgtttgaaactgccaggcaagagggaaatctacgtggccatcaagaccctgaaggcagggtactcggagaagcagcgtcgggactttctgagtgaggcgagcatcatgggccagttcgaccatcctaacatcattcgcctggagggtgtggtcaccaagagtcggcctgtcatgatcatcacagagttcatggagaatggtgcattggattctttcctcaggcaaaatgacgggcagttcaccgtgatccagcttgtgggtatgctcaggggcatcgctgctggcatgaagtacctggctgagatgaattatgtgcatcgggacctggctgctaggaacattctggtcaacagtaacctggtgtgcaaggtgtccgactttggcctctcccgctacctccaggatgacacctcagatcccacctacaccagctccttgggagggaagatccctgtgagatggacagctccagaggccatcgcctaccgcaagttcacttcagccagcgacgtttggagctatgggatcgtcatgtgggaagtcatgtcatttggagagagaccctattgggatatgtccaaccaagatgtcatcaatgccatcgagcaggactaccggctgcccccacccatggactgtccagctgctctacaccagctcatgctggactgttggcagaaggaccggaacagccggccccggtttgcggagattgtcaacaccctagataagatgatccggaacccggcaagtctcaagactgtggcaaccatcaccgccgtgccttcccagcccctgctcgaccgctccatcccagacttcacggcctttaccaccgtggatgactggctcagcgccatcaaaatggtccagtacagggacagcttcctcactgctggcttcacctccctccagctggtcacccagatgacatcagaagacctcctgagaataggcatcaccttggcaggccatcagaagaagatcctgaacagcattcattctatgagggtccagataagtcagtcaccaacggcaatggcatgagaactcttgtttcttggggaaggagaggagggaaaaggaccagggtcaagggggaccagaggttgaccactgtggaatgtactggagagactggcttctcagctgaggaatgcatttccatcagtgaagaatcaaccggacctgttgctagcaggcaatctccatttctcagtgacagaagcatgtttgagatgccgtgggaaaccaaatatataataataaaaatataaaaaggtgatgttcaacagaagtgaagacaaaacaatatgcatcaggagaacaagagtaaacccagctcccattctcagtgggctgcagttgcccaaccacaggaagaaagggaaggaggtagagggaagaaacagaagcagtgttccattttcttcctcaccaatgacattcttttcttttctcctttcgtactcctccctgagagtcccctcccttctcccacactcgtttccctttgctcatgactcctgtagggaagtttcttcaaacaaaacccagctcctgagtctccagatgttgttctgtcagttgccaaaggactttgctgaccactgcatggggatccaaccaattcaattaatgtcttcatattgaagaagagatgtaccttcaattgaaaacctcgtttttcttttgtttgcattttctgcaaaaaggaaaaagaaaccacaaattggggaaaaaaaaagaagaaaaacctgtttccgtgtgcaaaagcacacatatgtatgtctgtgttataaaatgactgtgcttgttcgtaacagatgcaaacaagaaagaagaactgggaagtctttgtccctaggaaatccaaaggggctggaatatggtgttggtttggctttctggttggcccaatcggcctattggctcaatgggaagagaggagagggagaaaaataaaatgaaaggaaaaaaaaaagtttgcaaattcagacaggaaacaggtgagtggtttgaattggatgcagtgtgggccatcctggaatgatactgactgattaattattcctgataacatctcaagaaaaggagaaggaaagtgtttctggagaatgttctttcacatcactggaatctgcaattcaagaagtgacaagggagaattcttgctttacctatggactggcttaagccgtgtggcatccgaggaatgtttcaaatgtgtctgtgtttctctttacattccttgttgtacctcattgttcaattcacttttgtaaattccacctaacatttaattattttaaatttctccttttaccttaatctccttgctaattttatctgtctaattaaaaagagcagaagcatgtctgggtttacgtaaaa

SEQ ID NO: 146297 - protein, 998 aa, Artificial Sequence
  derived and/or modified sequence
MARARPPPPPSPPPGLLPLLPPLLLLPLLLLPAGCRALEETLMDTKWVTSELAWTSHPESGWEEVSGYDEAMNPIRTYQVCNVRESSQNNWLRTGFIWRRDVQRVYVELKFTVRDCNSIPNIPGSCKETFNLFYYEADSDVASASSPFWMENPYVKVDTIAPDESFSRLDAGRVNTKVRSFGPLSKAGFYLAFQDQGACMSLISVRAFYKKCASTTAGFALFPETLTGAEPTSLVIAPGTCIPNAVEVSVPLKLYCNGDGEWMVPVGACTCATGHEPAAKESQCRPCPPGSYKAKQGEGPCLPCPPNSRTTSPAASICTCHNNFYRADSDSADSACTTVPSPPRGVISNVNETSLILEWSEPRDLGGRDDLLYNVICKKCHGAGGASACSRCDDNVEFVPRQLGLTERRVHISHLLAHTRYTFEVQAVNGVSGKSPLPPRYAAVNITTNQAAPSEVPTLRLHSSSGSSLTLSWAPPERPNGVILDYEMKYFEKSEGIASTVTSQMNSVQLDGLRPDARYVVQVRARTVAGYGQYSRPAEFETTSERGSGAQQLQEQLPLIVGSATAGLVFVVAVVVIAIVCLRKQRHGSDSEYTEKLQQYIAPGMKVYIDPFTYEDPNEAVREFAKEIDVSCVKIEEVIGAGEFGEVCRGRLKQPGRREVFVAIKTLKVGYTERQRRDFLSEASIMGQFDHPNIIRLEGVVTKSRPVMILTEFMENCALDSFLRLNDGQFTVIQLVGMLRGIAAGMKYLSEMNYVHRDLAARNILVNSNLVCKVSDFGLSRFLEDDPSDPTYTSSLGGKIPIRWTAPEAIAYRKFTSASDVWSYGIVMWEVMSYGERPYWDMSNQDVINAVEQDYRLPPPMDCPTALHQLMLDCWVRDRNLRPKFSQIVNTLDKLIRNAASLKVIASAQSGMSQPLLDRTVPDYTTFTTVGDWLDAIKMGRYKESFVSAGFASFDLVAQMTAEDLLRIGVTLAGHQKKILSSIQDMRLQMNQTLPVQV

SEQ ID NO: 146298 - DNA, 2997 bp, Artificial Sequence
  derived and/or modified sequence
atggcccgggcccgccccccacctccccctagcccccctccgggcctgcttccacttctgcctcctctgcttctattgcccttactcttacttcccgccggatgccgcgcccttgaggagaccttgatggataccaaatgggtgacaagcgaactcgcctggacaagccatccagagtccgggtgggaggaggtatctggatatgacgaagcaatgaacccgattcgaacttaccaggtgtgcaatgtgcgtgaatccagccagaacaactggcttcgcaccggattcatttggcgcagagacgtgcagcgcgtgtatgtggagttaaagttcaccgtccgggactgtaacagcatcccaaacattcctggcagttgcaaagagacctttaatctgttctactacgaggccgactccgatgttgcaagcgccagctctccattttggatggaaaatccttacgtcaaggtggacacaatagcgccagacgagtcctttagcaggctagatgccggacgggtgaacactaaggtccggagctttggaccactgagtaaggccggtttttacctggcctttcaggatcaaggcgcatgtatgagtctgattagtgtccgcgccttctacaaaaaatgtgccagtacgacggccggctttgctttattccccgagacacttaccggcgctgagcctacttccctagtgattgctcccggcacttgtattcctaatgctgtggaagtttccgtgccgttaaagctgtactgtaacggcgacggggagtggatggtccctgtgggtgcctgtacttgtgcgaccggccacgagcccgcagccaaagagagccagtgtcgcccatgtccccctggaagttacaaggctaaacagggcgagggaccgtgtctgccttgcccaccaaacagtcgcacaacttctccggccgcctccatttgtacctgtcataataatttctatcgggctgacagtgactcagctgactcagcctgtactacagtccccagcccgcctcgaggtgtcattagcaacgtgaacgaaacaagcctgattctcgaatggtcggaacctcgtgacctgggcggacgtgacgacctgctgtacaatgtgatttgcaagaaatgccacggggcggggggagccagtgcttgctcacggtgcgatgacaacgtggaattcgttcctaggcagctggggctcactgagcggagagtacacatttcacatctgttggcccatacgaggtacacattcgaggtgcaggccgtaaatggagttagtggcaagagtcccctgccaccgaggtacgcagctgtgaatattaccactaatcaggcagctcctagcgaggtgccaactcttcgcctgcatagctcatcagggtctagcctgaccctgtcctgggcccctcccgagagacccaatggggttatactcgactacgagatgaaatacttcgaaaaaagcgaaggcatcgcttcgacagtgacatcccagatgaactccgtacagctagacggtctgagaccggatgcacggtacgtggtgcaagttagagcccgaacagttgcagggtatggccagtactcccgtcccgctgaatttgagaccacctcagaaaggggctcaggtgcacagcagctccaggagcaactgccactgatagtcggttctgccacagccggactggtgtttgttgtggctgtggtggttatcgccatcgtgtgtctgcgcaagcaaaggcatggctccgacagtgaatacaccgagaaactgcaacaatatatcgcgcccgggatgaaagtctatattgatccgttcacttatgaagacccgaacgaggccgttagggagttcgctaaggaaattgacgtctcgtgcgtcaagattgaagaagtgatcggcgctggagaattcggagaagtttgtcgagggcgccttaagcagccgggacgaagggaggttttcgtggcaattaagaccctgaaggtgggttacacagagagacaacgaagagatttcctgtctgaagctagcatcatgggccagttcgatcatccgaacatcatacggttggagggagttgtaacgaagtctcggcccgttatgatcctgactgagttcatggaaaactgcgccctggacagctttctccggttaaatgatgggcagttcaccgtgattcagctggtgggaatgctgaggggcatcgcagcgggcatgaaatatcttagcgagatgaactacgtgcacagggacctggcagccagaaacattctggtcaactcgaatctggtgtgcaaagtatccgactttgggctgagccggtttctcgaggatgatccctccgacccaacgtacactagttcacttgggggcaagattcccatccgttggacagcccctgaggccatcgcctaccgcaagtttacctctgcgtccgatgtgtggtcgtacgggattgtcatgtgggaagtgatgtcatatggcgagcggccatactgggacatgagtaaccaggacgtcattaacgctgttgaacaagactacagattgcctccgcctatggactgtccgaccgctctccaccagctgatgttggactgttgggttagggatcggaatttacgtcccaagttttcacagatcgtgaatactctggataagctgatccgcaatgcagctagcctgaaagtgatcgctagcgcgcaatcagggatgtcccaacccctcctggatcgaactgttcccgattacacaaccttcactacagttggcgactggctggatgccatcaaaatggggaggtataaggagtctttcgttagtgctggcttcgccagtttcgacctggtggctcagatgactgcagaagatctgctccgcattggtgttacgctggcaggacaccaaaagaagatcttatctagcatccaggatatgcgccttcagatgaaccagaccctcccggtccaggtatag

SEQ ID NO: 146299 - DNA, 2997 bp, Artificial Sequence
  derived and/or modified sequence
atggcccgggcccggcccccacctccacccagccccccacctggcctgctgcccctgctgccccccctgctgctgctgcccctgctgctgctgcctgctggctgccgggccctggaggagaccctgatggacaccaagtgggtgaccagcgagctggcctggaccagccaccctgagagcggctgggaggaggtgtctggctatgatgaggccatgaaccccatccgcacctaccaggtgtgcaatgtgcgggagagcagccagaacaactggctgaggacaggcttcatctggaggagagatgtgcagagggtgtatgtggagctgaagttcaccgtgcgggactgcaacagcatccccaacatccctggcagctgcaaggagaccttcaacctcttctactatgaagctgacagtgatgtggccagcgccagcagccccttctggatggagaacccctacgtgaaggtggacaccatcgccccagatgagagcttcagccggctggatgctggccgggtgaacaccaaggtgcgcagctttggccccctgagcaaggccggcttctacctggccttccaggaccagggcgcctgcatgagcctcatctctgtgcgggccttctacaagaagtgtgccagcaccacagctggctttgccctcttccctgagaccctgactggagctgagcccaccagcctggtgattgcccctggcacctgcatccccaatgctgtggaggtgtctgtgcccctgaagctgtactgcaatggagatggagagtggatggtgcctgtgggcgcctgcacctgtgccactggacatgagcctgctgccaaggagagccagtgccggccctgccccccaggcagctacaaggccaagcagggcgagggcccctgcctgccctgcccccccaacagcaggaccaccagccctgctgccagcatctgcacctgccacaacaacttctacagagctgacagcgacagcgctgacagcgcctgcaccaccgtgcccagccccccccggggcgtcatcagcaatgtgaatgagaccagcctcatcctggagtggagcgagccccgggacctgggcggcagagatgacctgctgtacaacgtcatctgcaagaagtgccacggggccggcggggccagcgcctgcagccgctgtgatgacaacgtggagtttgtgccccggcagctgggcctgacagagcggcgggtgcacatcagccacctgctggcccacacccgctacacctttgaggtgcaggccgtgaatggagtgtctgggaagagccccctgccccccaggtatgctgctgtgaacatcaccaccaaccaggccgcccccagcgaggtgcccaccctgcggctgcacagcagcagcggcagcagcctgaccctgtcctgggcccctcctgagcggcccaacggggtcatcctggactatgagatgaagtactttgagaagtctgagggcatcgccagcacagtgaccagccagatgaacagcgtgcagctggatggcctgcggccagatgcccgctacgtggtgcaggtgcgggccaggacagtggccggctacggccagtacagcaggcctgctgagtttgagaccaccagcgagcggggcagcggggcccagcagctgcaggagcagctgcccctcatcgtgggcagcgccacagctggcctggtgtttgtggtggccgtggtggtgattgccatcgtgtgcctgaggaagcagagacatggcagtgacagcgagtacacagagaagctgcagcagtacatcgcccctggcatgaaggtgtacatcgaccccttcacctatgaggaccccaatgaggccgtgcgggagtttgccaaggagattgatgtgtcctgtgtgaagattgaggaggtgattggagctggggagtttggagaggtgtgccggggccgcctgaagcagcctggaagaagagaggtgtttgtggccatcaagaccctgaaggtgggctacacagagcggcagaggcgggacttcctgtctgaggccagcatcatgggccagtttgaccaccccaacatcatccggctggagggcgtggtgaccaagagcaggcctgtgatgatcctgacagagttcatggagaactgtgccctggacagcttcctgcggctgaatgatggccagttcaccgtcatccagctggtgggcatgctgcggggcattgctgctggcatgaagtacctgtctgagatgaactacgtgcaccgggacctggccgccaggaacatcctggtgaacagcaacctggtgtgcaaggtgtctgactttggcctgagccgcttcctggaggatgaccccagcgaccccacctacaccagcagcctgggcggcaagatccccatccgctggacagcccctgaggccatcgcctacaggaagttcaccagcgccagtgatgtgtggagctatggcatcgtgatgtgggaggtgatgtcctatggagagcggccctactgggacatgagcaaccaggacgtcatcaatgctgtggagcaggactaccgcctgcccccacccatggactgccccacagccctgcaccagctgatgctggactgctgggtgcgggacaggaacctgcggcccaagttcagccagatcgtgaacaccctggacaagctgatcagaaatgctgccagcctgaaggtgattgccagcgcccagagcggcatgagccagcccctgctggacagaacagtgcctgactacaccaccttcaccaccgtgggggactggctggatgccatcaagatgggccgctacaaggagagctttgtgtctgctggctttgccagctttgacctggtggcccagatgacagctgaggacctgctgcgcatcggcgtgaccctggccggccaccagaagaagatcctgagcagcatccaggacatgaggctgcagatgaaccagaccctgcctgtgcaggtgtag

SEQ ID NO: 146300 - DNA, 2997 bp, Artificial Sequence
  derived and/or modified sequence
atggcccgggcccggcccccccccccccccagccccccccccggcctgcttcctctgcttccaccactgttactcctgcccctcctgctactgcctgctggctgtagggctctcgaagagaccctcatggacacaaagtgggttaccagcgagcttgcttggacatctcatcctgagagcggttgggaggaggtttcgggatacgacgaggccatgaacccgatcagaacctaccaggtctgcaacgtgcgcgagtcaagtcagaacaactggttgcgcactgggtttatctggagaagggatgtccagagggtgtacgtggaattgaagtttaccgtccgggattgtaactctataccaaatatccccggtagctgcaaggaaacttttaacttgttttattacgaggcggacagtgacgttgcctcggcgagcagtcccttctggatggagaatccttatgtgaaagtggacaccatagctccggatgagtccttctcccgattggacgcaggccgggtcaacacaaaagttagaagtttcggcccactctctaaggccggattctatttggcatttcaagatcaaggggcttgcatgtcattgatttcagtgcgcgctttctataaaaagtgcgccagcaccactgcaggcttcgcactattcccagagacacttactggcgccgaacctacatcactcgttattgcacctggaacatgtattccaaatgccgtggaggtgagcgttccactcaagctctattgtaacggcgatggggagtggatggtcccagttggagcgtgtacctgcgctaccggccacgaacctgccgctaaggaaagccagtgtaggccttgccctcccgggtcgtataaagcaaagcagggggaggggccctgtcttccatgccctccaaatagtaggactacctcgcctgctgcctcaatttgcacttgtcataataatttctatcgggccgacagtgactccgccgactctgcctgtaccaccgtgccctctccgccccgcggcgtgatttcaaacgtcaacgagacttcactgattctcgagtggagcgagcctagagacttgggaggaagggacgatctgctgtacaatgtgatatgcaagaaatgccacggagctggcggcgcctcggcatgttccaggtgcgacgacaacgtcgagtttgtgcccagacaactgggattaaccgaacgcagggtccatatttcacacctgttggcgcataccagatacacatttgaggtgcaagctgtgaatggcgtgtcaggcaaatcacctctgcccccacgctatgccgccgtgaatatcaccacaaaccaggcagccccctccgaagtccccactcttaggctgcattcttccagtggctccagtctgactctgagctgggcacctcccgagaggcccaacggcgtgattttagactatgagatgaaatatttcgagaagagtgagggaatcgcttcaaccgttacttcacagatgaacagcgtgcaattggatggcttacggcctgacgcccggtatgtggtacaagtacgggctcggactgtggctggttacggccagtattcaaggcccgccgagttcgaaacaacgtcagagaggggctcgggtgctcagcagctccaagaacagctgcctctgatcgtcggtagtgccacggcgggacttgtgttcgttgtggccgtggtggttatcgccatcgtgtgcttgagaaagcaacggcacggttccgacagcgagtacactgagaagttgcagcaatatatagccccggggatgaaagtttacatcgatccattcacttatgaggatcccaacgaggcagtcagggagtttgcgaaggagattgacgttagctgcgtgaaaatagaagaggtgatcggggcaggagagtttggagaggtgtgtcgtggcagacttaaacagccgggcagacgggaagtgttcgtggccataaaaaccctcaaggttggttacactgagcgccaacgccgtgatttcctgtccgaggcaagtattatgggccagttcgaccaccccaatatcataaggctggaaggagtggtgactaaaagccggccggtgatgatccttacagagttcatggaaaattgtgctttggactcattcctccggttaaacgatggtcaattcacggtcatccagttggtgggcatgctgcgcggcattgccgccggcatgaagtatctgagcgagatgaattatgtccatcgtgatcttgctgcccgtaacattcttgtgaatagcaatctagtgtgtaaggtgagcgatttcggactttccagattcttagaggacgatccttccgaccctacctatacttcatcactgggcggcaagatcccaatcagatggactgctccagaggccattgcttaccgcaagttcacttcagcgagcgacgtgtggtcttatgggatcgtgatgtgggaggtgatgtcttacggtgagcgaccttactgggatatgtccaaccaggacgtgatcaatgcagtcgagcaggattaccgattaccacccccaatggattgccccaccgctctgcaccaacttatgctcgactgctgggttagggatcggaatttgcgccccaaattctcccaaattgtaaataccttagataagctgattagaaatgccgcttcactgaaggtcatagcatccgcacagtccgggatgtctcagcccttattagataggaccgtcccagattacaccacctttacaaccgtaggagactggctggatgcaatcaagatgggccgttacaaagaaagctttgtgtccgctggcttcgcctcctttgacttagtcgcccaaatgaccgccgaggatcttctgcggatcggggttactctggccgggcatcagaaaaagatcctgtcctcaatccaggatatgagattgcagatgaatcagactcttccagtacaggtgtag

SEQ ID NO: 146301 - DNA, 2997 bp, Artificial Sequence
  derived and/or modified sequence
atggcgcgagcacgacctccaccacctccctctcctcctccagggttactgcccctattgccacccttgctgctgctccctcttttactcctgcctgccggttgtcgagctttggaagaaactctgatggacacaaagtgggttacatcagagcttgcctggacatcacacccagaaagcgggtgggaagaagtgtccggctatgacgaagccatgaaccctatcaggacctaccaggtgtgcaatgtgcgggaatcatctcagaacaactggctcagaacgggttttatctggagacgggacgtccaaagggtctacgtcgagctgaagttcactgtgagggattgcaacagcatacccaacattccaggatcctgtaaggagaccttcaatcttttttattacgaagctgattcagacgttgccagcgcatcctccccattctggatggaaaacccttacgtgaaagtggataccattgctccagatgagagcttctctcgattggatgcagggcgagtgaatacaaaagtgcgtagttttgggccactcagcaaagccggattttacctggctttccaagatcagggggcatgtatgagtctaatcagtgtaagggcattctacaaaaaatgtgctagtaccacagccggttttgccctgttccctgagactctgaccggtgcagagccaacaagcctggtcattgctcctgggacttgcattccaaacgcggttgaggtaagtgtgcctctaaaactgtattgtaacggagatggggagtggatggtccctgtgggcgcatgtacttgtgctacgggacacgagcctgccgctaaagaaagccagtgtagaccctgtccacctggatcctacaaggcaaagcagggggagggcccatgtctcccctgtccaccgaactccagaactacatcccctgctgcatccatctgcacatgtcataacaacttttaccgggcagactctgacagcgcagattcggcctgtacgacggtgccaagccccccacgcggagttatatccaacgtcaatgagactagccttatcctcgagtggagcgagccacgagatctgggaggcagagatgatctcttatacaacgtgatttgtaagaagtgccacggcgctggcggtgctagtgcttgtagcagatgtgacgacaacgtggaattcgtgcctaggcagttaggtctcaccgaaaggcgcgtgcatatctcacatctcctggcacacactaggtatacatttgaggtgcaggcagtcaatggtgtgtccggtaagtcacctctgcctcccaggtatgctgccgtgaacattactacgaaccaggccgctccgtcggaggtccccacccttcggctgcactcttcatccggcagcagcttgaccctcagctgggcccctcccgagcgcccaaatggcgttatcctggactatgagatgaaatacttcgaaaaatcagaagggattgcaagtactgtgacgtctcaaatgaactctgtgcagctcgacgggctccggcctgacgccaggtatgtagtccaggtgcgtgcccgtactgtcgcagggtacggacagtactctagacccgcagagtttgaaacgacctctgaacggggatccggcgcacagcagctgcaagagcagctccctctgatcgtgggttccgccacggcgggactggtatttgtggtggctgttgtggtgattgccattgtatgcctgcggaaacagcggcacggaagcgactcagaatacaccgagaagttgcagcaatacattgcgccagggatgaaggtctacatagatcctttcacttatgaagacccgaacgaagccgtcagggaattcgctaaggagattgatgtgtcctgcgtgaagattgaggaagtgatcggcgctggtgagttcggtgaggtttgcagggggcgtctgaagcagccaggcaggcgcgaagtgtttgttgctatcaaaacattgaaggtcgggtatactgagagacaacggagggactttctctctgaggcctctatcatgggtcagttcgaccaccccaatatcatccggctcgaaggcgtcgttacaaagtctcggccagttatgatcctgacagagttcatggaaaactgcgcactcgattctttcctgcgccttaacgacgggcagtttactgtcattcagctagtggggatgctgaggggcatcgctgccggaatgaaatacctcagcgagatgaattatgttcatcgtgatttggccgctcgcaacatcttggtcaacagtaacctggtttgcaaggtgtcagactttggcctgagtcgcttccttgaggatgacccctctgaccccacttacacttcgtctctggggggaaagattcctattcgttggacagcccctgaagcaattgcctacaggaaattcaccagcgcaagcgatgtatggagctacggcatcgtgatgtgggaggtgatgtcctacggagagaggccctattgggatatgtccaaccaggacgttatcaacgctgtagagcaggattatcgactgccccctcccatggactgcccaaccgccctgcaccaactcatgctggattgttgggtgagggataggaacctccggcctaaattttcacagatcgtcaatacactagacaagcttatccgaaacgccgcttctctcaaagttatcgcctccgcccagtcggggatgtcccagccgcttttagacaggacggtgcccgattacaccacattcacaactgtcggcgattggcttgacgccatcaaaatgggcagatacaaagaaagcttcgtgagcgctgggtttgcaagcttcgatttagtagcccaaatgaccgcagaggatttgctgcggattggggtaaccctcgctggacatcagaaaaagatcctgagctctatccaagacatgagactacagatgaaccagactctgcctgtacaggtgtag

SEQ ID NO: 146302 - DNA, 2997 bp, Artificial Sequence
  derived and/or modified sequence
atggccagagccagacccccccccccccccagccccccccccggcctgctgcccctgctgccccccctgctgctgctgcccctgctgctgctgcccgccggctgcagagccctggaggagaccctgatggacaccaagtgggtgaccagcgagctggcctggaccagccaccccgagagcggctgggaggaggtgagcggctacgacgaggccatgaaccccatcagaacctaccaggtgtgcaacgtgagagagagcagccagaacaactggctgagaaccggcttcatctggagaagagacgtgcagagagtgtacgtggagctgaagttcaccgtgagagactgcaacagcatccccaacatccccggcagctgcaaggagaccttcaacctgttctactacgaggccgacagcgacgtggccagcgccagcagccccttctggatggagaacccctacgtgaaggtggacaccatcgcccccgacgagagcttcagcagactggacgccggcagagtgaacaccaaggtgagaagcttcggccccctgagcaaggccggcttctacctggccttccaggaccagggcgcctgcatgagcctgatcagcgtgagagccttctacaagaagtgcgccagcaccaccgccggcttcgccctgttccccgagaccctgaccggcgccgagcccaccagcctggtgatcgcccccggcacctgcatccccaacgccgtggaggtgagcgtgcccctgaagctgtactgcaacggcgacggcgagtggatggtgcccgtgggcgcctgcacctgcgccaccggccacgagcccgccgccaaggagagccagtgcagaccctgcccccccggcagctacaaggccaagcagggcgagggcccctgcctgccctgcccccccaacagcagaaccaccagccccgccgccagcatctgcacctgccacaacaacttctacagagccgacagcgacagcgccgacagcgcctgcaccaccgtgcccagcccccccagaggcgtgatcagcaacgtgaacgagaccagcctgatcctggagtggagcgagcccagagacctgggcggcagagacgacctgctgtacaacgtgatctgcaagaagtgccacggcgccggcggcgccagcgcctgcagcagatgcgacgacaacgtggagttcgtgcccagacagctgggcctgaccgagagaagagtgcacatcagccacctgctggcccacaccagatacaccttcgaggtgcaggccgtgaacggcgtgagcggcaagagccccctgccccccagatacgccgccgtgaacatcaccaccaaccaggccgcccccagcgaggtgcccaccctgagactgcacagcagcagcggcagcagcctgaccctgagctgggccccccccgagagacccaacggcgtgatcctggactacgagatgaagtacttcgagaagagcgagggcatcgccagcaccgtgaccagccagatgaacagcgtgcagctggacggcctgagacccgacgccagatacgtggtgcaggtgagagccagaaccgtggccggctacggccagtacagcagacccgccgagttcgagaccaccagcgagagaggcagcggcgcccagcagctgcaggagcagctgcccctgatcgtgggcagcgccaccgccggcctggtgttcgtggtggccgtggtggtgatcgccatcgtgtgcctgagaaagcagagacacggcagcgacagcgagtacaccgagaagctgcagcagtacatcgcccccggcatgaaggtgtacatcgaccccttcacctacgaggaccccaacgaggccgtgagagagttcgccaaggagatcgacgtgagctgcgtgaagatcgaggaggtgatcggcgccggcgagttcggcgaggtgtgcagaggcagactgaagcagcccggcagaagagaggtgttcgtggccatcaagaccctgaaggtgggctacaccgagagacagagaagagacttcctgagcgaggccagcatcatgggccagttcgaccaccccaacatcatcagactggagggcgtggtgaccaagagcagacccgtgatgatcctgaccgagttcatggagaactgcgccctggacagcttcctgagactgaacgacggccagttcaccgtgatccagctggtgggcatgctgagaggcatcgccgccggcatgaagtacctgagcgagatgaactacgtgcacagagacctggccgccagaaacatcctggtgaacagcaacctggtgtgcaaggtgagcgacttcggcctgagcagattcctggaggacgaccccagcgaccccacctacaccagcagcctgggcggcaagatccccatcagatggaccgcccccgaggccatcgcctacagaaagttcaccagcgccagcgacgtgtggagctacggcatcgtgatgtgggaggtgatgagctacggcgagagaccctactgggacatgagcaaccaggacgtgatcaacgccgtggagcaggactacagactgcccccccccatggactgccccaccgccctgcaccagctgatgctggactgctgggtgagagacagaaacctgagacccaagttcagccagatcgtgaacaccctggacaagctgatcagaaacgccgccagcctgaaggtgatcgccagcgcccagagcggcatgagccagcccctgctggacagaaccgtgcccgactacaccaccttcaccaccgtgggcgactggctggacgccatcaagatgggcagatacaaggagagcttcgtgagcgccggcttcgccagcttcgacctggtggcccagatgaccgccgaggacctgctgagaatcggcgtgaccctggccggccaccagaagaagatcctgagcagcatccaggacatgagactgcagatgaaccagaccctgcccgtgcaggtgtag

SEQ ID NO: 146303 - DNA, 4236 bp, Artificial Sequence
  derived and/or modified sequence
cagcagaagtgagtacgtgagcggcgcagcaagatcccagctcggaccccggacggcgcgcgcccccgaagccccggatcccagtcgggcccgcagctgaccgccagattactgtgcatcccgaatcacgaccacctgcaccctcctgccccggcccgccccccaagtcctcaggcacccagctccccggcgccccggatcctcctggaccggtccgtccagattcccgcgggaccgacctgtccgcatccccaggaccgccgggctcggtgcaccgcctcggtcccggagccgcccgcctggattgcattccctcctctcctggatctcctgggacccgacgcgagcctgccccggagcccgccgagcgcaccctctctcgggtgcctgcagccccgccggcgcggcccggcccggcgcggcccggctcggctcctagagctgccacggccatggccagagcccgcccgccgccgccgccgtcgccgccgccggggcttctgccgctgctccctccgctgctgctgctgccgctgctgctgctgcccgccggctgccgggcgctggaagagaccctcatggacacaaaatgggtaacatctgagttggcgtggacatctcatccagaaagtgggtgggaagaggtgagtggctacgatgaggccatgaatcccatccgcacataccaggtgtgtaatgtgcgcgagtcaagccagaacaactggcttcgcacggggttcatctggcggcgggatgtgcagcgggtctacgtggagctcaagttcactgtgcgtgactgcaacagcatccccaacatccccggctcctgcaaggagaccttcaacctcttctactacgaggctgacagcgatgtggcctcagcctcctcccccttctggatggagaacccctacgtgaaagtggacaccattgcacccgatgagagcttctcgcggctggatgccggccgtgtcaacaccaaggtgcgcagctttgggccactttccaaggctggcttctacctggccttccaggaccagggcgcctgcatgtcgctcatctccgtgcgcgccttctacaagaagtgtgcatccaccaccgcaggcttcgcactcttccccgagaccctcactggggcggagcccacctcgctggtcattgctcctggcacctgcatccctaacgccgtggaggtgtcggtgccactcaagctctactgcaacggcgatggggagtggatggtgcctgtgggtgcctgcacctgtgccaccggccatgagccagctgccaaggagtcccagtgccgcccctgtccccctgggagctacaaggcgaagcagggagaggggccctgcctcccatgtccccccaacagccgtaccacctccccagccgccagcatctgcacctgccacaataacttctaccgtgcagactcggactctgcggacagtgcctgtaccaccgtgccatctccaccccgaggtgtgatctccaatgtgaatgaaacctcactgatcctcgagtggagtgagccccgggacctgggtggccgggatgacctcctgtacaatgtcatctgcaagaagtgccatggggctggaggggcctcagcctgctcacgctgtgatgacaacgtggagtttgtgcctcggcagctgggcctgacggagcgccgggtccacatcagccatctgctggcccacacgcgctacacctttgaggtgcaggcggtcaacggtgtctcgggcaagagccctctgccgcctcgttatgcggccgtgaatatcaccacaaaccaggctgccccgtctgaagtgcccacactacgcctgcacagcagctcaggcagcagcctcaccctatcctgggcacccccagagcggcccaacggagtcatcctggactacgagatgaagtactttgagaagagcgagggcatcgcctccacagtgaccagccagatgaactccgtgcagctggacgggcttcggcctgacgcccgctatgtggtccaggtccgtgcccgcacagtagctggctatgggcagtacagccgccctgccgagtttgagaccacaagtgagagaggctctggggcccagcagctccaggagcagcttcccctcatcgtgggctccgctacagctgggcttgtcttcgtggtggctgtcgtggtcatcgctatcgtctgcctcaggaagcagcgacacggctctgattcggagtacacggagaagctgcagcagtacattgctcctggaatgaaggtttatattgacccttttacctacgaggaccctaatgaggctgttcgggagtttgccaaggagatcgacgtgtcctgcgtcaagatcgaggaggtgatcggagctggggaatttggggaagtgtgccgtggtcgactgaaacagcctggccgccgagaggtgtttgtggccatcaagacgctgaaggtgggctacaccgagaggcagcggcgggacttcctaagcgaggcctccatcatgggtcagtttgatcaccccaatataatccggctcgagggcgtggtcaccaaaagtcggccagttatgatcctcactgagttcatggaaaactgcgccctggactccttcctccggctcaacgatgggcagttcacggtcatccagctggtgggcatgttgcggggcattgctgccggcatgaagtacctgtccgagatgaactatgtgcaccgcgacctggctgctcgcaacatccttgtcaacagcaacctggtctgcaaagtctcagactttggcctctcccgcttcctggaggatgacccctccgatcctacctacaccagttccctgggcgggaagatccccatccgctggactgccccagaggccatagcctatcggaagttcacttctgctagtgatgtctggagctacggaattgtcatgtgggaggtcatgagctatggagagcgaccctactgggacatgagcaaccaggatgtcatcaatgccgtggagcaggattaccggctgccaccacccatggactgtcccacagcactgcaccagctcatgctggactgctgggtgcgggaccggaacctcaggcccaaattctcccagattgtcaataccctggacaagctcatccgcaatgctgccagcctcaaggtcattgccagcgctcagtctggcatgtcacagcccctcctggaccgcacggtcccagattacacaaccttcacgacagttggtgattggctggatgccatcaagatggggcggtacaaggagagcttcgtcagtgcggggtttgcatcttttgacctggtggcccagatgacggcagaagacctgctccgtattggggtcaccctggccggccaccagaagaagatcctgagcagtatccaggacatgcggctgcagatgaaccagacgctgcctgtgcaggtctgacaccggctcccacggggaccctgaggaccgtgcagggatgccaagcagccggctggactttcggactcttggacttttggatgcctggccttaggctgtggcccagaagctggaagtttgggaaaggcccaagctgggacttctccaggcctgtgttccctccccaggaagtgcgccccaaacctcttcatattgaagatggattaggagagggggtgatgacccctccccaagcccctcagggcccagaccttcctgctctccagcaggggatccccacaacctcacacttgtctgttcttcagtgctggaggtcctggcagggtcaggctggggtaagccggggttccacagggcccagccctggcaggggtctggccccccaggtaggcggagagcagtccctccctcaggaactggaggaggggactccaggaatggggaaatgtgacaccaccatcctgaagccagcttgcacctccagtttgcacagggatttgttctgggggctgagggccctgtccccacccccgcccttggtgctgtcataaaagggcaggcaggggcaggctgaggagttgccctttgccccccagagactgactctcagagccagagatgggatgtgtgagtgtgtgtgtgtgtgtgtgtgtgtgcgcgcgcgcgcgcgtgtgtgtgtgcacgcactggcctgcacagagagcatgggtgagcgtgtaaaagcttggccctgtgccctacaatggggccagctgggccgacagcagaataaaggcaataagatgat

SEQ ID NO: 146304 - protein, 987 aa, Artificial Sequence
  derived and/or modified sequence
MELRVLLCWASLAAALEETLLNTKLETADLKWVTFPQVDGQWEELSGLDEEQHSVRTYEVCDVQRAPGQAHWLRTGWVPRRGAVHVYATLRFTMLECLSLPRAGRSCKETFTVFYYESDADTATALTPAWMENPYIKVDTVAAEHLTRKRPGAEATGKVNVKTLRLGPLSKAGFYLAFQDQGACMALLSLHLFYKKCAQLTVNLTRFPETVPRELVVPVAGSCVVDAVPAPGPSPSLYCREDGQWAEQPVTGCSCAPGFEAAEGNTKCRACAQGTFKPLSGEGSCQPCPANSHSNTIGSAVCQCRVGYFRARTDPRGAPCTTPPSAPRSVVSRLNGSSLHLEWSAPLESGGREDLTYALRCRECRPGGSCAPCGGDLTFDPGPRDLVEPWVVVRGLRPDFTYTFEVTALNGVSSLATGPVPFEPVNVTTDREVPPAVSDIRVTRSSPSSLSLAWAVPRAPSGAVLDYEVKYHEKGAEGPSSVRFLKTSENRAELRGLKRGASYLVQVRARSEAGYGPFGQEHHSQTQLDESEGWREQLALIAGTAVVGVVLVLVVIVVAVLCLRKQSNGREAEYSDKHGQYLIGHGTKVYIDPFTYEDPNEAVREFAKEIDVSYVKIEEVIGAGEFGEVCRGRLKAPGKKESCVAIKTLKGGYTERQRREFLSEASIMGQFEHPNIIRLEGVVTNSMPVMILTEFMENGALDSFLRLNDGQFTVIQLVGMLRGIASGMRYLAEMSYVHRDLAARNILVNSNLVCKVSDFGLSRFLEENSSDPTYTSSLGGKIPIRWTAPEAIAFRKFTSASDAWSYGIVMWEVMSFGERPYWDMSNQDVINAIEQDYRLPPPPDCPTSLHQLMLDCWQKDRNARPRFPQVVSALDKMIRNPASLKIVARENGGASHPLLDQRQPHYSAFGSVGEWLRAIKMGRYEESFAAAGFGSFELVSQISAEDLLRIGVTLAGHQKKILASVQHMKSQAKPGTPGGTGGPAPQY

SEQ ID NO: 146305 - protein, 935 aa, Artificial Sequence
  derived and/or modified sequence
MELRVLLCWASLAAALEETLLNTKLETADLKWVTFPQVDGQWEELSGLDEEQHSVRTYEVCDVQRAPGQAHWLRTGWVPRRGAVHVYATLRFTMLECLSLPRAGRSCKETFTVFYYESDADTATALTPAWMENPYIKVDTVAAEHLTRKRPGAEATGKVNVKTLRLGPLSKAGFYLAFQDQGACMALLSLHLFYKKCAQLTVNLTRFPETVPRELVVPVAGSCVVDAVPAPGPSPSLYCREDGQWAEQPVTGCSCAPGFEAAEGNTKCRACAQGTFKPLSGEGSCQPCPANSHSNTIGSAVCQCRVGYFRARTDPRGAPCTTPPSAPRSVVSRLNGSSLHLEWSAPLESGGREDLTYALRCRECRPGGSCAPCGGDLTFDPGPRDLVEPWVVVRGLRPDFTYTFEVTALNGVSSLATGPVPFEPVNVTTDREVPPAVSDIRVTRSSPSSLSLAWAVPRAPSGAVLDYEVKYHEKGAEGPSSVRFLKTSENRAELRGLKRGASYLVQVRARSEAGYGPFGQEHHSQTQLDESEGWREQLALIAGTAVVGVVLVLVVIVVAVLCLRKQSNGREAEYSDKHGQYLIGHGTKVYIDPFTYEDPNEAVREFAKEIDVSYVKIEEVIGAGEFGEVCRGRLKAPGKKESCVAIKTLKGGYTERQRREFLSEASIMGQFEHPNIIRLEGVVTNSMPVMILTEFMENGALDSFLRLNDGQFTVIQLVGMLRGIASGMRYLAEMSYVHRDLAARNILVNSNLVCKVSDFGLSRFLEENSSDPTYTSSLGGKIPIRWTAPEAIAFRKFTSASDAWSYGIVMWEVMSFGERPYWDMSNQDVINAIEQDYRLPPPPDCPTSLHQLMLDCWQKDRNARPRFPQVVSALDKMIRNPASLKIVARENGGDLLRIGVTLAGHQKKILASVQHMKSQAKPGTPGGTGGPAPQY

SEQ ID NO: 146306 - DNA, 2964 bp, Artificial Sequence
  derived and/or modified sequence
atggagctgagagtgctgctgtgctgggccagcctggccgccgccctggaggagaccctgctgaacaccaagctggagaccgccgacctgaagtgggtgaccttcccccaggtggacggccagtgggaggagctgagcggcctggacgaggagcagcacagcgtgagaacctacgaggtgtgcgacgtgcagagagcccccggccaggcccactggctgagaaccggctgggtgcccagaagaggcgccgtgcacgtgtacgccaccctgagattcaccatgctggagtgcctgagcctgcccagagccggcagaagctgcaaggagaccttcaccgtgttctactacgagagcgacgccgacaccgccaccgccctgacccccgcctggatggagaacccctacatcaaggtggacaccgtggccgccgagcacctgaccagaaagagacccggcgccgaggccaccggcaaggtgaacgtgaagaccctgagactgggccccctgagcaaggccggcttctacctggccttccaggaccagggcgcctgcatggccctgctgagcctgcacctgttctacaagaagtgcgcccagctgaccgtgaacctgaccagattccccgagaccgtgcccagagagctggtggtgcccgtggccggcagctgcgtggtggacgccgtgcccgcccccggccccagccccagcctgtactgcagagaggacggccagtgggccgagcagcccgtgaccggctgcagctgcgcccccggcttcgaggccgccgagggcaacaccaagtgcagagcctgcgcccagggcaccttcaagcccctgagcggcgagggcagctgccagccctgccccgccaacagccacagcaacaccatcggcagcgccgtgtgccagtgcagagtgggctacttcagagccagaaccgaccccagaggcgccccctgcaccaccccccccagcgcccccagaagcgtggtgagcagactgaacggcagcagcctgcacctggagtggagcgcccccctggagagcggcggcagagaggacctgacctacgccctgagatgcagagagtgcagacccggcggcagctgcgccccctgcggcggcgacctgaccttcgaccccggccccagagacctggtggagccctgggtggtggtgagaggcctgagacccgacttcacctacaccttcgaggtgaccgccctgaacggcgtgagcagcctggccaccggccccgtgcccttcgagcccgtgaacgtgaccaccgacagagaggtgccccccgccgtgagcgacatcagagtgaccagaagcagccccagcagcctgagcctggcctgggccgtgcccagagcccccagcggcgccgtgctggactacgaggtgaagtaccacgagaagggcgccgagggccccagcagcgtgagattcctgaagaccagcgagaacagagccgagctgagaggcctgaagagaggcgccagctacctggtgcaggtgagagccagaagcgaggccggctacggccccttcggccaggagcaccacagccagacccagctggacgagagcgagggctggagagagcagctggccctgatcgccggcaccgccgtggtgggcgtggtgctggtgctggtggtgatcgtggtggccgtgctgtgcctgagaaagcagagcaacggcagagaggccgagtacagcgacaagcacggccagtacctgatcggccacggcaccaaggtgtacatcgaccccttcacctacgaggaccccaacgaggccgtgagagagttcgccaaggagatcgacgtgagctacgtgaagatcgaggaggtgatcggcgccggcgagttcggcgaggtgtgcagaggcagactgaaggcccccggcaagaaggagagctgcgtggccatcaagaccctgaagggcggctacaccgagagacagagaagagagttcctgagcgaggccagcatcatgggccagttcgagcaccccaacatcatcagactggagggcgtggtgaccaacagcatgcccgtgatgatcctgaccgagttcatggagaacggcgccctggacagcttcctgagactgaacgacggccagttcaccgtgatccagctggtgggcatgctgagaggcatcgccagcggcatgagatacctggccgagatgagctacgtgcacagagacctggccgccagaaacatcctggtgaacagcaacctggtgtgcaaggtgagcgacttcggcctgagcagattcctggaggagaacagcagcgaccccacctacaccagcagcctgggcggcaagatccccatcagatggaccgcccccgaggccatcgccttcagaaagttcaccagcgccagcgacgcctggagctacggcatcgtgatgtgggaggtgatgagcttcggcgagagaccctactgggacatgagcaaccaggacgtgatcaacgccatcgagcaggactacagactgccccccccccccgactgccccaccagcctgcaccagctgatgctggactgctggcagaaggacagaaacgccagacccagattcccccaggtggtgagcgccctggacaagatgatcagaaaccccgccagcctgaagatcgtggccagagagaacggcggcgccagccaccccctgctggaccagagacagccccactacagcgccttcggcagcgtgggcgagtggctgagagccatcaagatgggcagatacgaggagagcttcgccgccgccggcttcggcagcttcgagctggtgagccagatcagcgccgaggacctgctgagaatcggcgtgaccctggccggccaccagaagaagatcctggccagcgtgcagcacatgaagagccaggccaagcccggcacccccggcggcaccggcggccccgccccccagtactag

SEQ ID NO: 146307 - DNA, 2808 bp, Artificial Sequence
  derived and/or modified sequence
atggagctgagagtgctgctgtgctgggccagcctggccgccgccctggaggagaccctgctgaacaccaagctggagaccgccgacctgaagtgggtgaccttcccccaggtggacggccagtgggaggagctgagcggcctggacgaggagcagcacagcgtgagaacctacgaggtgtgcgacgtgcagagagcccccggccaggcccactggctgagaaccggctgggtgcccagaagaggcgccgtgcacgtgtacgccaccctgagattcaccatgctggagtgcctgagcctgcccagagccggcagaagctgcaaggagaccttcaccgtgttctactacgagagcgacgccgacaccgccaccgccctgacccccgcctggatggagaacccctacatcaaggtggacaccgtggccgccgagcacctgaccagaaagagacccggcgccgaggccaccggcaaggtgaacgtgaagaccctgagactgggccccctgagcaaggccggcttctacctggccttccaggaccagggcgcctgcatggccctgctgagcctgcacctgttctacaagaagtgcgcccagctgaccgtgaacctgaccagattccccgagaccgtgcccagagagctggtggtgcccgtggccggcagctgcgtggtggacgccgtgcccgcccccggccccagccccagcctgtactgcagagaggacggccagtgggccgagcagcccgtgaccggctgcagctgcgcccccggcttcgaggccgccgagggcaacaccaagtgcagagcctgcgcccagggcaccttcaagcccctgagcggcgagggcagctgccagccctgccccgccaacagccacagcaacaccatcggcagcgccgtgtgccagtgcagagtgggctacttcagagccagaaccgaccccagaggcgccccctgcaccaccccccccagcgcccccagaagcgtggtgagcagactgaacggcagcagcctgcacctggagtggagcgcccccctggagagcggcggcagagaggacctgacctacgccctgagatgcagagagtgcagacccggcggcagctgcgccccctgcggcggcgacctgaccttcgaccccggccccagagacctggtggagccctgggtggtggtgagaggcctgagacccgacttcacctacaccttcgaggtgaccgccctgaacggcgtgagcagcctggccaccggccccgtgcccttcgagcccgtgaacgtgaccaccgacagagaggtgccccccgccgtgagcgacatcagagtgaccagaagcagccccagcagcctgagcctggcctgggccgtgcccagagcccccagcggcgccgtgctggactacgaggtgaagtaccacgagaagggcgccgagggccccagcagcgtgagattcctgaagaccagcgagaacagagccgagctgagaggcctgaagagaggcgccagctacctggtgcaggtgagagccagaagcgaggccggctacggccccttcggccaggagcaccacagccagacccagctggacgagagcgagggctggagagagcagctggccctgatcgccggcaccgccgtggtgggcgtggtgctggtgctggtggtgatcgtggtggccgtgctgtgcctgagaaagcagagcaacggcagagaggccgagtacagcgacaagcacggccagtacctgatcggccacggcaccaaggtgtacatcgaccccttcacctacgaggaccccaacgaggccgtgagagagttcgccaaggagatcgacgtgagctacgtgaagatcgaggaggtgatcggcgccggcgagttcggcgaggtgtgcagaggcagactgaaggcccccggcaagaaggagagctgcgtggccatcaagaccctgaagggcggctacaccgagagacagagaagagagttcctgagcgaggccagcatcatgggccagttcgagcaccccaacatcatcagactggagggcgtggtgaccaacagcatgcccgtgatgatcctgaccgagttcatggagaacggcgccctggacagcttcctgagactgaacgacggccagttcaccgtgatccagctggtgggcatgctgagaggcatcgccagcggcatgagatacctggccgagatgagctacgtgcacagagacctggccgccagaaacatcctggtgaacagcaacctggtgtgcaaggtgagcgacttcggcctgagcagattcctggaggagaacagcagcgaccccacctacaccagcagcctgggcggcaagatccccatcagatggaccgcccccgaggccatcgccttcagaaagttcaccagcgccagcgacgcctggagctacggcatcgtgatgtgggaggtgatgagcttcggcgagagaccctactgggacatgagcaaccaggacgtgatcaacgccatcgagcaggactacagactgccccccccccccgactgccccaccagcctgcaccagctgatgctggactgctggcagaaggacagaaacgccagacccagattcccccaggtggtgagcgccctggacaagatgatcagaaaccccgccagcctgaagatcgtggccagagagaacggcggcgacctgctgagaatcggcgtgaccctggccggccaccagaagaagatcctggccagcgtgcagcacatgaagagccaggccaagcccggcacccccggcggcaccggcggccccgccccccagtactag

SEQ ID NO: 146308 - DNA, 4329 bp, Artificial Sequence
  derived and/or modified sequence
cccggcccggcccgcccggctccgcgccgcagtctccctccctcccgctccgtccccgctcgggctcccaccatccccgcccgcgaggagagcactcggcccggcggcgcgagcagagccactccagggagggggggagaccgcgagcggccggctcagcccccgccacccggggcgggaccccgaggccccggagggaccccaactccagccacgtcttgctgcgcgcccgcccggcgcggccactgccagcacgctccgggcccgccgcccgcgcgcgcggcacagacgcggggccacacttggcgccgccgcccggtgccccgcacgctcgcatgggcccgcgctgagggccccgacgaggagtcccgcgcggagtatcggcgtccacccgcccagggagagtcagacctgggggggcgagggccccccaaactcagttcggatcctacccgagtgaggcggcgccatggagctccgggtgctgctctgctgggcttcgttggccgcagctttggaagagaccctgctgaacacaaaattggaaactgctgatctgaagtgggtgacattccctcaggtggacgggcagtgggaggaactgagcggcctggatgaggaacagcacagcgtgcgcacctacgaagtgtgtgacgtgcagcgtgccccgggccaggcccactggcttcgcacaggttgggtcccacggcggggcgccgtccacgtgtacgccacgctgcgcttcaccatgctcgagtgcctgtccctgcctcgggctgggcgctcctgcaaggagaccttcaccgtcttctactatgagagcgatgcggacacggccacggccctcacgccagcctggatggagaacccctacatcaaggtggacacggtggccgcggagcatctcacccggaagcgccctggggccgaggccaccgggaaggtgaatgtcaagacgctgcgtctgggaccgctcagcaaggctggcttctacctggccttccaggaccagggtgcctgcatggccctgctatccctgcacctcttctacaaaaagtgcgcccagctgactgtgaacctgactcgattcccggagactgtgcctcgggagctggttgtgcccgtggccggtagctgcgtggtggatgccgtccccgcccctggccccagccccagcctctactgccgtgaggatggccagtgggccgaacagccggtcacgggctgcagctgtgctccggggttcgaggcagctgaggggaacaccaagtgccgagcctgtgcccagggcaccttcaagcccctgtcaggagaagggtcctgccagccatgcccagccaatagccactctaacaccattggatcagccgtctgccagtgccgcgtcgggtacttccgggcacgcacagacccccggggtgcaccctgcaccacccctccttcggctccgcggagcgtggtttcccgcctgaacggctcctccctgcacctggaatggagtgcccccctggagtctggtggccgagaggacctcacctacgccctccgctgccgggagtgccgacccggaggctcctgtgcgccctgcgggggagacctgacttttgaccccggcccccgggacctggtggagccctgggtggtggttcgagggctacgtcctgacttcacctatacctttgaggtcactgcattgaacggggtatcctccttagccacggggcccgtcccatttgagcctgtcaatgtcaccactgaccgagaggtacctcctgcagtgtctgacatccgggtgacgcggtcctcacccagcagcttgagcctggcctgggctgttccccgggcacccagtggggctgtgctggactacgaggtcaaataccatgagaagggcgccgagggtcccagcagcgtgcggttcctgaagacgtcagaaaaccgggcagagctgcgggggctgaagcggggagccagctacctggtgcaggtacgggcgcgctctgaggccggctacgggcccttcggccaggaacatcacagccagacccaactggatgagagcgagggctggcgggagcagctggccctgattgcgggcacggcagtcgtgggtgtggtcctggtcctggtggtcattgtggtcgcagttctctgcctcaggaagcagagcaatgggagagaagcagaatattcggacaaacacggacagtatctcatcggacatggtactaaggtctacatcgaccccttcacttatgaagaccctaatgaggctgtgagggaatttgcaaaagagatcgatgtctcctacgtcaagattgaagaggtgattggtgcaggtgagtttggcgaggtgtgccgggggcggctcaaggccccagggaagaaggagagctgtgtggcaatcaagaccctgaagggtggctacacggagcggcagcggcgtgagtttctgagcgaggcctccatcatgggccagttcgagcaccccaatatcatccgcctggagggcgtggtcaccaacagcatgcccgtcatgattctcacagagttcatggagaacggcgccctggactccttcctgcggctaaacgacggacagttcacagtcatccagctcgtgggcatgctgcggggcatcgcctcgggcatgcggtaccttgccgagatgagctacgtccaccgagacctggctgctcgcaacatcctagtcaacagcaacctcgtctgcaaagtgtctgactttggcctttcccgattcctggaggagaactcttccgatcccacctacacgagctccctgggaggaaagattcccatccgatggactgccccggaggccattgccttccggaagttcacttccgccagtgatgcctggagttacgggattgtgatgtgggaggtgatgtcatttggggagaggccgtactgggacatgagcaatcaggacgtgatcaatgccattgaacaggactaccggctgcccccgcccccagactgtcccacctccctccaccagctcatgctggactgttggcagaaagaccggaatgcccggccccgcttcccccaggtggtcagcgccctggacaagatgatccggaaccccgccagcctcaaaatcgtggcccgggagaatggcggggcctcacaccctctcctggaccagcggcagcctcactactcagcttttggctctgtgggcgagtggcttcgggccatcaaaatgggaagatacgaagaaagtttcgcagccgctggctttggctccttcgagctggtcagccagatctctgctgaggacctgctccgaatcggagtcactctggcgggacaccagaagaaaatcttggccagtgtccagcacatgaagtcccaggccaagccgggaaccccgggtgggacaggaggaccggccccgcagtactgacctgcaggaactccccaccccagggacaccgcctccccattttccggggcagagtggggactcacagaggcccccagccctgtgccccgctggattgcactttgagcccgtggggtgaggagttggcaatttggagagacaggatttgggggttctgccataataggaggggaaaatcaccccccagccacctcggggaactccagaccaagggtgagggcgcctttccctcaggactgggtgtgaccagaggaaaaggaagtgcccaacatctcccagcctccccaggtgcccccctcaccttgatgggtgcgttcccgcagaccaaagagagtgtgactcccttgccagctccagagtgggggggctgtcccagggggcaagaaggggtgtcagggcccagtgacaaaatcattggggtttgtagtcccaacttgctgctgtcaccaccaaactcaatcatttttttcccttgtaaatgcccctcccccagctgctgccttcatattgaaggtttttgagttttgtttttggtcttaatttttctccccgttccctttttgtttcttcgttttgtttttctaccgtccttgtcataactttgtgttggagggaacctgtttcactatggcctcctttgcccaagttgaaacaggggcccatcatcatgtctgtttccagaacagtgccttggtcatcccacatccccggaccccgcctgggacccccaagctgtgtcctatgaaggggtgtggggtgaggtagtgaaaagggcggtagttggtggtggaacccagaaacggacgccggtgcttggaggggttcttaaattatatttaaaaaagtaactttttgtataaataaaagaaaatgggacgtgtcccagctccaggggt

SEQ ID NO: 146309 - DNA, 3789 bp, Artificial Sequence
  derived and/or modified sequence
cgtccacccgcccagggagagtcagacctgggggggcgagggccccccaaactcagttcggatcctacccgagtgaggcggcgccatggagctccgggtgctgctctgctgggcttcgttggccgcagctttggaagagaccctgctgaacacaaaattggaaactgctgatctgaagtgggtgacattccctcaggtggacgggcagtgggaggaactgagcggcctggatgaggaacagcacagcgtgcgcacctacgaagtgtgtgacgtgcagcgtgccccgggccaggcccactggcttcgcacaggttgggtcccacggcggggcgccgtccacgtgtacgccacgctgcgcttcaccatgctcgagtgcctgtccctgcctcgggctgggcgctcctgcaaggagaccttcaccgtcttctactatgagagcgatgcggacacggccacggccctcacgccagcctggatggagaacccctacatcaaggtggacacggtggccgcggagcatctcacccggaagcgccctggggccgaggccaccgggaaggtgaatgtcaagacgctgcgtctgggaccgctcagcaaggctggcttctacctggccttccaggaccagggtgcctgcatggccctgctatccctgcacctcttctacaaaaagtgcgcccagctgactgtgaacctgactcgattcccggagactgtgcctcgggagctggttgtgcccgtggccggtagctgcgtggtggatgccgtccccgcccctggccccagccccagcctctactgccgtgaggatggccagtgggccgaacagccggtcacgggctgcagctgtgctccggggttcgaggcagctgaggggaacaccaagtgccgagcctgtgcccagggcaccttcaagcccctgtcaggagaagggtcctgccagccatgcccagccaatagccactctaacaccattggatcagccgtctgccagtgccgcgtcgggtacttccgggcacgcacagacccccggggtgcaccctgcaccacccctccttcggctccgcggagcgtggtttcccgcctgaacggctcctccctgcacctggaatggagtgcccccctggagtctggtggccgagaggacctcacctacgccctccgctgccgggagtgccgacccggaggctcctgtgcgccctgcgggggagacctgacttttgaccccggcccccgggacctggtggagccctgggtggtggttcgagggctacgtcctgacttcacctatacctttgaggtcactgcattgaacggggtatcctccttagccacggggcccgtcccatttgagcctgtcaatgtcaccactgaccgagaggtacctcctgcagtgtctgacatccgggtgacgcggtcctcacccagcagcttgagcctggcctgggctgttccccgggcacccagtggggctgtgctggactacgaggtcaaataccatgagaagggcgccgagggtcccagcagcgtgcggttcctgaagacgtcagaaaaccgggcagagctgcgggggctgaagcggggagccagctacctggtgcaggtacgggcgcgctctgaggccggctacgggcccttcggccaggaacatcacagccagacccaactggatgagagcgagggctggcgggagcagctggccctgattgcgggcacggcagtcgtgggtgtggtcctggtcctggtggtcattgtggtcgcagttctctgcctcaggaagcagagcaatgggagagaagcagaatattcggacaaacacggacagtatctcatcggacatggtactaaggtctacatcgaccccttcacttatgaagaccctaatgaggctgtgagggaatttgcaaaagagatcgatgtctcctacgtcaagattgaagaggtgattggtgcaggtgagtttggcgaggtgtgccgggggcggctcaaggccccagggaagaaggagagctgtgtggcaatcaagaccctgaagggtggctacacggagcggcagcggcgtgagtttctgagcgaggcctccatcatgggccagttcgagcaccccaatatcatccgcctggagggcgtggtcaccaacagcatgcccgtcatgattctcacagagttcatggagaacggcgccctggactccttcctgcggctaaacgacggacagttcacagtcatccagctcgtgggcatgctgcggggcatcgcctcgggcatgcggtaccttgccgagatgagctacgtccaccgagacctggctgctcgcaacatcctagtcaacagcaacctcgtctgcaaagtgtctgactttggcctttcccgattcctggaggagaactcttccgatcccacctacacgagctccctgggaggaaagattcccatccgatggactgccccggaggccattgccttccggaagttcacttccgccagtgatgcctggagttacgggattgtgatgtgggaggtgatgtcatttggggagaggccgtactgggacatgagcaatcaggacgtgatcaatgccattgaacaggactaccggctgcccccgcccccagactgtcccacctccctccaccagctcatgctggactgttggcagaaagaccggaatgcccggccccgcttcccccaggtggtcagcgccctggacaagatgatccggaaccccgccagcctcaaaatcgtggcccgggagaatggcggggacctgctccgaatcggagtcactctggcgggacaccagaagaaaatcttggccagtgtccagcacatgaagtcccaggccaagccgggaaccccgggtgggacaggaggaccggccccgcagtactgacctgcaggaactccccaccccagggacaccgcctccccattttccggggcagagtggggactcacagaggcccccagccctgtgccccgctggattgcactttgagcccgtggggtgaggagttggcaatttggagagacaggatttgggggttctgccataataggaggggaaaatcaccccccagccacctcggggaactccagaccaagggtgagggcgcctttccctcaggactgggtgtgaccagaggaaaaggaagtgcccaacatctcccagcctccccaggtgcccccctcaccttgatgggtgcgttcccgcagaccaaagagagtgtgactcccttgccagctccagagtgggggggctgtcccagggggcaagaaggggtgtcagggcccagtgacaaaatcattggggtttgtagtcccaacttgctgctgtcaccaccaaactcaatcatttttttcccttgtaaatgcccctcccccagctgctgccttcatattgaaggtttttgagttttgtttttggtcttaatttttctccccgttccctttttgtttcttcgttttgtttttctaccgtccttgtcataactttgtgttggagggaacctgtttcactatggcctcctttgcccaagttgaaacaggggcccatcatcatgtctgtttccagaacagtgccttggtcatcccacatccccggaccccgcctgggacccccaagctgtgtcctatgaaggggtgtggggtgaggtagtgaaaagggcggtagttggtggtggaacccagaaacggacgccggtgcttggaggggttcttaaattatatttaaaaaagtaactttttgtataaataaaagaaaatgggacgtgtcccagctccaggggt

SEQ ID NO: 146310 - DNA, 2964 bp, Artificial Sequence
  derived and/or modified sequence
atggagctgcgggtccttttgtgctgggcgtccctcgcggctgcactggaggagaccttgttgaacacaaagttagagacggccgatctgaagtgggtgactttcccacaagtggatggtcagtgggaggaattgtcagggctggacgaggaacagcatagcgttagaacctatgaggtgtgcgacgttcaacgcgcccccggacaggcccactggctcaggaccggatgggtgccaagacggggcgccgtgcacgtatacgctacccttagatttacaatgctagaatgtctttccttaccaagggcgggcagaagctgtaaggagacctttacagtcttctattacgagtctgacgctgataccgctaccgctctaacccctgcttggatggaaaacccttatatcaaggttgacaccgtagctgccgaacatttgaccaggaaacgccccggggccgaagctaccggcaaggttaatgtgaagaccttaagactgggtcccttgtccaaggctggattttacttggccttccaggatcagggtgcatgcatggcgctgctcagcctgcacctgttctataaaaaatgtgcacagcttacagtgaatctcactcgttttcccgaaactgtaccccgggagcttgttgtgccagttgccgggagctgcgtcgtggatgccgtcccggcacccggcccaagtccgtccctctattgcagagaagacgggcagtgggccgagcagcctgtgaccggatgcagctgcgcccccggattcgaggcagctgagggcaatacaaagtgtagggcttgcgcacagggcacctttaagcccctgtccggcgaaggaagctgtcagccgtgcccagctaattcccactccaacacaatagggtctgccgtgtgtcagtgccgagtgggttatttccgcgcccgcacagacccccgaggtgccccatgtacaactccccccagtgcaccgcggtcggtcgtctcaagactcaacgggagctctcttcatctggaatggtccgcccctttggaatctggaggtagggaagacctgacttatgccctccggtgtcgggaatgtcgacccggagggtcatgtgctccttgtggcggcgatcttacatttgatccaggcccaagagacctagtggagccatgggtggtggtcagaggccttaggcctgactttacatatacattcgaggtcacggccctcaacggggttagctcccttgctactggccctgtgcccttcgagccggttaacgtgacaacagatagagaggtccctccagccgtgtcagacattcgggtgactaggagttccccttcctcacttagtctcgcttgggcagtaccccgcgccccttctggcgccgtcttggattatgaagtgaagtaccatgagaagggcgcagaaggaccctcttcagtgcggttcctgaagactagtgaaaatagagcagagctgaggggattgaaacgtggcgcttcctacttagtccaagtgcgagcaagatcagaggcaggctacggaccattcggccaggaacaccattctcagacacagctggacgagtcggaaggctggcgcgagcaattagctcttatcgctggcaccgccgtagtgggggtcgtgcttgtgttagtagtcatcgtggtggcggtactgtgcctgaggaagcagtctaatgggcgcgaggcagaatactccgataagcatggacagtacctcatcgggcacggcaccaaagtgtacatcgatccttttacttacgaagatcccaacgaagcagtaagggaattcgccaaagaaatcgatgtctcatatgtgaagatcgaggaggttatcggagccggggagtttggagaagtatgtaggggacgactgaaggccccaggcaagaaggaatcttgcgtcgccataaagaccttgaagggtggatacactgaacggcaacgccgggagtttctgtctgaggcgtccattatgggccagtttgagcaccccaatatcatcaggctggaaggagttgtgaccaacagtatgccagtgatgatcctaacagaattcatggagaatggagcactcgatagtttcctgcgcctcaatgatgggcagttcactgtgatccagctggtgggaatgttacgaggcatcgcatcaggtatgagatacctggctgaaatgagctacgttcaccgcgatctagcagcccggaacattctggtgaatagcaatctggtgtgcaaggtgtcggatttcggcctctccaggttcctcgaagaaaatagcagcgaccctacttatacttcttcacttggtggtaagatccctattaggtggacagccccagaagcaattgcgttccgaaagttcacttccgcatcagacgcttggagctatggcatagtaatgtgggaggttatgagctttggcgaacgcccctattgggacatgagcaaccaggacgtgatcaatgcaattgagcaggactaccgtcttccaccaccccccgattgccccacatccctgcatcagcttatgctggactgctggcagaaggatcgaaacgctcggccacggtttccacaggtggttagtgccttagacaagatgattcgaaaccccgcctcattgaagattgtagccagagagaacgggggggcatctcatccgctgctggaccagagacagccccactattctgcatttggctccgttggcgaatggctcagagcgataaagatggggcgctacgaagagtcatttgctgctgccggattcggtagctttgagcttgtgagccagatcagcgcggaagaccttcttcggatcggcgtgactctggcagggcaccaaaagaagatcttagcttctgtgcaacatatgaaatcccaagccaaacccggtacaccgggtggtactggggggccggctcctcagtactag

SEQ ID NO: 146311 - DNA, 2808 bp, Artificial Sequence
  derived and/or modified sequence
atggaactgcgcgtgttgctttgctgggcttctctggccgcagccctggaagaaacactgctgaatactaagttggaaacagcagacctcaaatgggtgacgtttccccaggtggatggccaatgggaagagctatccggcctggatgaagagcaacactcagtcagaacttacgaggtgtgcgatgttcagcgtgctcctgggcaggctcattggctcaggaccggatgggtgccacgtcgtggagctgtacacgtttacgcgactctgaggttcactatgttagaatgtctctccctgcctcgcgctgggcggagctgcaaggagacttttaccgttttctactacgaatcagatgccgacacagccactgcactgacacccgcgtggatggaaaacccatatatcaaggttgacacagtggccgcagaacaccttacacgcaaacgtccgggcgctgaagcaactggcaaagtgaacgtgaaaaccctgagactgggtccactgagcaaagcaggattttacctggcattccaggatcaaggcgcctgcatggccctgctgtccctccaccttttctataaaaagtgtgctcaacttaccgtgaatctgactaggttcccagaaaccgtcccaagagagctcgtagtccctgtagctgggtcgtgtgtcgtggacgccgttcccgctccaggccccagcccatcactctactgtagggaggacggacaatgggccgagcagcccgtaacagggtgctcctgcgcgcccgggttcgaagcggccgaggggaacacgaagtgccgcgcttgcgcccaagggacgttcaaaccactgagcggcgaaggcagttgtcagccctgtcccgccaactcacactccaatactattggatcagccgtttgccaatgccgggtgggatacttccgggctcgcacagaccctagaggagcaccctgcactactcctcccagtgctcctagaagtgtggtgagccggttgaatggttctagcctccatttagaatggtccgctcccttggagtccggtggaagggaggacctgacctacgccttgcgctgccgcgagtgcaggcccgggggcagttgtgccccgtgtggtggggatctcacattcgacccgggccccagagatcttgttgagccttgggtcgttgtgcgagggcttaggccagacttcacctacactttcgaagtgacggctcttaatggagtgagtagcctagccaccggtccagtgccatttgagccagtcaacgtgaccaccgatcgggaagtgccaccagcagtctcagatatccgcgtgaccaggtcttccccatcttcgctgagccttgcttgggcagtcccgagagcccctagcggggctgtcctcgattacgaagtaaagtaccatgaaaaaggtgccgaaggaccttcaagcgttaggtttctcaaaacttctgaaaaccgagctgaattgagaggcttaaaacgcggcgcatcgtacctggtccaggtgagagcgcggagcgaagcaggttacgggcccttcggtcaggaacatcattcccagactcagttggacgaaagcgagggatggagagaacagttggcactgattgccggaacagccgtcgtgggggtggttctggtgttagtagttatcgttgtggctgtcctttgccttcgcaaacagtccaacgggagggaggctgaatattctgacaagcatgggcaatacctgatcgggcatgggacgaaggtgtacattgacccttttacttacgaagacccaaatgaagcagttagagagttcgcaaaggagatcgacgtgtcatacgtgaaaatcgaagaagtcattggtgcaggtgagtttggcgaggtgtgcaggggacgtttaaaggctccgggaaagaaagagtcctgtgtggccatcaagacactgaagggtggttacaccgaacggcagcggagggagttcctgtccgaagcatccattatgggtcagttcgagcatccaaacatcattcggctggagggagtggttactaactcaatgccagtaatgatcctgaccgaatttatggaaaatggcgcactggatagctttctccgcctcaacgacgggcaattcactgtgatccagttagtgggaatgttaagaggaatcgccagcgggatgcggtatctcgcagaaatgtcttacgtgcatcgggacttggcagcacgtaacatccttgtgaattctaatttagtttgcaaagtgtctgacttcggtctctcaaggtttctggaagagaattcgagtgatcccacgtacaccagctccctgggtggaaaaatacccatacggtggacggcacccgaagcgattgcctttaggaagtttacgtccgcgtcggatgcatggagctatggaattgtgatgtgggaggtcatgtccttcggcgaaagaccctattgggatatgtcgaaccaggatgtgattaacgcgatcgagcaggattaccgactgcctccaccacccgactgtcccaccagcctgcatcagttgatgctagattgctggcagaaagatagaaacgctagacctcggttcccacaagtggtgagcgccctggacaagatgatcagaaatccggcatcactaaagatcgttgcccgagagaatggcggtgatctgctccggataggagtgaccctcgctgggcaccagaaaaagattctggccagcgtgcagcacatgaaaagccaggccaagcctggcacccctggaggtactgggggacctgcacctcagtattag

SEQ ID NO: 146312 - DNA, 2964 bp, Artificial Sequence
  derived and/or modified sequence
atggagctgcgggtgctgctgtgctgggccagcctggccgccgccctggaggagaccctgctgaacaccaagctggagacagctgacctgaagtgggtgaccttcccccaggtggatggccagtgggaggagctgagcggcctggatgaggagcagcacagcgtgaggacctatgaggtgtgtgatgtgcagagggcccctggccaggcccactggctgaggacaggctgggtgcccaggagaggagctgtgcacgtgtatgccaccctgcgcttcaccatgctggagtgcctgagcctgcccagggctggccgcagctgcaaggagaccttcaccgtcttctactatgaaagtgatgctgacacagccacagccctgaccccagcctggatggagaacccctacatcaaggtggacacagtggccgctgagcacctgaccaggaagaggcctggagctgaggccaccgggaaggtgaatgtgaagaccctgcggctgggccccctgagcaaggccggcttctacctggccttccaggaccagggcgcctgcatggccctgctgagcctgcacctgttctacaagaagtgtgcccagctgactgtgaacctgacccgcttccctgagaccgtgccccgggagctggtggtgcctgtggccggcagctgtgtggtggatgctgtgcctgcccctggccccagccccagcctgtactgcagagaagatggccagtgggccgagcagcctgtgacaggctgcagctgtgcccctggctttgaagctgctgagggcaacaccaagtgccgggcctgtgcccagggcaccttcaagcccctgagcggggagggcagctgccagccctgcccagccaacagccacagcaacaccatcggcagcgctgtgtgccagtgccgggtgggctacttccgggccaggacagaccccaggggggccccctgcaccaccccaccttctgcccccaggtctgtggtgtcccggctgaatggcagcagcctgcacctggagtggagcgcccccctggagagcggcggccgggaggacctgacctacgccctgcgctgcagagaatgtagacctgggggcagctgtgccccctgtggcggggacctgacctttgatcctggcccccgggacctggtggagccctgggtggtggtgcggggcctgcggccagacttcacctacacctttgaggtgacagccctgaatggagtgagcagcctggccactggacctgtgccctttgagcctgtgaatgtgaccacagaccgggaggtgcccccagctgtgtctgacatccgggtgaccaggagcagccccagcagcctgagcctggcctgggccgtgccccgggcccccagcggggctgtgctggactatgaggtgaagtaccacgagaagggagctgagggccccagctctgtgcgcttcctgaagaccagtgaaaatagagctgagctgcggggcctgaagagaggagccagctacctggtgcaggtgcgggcccggtctgaggccggctacggccccttcggccaggagcaccacagccagacccagctggatgaaagtgagggctggagggagcagctggccctgattgctggaacagctgtggtgggcgtggtgctggtgctggtggtgattgtggtggccgtgctgtgcctgaggaagcagagcaatggccgggaggccgagtacagcgacaagcacggccagtacctgattggacatggcaccaaggtgtacatcgaccccttcacctatgaggaccccaatgaggccgtgcgggagtttgccaaggagattgatgtgtcctatgtgaagattgaggaggtgattggagctggggagtttggagaggtgtgccggggccgcctgaaggcccctgggaagaaggagagctgtgtggccatcaagaccctgaagggcggctacacagagcggcagaggcgggagttcctgtctgaggccagcatcatgggccagtttgagcaccccaacatcatccggctggagggcgtggtgaccaacagcatgcctgtgatgatcctgacagagttcatggagaatggagccctggacagcttcctgcggctgaatgatggccagttcaccgtcatccagctggtgggcatgctgcggggcatcgccagcggcatgagatacctggccgagatgtcctatgtgcaccgggacctggccgccaggaacatcctggtgaacagcaacctggtgtgcaaggtgtctgactttggcctgagccgcttcctggaggagaacagcagtgaccccacctacaccagcagcctgggcggcaagatccccatccgctggacagcccctgaggccatcgccttcaggaagttcaccagcgccagtgatgcctggagctatggcatcgtgatgtgggaggtgatgagctttggagagcggccctactgggacatgagcaaccaggacgtcatcaatgccatcgagcaggactaccgcctgcccccacctccagactgccccaccagcctgcaccagctgatgctggactgctggcagaaggacagaaatgcccggccccgcttcccccaggtggtgtctgccctggacaagatgatcagaaatcctgccagcctgaagatcgtggcccgggagaatggaggagccagccaccccctgctggaccagaggcagccccactacagcgcctttggatctgtgggggagtggctgcgggccatcaagatgggccgctatgaggagagctttgctgctgctggcttcggcagctttgagctggtgtcccagatctctgctgaggacctgctgcgcatcggcgtgaccctggccggccaccagaagaagatcctggcctctgtgcagcacatgaagagccaggccaagccaggcaccccaggcggcaccggcggccctgccccccagtactag

SEQ ID NO: 146313 - DNA, 2808 bp, Artificial Sequence
  derived and/or modified sequence
atggagctgcgggtgctgctgtgctgggccagcctggccgccgccctggaggagaccctgctgaacaccaagctggagacagctgacctgaagtgggtgaccttcccccaggtggatggccagtgggaggagctgagcggcctggatgaggagcagcacagcgtgaggacctatgaggtgtgtgatgtgcagagggcccctggccaggcccactggctgaggacaggctgggtgcccaggagaggagctgtgcacgtgtatgccaccctgcgcttcaccatgctggagtgcctgagcctgcccagggctggccgcagctgcaaggagaccttcaccgtcttctactatgaaagtgatgctgacacagccacagccctgaccccagcctggatggagaacccctacatcaaggtggacacagtggccgctgagcacctgaccaggaagaggcctggagctgaggccaccgggaaggtgaatgtgaagaccctgcggctgggccccctgagcaaggccggcttctacctggccttccaggaccagggcgcctgcatggccctgctgagcctgcacctgttctacaagaagtgtgcccagctgactgtgaacctgacccgcttccctgagaccgtgccccgggagctggtggtgcctgtggccggcagctgtgtggtggatgctgtgcctgcccctggccccagccccagcctgtactgcagagaagatggccagtgggccgagcagcctgtgacaggctgcagctgtgcccctggctttgaagctgctgagggcaacaccaagtgccgggcctgtgcccagggcaccttcaagcccctgagcggggagggcagctgccagccctgcccagccaacagccacagcaacaccatcggcagcgctgtgtgccagtgccgggtgggctacttccgggccaggacagaccccaggggggccccctgcaccaccccaccttctgcccccaggtctgtggtgtcccggctgaatggcagcagcctgcacctggagtggagcgcccccctggagagcggcggccgggaggacctgacctacgccctgcgctgcagagaatgtagacctgggggcagctgtgccccctgtggcggggacctgacctttgatcctggcccccgggacctggtggagccctgggtggtggtgcggggcctgcggccagacttcacctacacctttgaggtgacagccctgaatggagtgagcagcctggccactggacctgtgccctttgagcctgtgaatgtgaccacagaccgggaggtgcccccagctgtgtctgacatccgggtgaccaggagcagccccagcagcctgagcctggcctgggccgtgccccgggcccccagcggggctgtgctggactatgaggtgaagtaccacgagaagggagctgagggccccagctctgtgcgcttcctgaagaccagtgaaaatagagctgagctgcggggcctgaagagaggagccagctacctggtgcaggtgcgggcccggtctgaggccggctacggccccttcggccaggagcaccacagccagacccagctggatgaaagtgagggctggagggagcagctggccctgattgctggaacagctgtggtgggcgtggtgctggtgctggtggtgattgtggtggccgtgctgtgcctgaggaagcagagcaatggccgggaggccgagtacagcgacaagcacggccagtacctgattggacatggcaccaaggtgtacatcgaccccttcacctatgaggaccccaatgaggccgtgcgggagtttgccaaggagattgatgtgtcctatgtgaagattgaggaggtgattggagctggggagtttggagaggtgtgccggggccgcctgaaggcccctgggaagaaggagagctgtgtggccatcaagaccctgaagggcggctacacagagcggcagaggcgggagttcctgtctgaggccagcatcatgggccagtttgagcaccccaacatcatccggctggagggcgtggtgaccaacagcatgcctgtgatgatcctgacagagttcatggagaatggagccctggacagcttcctgcggctgaatgatggccagttcaccgtcatccagctggtgggcatgctgcggggcatcgccagcggcatgagatacctggccgagatgtcctatgtgcaccgggacctggccgccaggaacatcctggtgaacagcaacctggtgtgcaaggtgtctgactttggcctgagccgcttcctggaggagaacagcagtgaccccacctacaccagcagcctgggcggcaagatccccatccgctggacagcccctgaggccatcgccttcaggaagttcaccagcgccagtgatgcctggagctatggcatcgtgatgtgggaggtgatgagctttggagagcggccctactgggacatgagcaaccaggacgtcatcaatgccatcgagcaggactaccgcctgcccccacctccagactgccccaccagcctgcaccagctgatgctggactgctggcagaaggacagaaatgcccggccccgcttcccccaggtggtgtctgccctggacaagatgatcagaaatcctgccagcctgaagatcgtggcccgggagaatggaggagacctgctgcgcatcggcgtgaccctggccggccaccagaagaagatcctggcctctgtgcagcacatgaagagccaggccaagccaggcaccccaggcggcaccggcggccctgccccccagtactag

SEQ ID NO: 146314 - DNA, 2964 bp, Artificial Sequence
  derived and/or modified sequence
atggagctgcgggtgctgctgtgctgggccagcctggccgccgccctggaggaaactctccttaatacaaaactggagaccgccgatttgaagtgggtgacctttccgcaggttgatggccagtgggaagagctttcaggcctagatgaagagcagcattctgtcaggacatacgaggtgtgcgatgtccaacgcgcgcccggccaggcccattggcttagaactggatgggtgcctcggcgaggagctgtacatgtgtacgccacacttcggttcacaatgcttgagtgtctcagcttacccagggccggtcgcagctgcaaggagactttcactgtgttctactatgaaagcgacgctgataccgcaaccgcgctgacaccagcatggatggaaaacccatacatcaaagtagacactgtggccgccgaacacctgactcgtaagcgccctggcgctgaagcaactgggaaggtgaacgtgaagacattacggctgggccccttaagcaaagcgggcttttacttggcttttcaggatcagggggcgtgcatggcgctcctgtcccttcacctcttctacaaaaaatgtgcccagctgactgtcaatctgactagattccccgaaaccgtaccgagggaactggttgtccctgttgcaggttcatgtgtggtcgacgcggttcccgcccctggaccttccccatcactttactgtcgggaagatggccaatgggctgagcagcctgttaccggttgctcatgcgcccccggcttcgaagccgctgagggtaatacaaagtgtcgcgcctgtgcccaggggacatttaagcctctgagtggggaggggagctgtcagccatgccctgcaaatagccactccaatacaattggctcggcagtctgtcagtgccgcgtaggttacttccgcgccagaactgaccccagaggtgctccgtgtacaacaccgccctccgccccacgatctgtcgtgagccgcttaaatgggtcgtctctgcatctcgaatggtccgcaccgctcgaaagcggagggcgggaagacctaacctatgccttgcgttgccgggaatgccgacccggggggtcttgcgcaccttgcggcggcgacctcacctttgacccaggccctcgggacctcgttgaaccatgggtcgtagtgagggggctcaggcctgatttcacctacacatttgaagtcacggcgctgaacggcgttagctccctcgccaccgggccggtcccctttgagcctgtaaatgtcacgaccgatagggaagtgccgcctgccgtctcagatatcagagtgactcgcagtagtccctcttctctcagtcttgcctgggctgtgccccgggctcccagcggtgcggtacttgactatgaggtgaagtatcacgaaaagggtgccgagggcccctcgtcagtgcgtttccttaagactagtgagaatcgtgccgaactgaggggcctgaagcgtggggcgtcatacctggttcaggtccgagccagatctgaggcagggtacgggccgttcggccaggagcatcactcccagacacagttggacgaatccgaaggatggcgggagcagctggcgctgattgctggcaccgccgtagtcggagtagttctggtcctggtcgtgatcgtcgtcgccgtgctgtgcctacggaaacaatctaatggacgcgaggcggaatattccgataagcatggacagtacttaataggccacggaacgaaggtctacatagacccgttcacttacgaagatcccaacgaggctgtgcgtgagttcgccaaggaaatcgacgtttcttatgtgaaaattgaggaggtgattggggccggggagttcggcgaagtctgtcggggcagactgaaagcccctggcaaaaaagagtcctgtgtggctatcaaaacgcttaagggtggctacaccgaacgtcaaaggcgcgaattcctcagtgaagcctcgatcatgggacagtttgagcatccaaatatcatcaggttggagggtgtagtgacaaactccatgcccgtaatgattcttacggaatttatggagaatggggccctggactcctttctccgcctgaacgatggacagttcactgtaatccagctggttgggatgctgcgtgggattgcatccggcatgcgatatctcgctgagatgagttacgtccaccgcgatcttgctgctagaaatattctggtcaactccaaccttgtgtgtaaggtctccgattttgggctgtcacgcttcttggaggaaaattcctccgatcccacatacacatccagcttgggcggaaaaatcccaatcagatggacagctcccgaggcaattgccttcaggaaattcactagtgcaagcgatgcttggagttacggcattgtgatgtgggaggtgatgtcatttggtgaaagaccatactgggacatgtctaaccaggacgtgatcaacgccatcgaacaagattataggttacccccaccgccagactgcccgacttctcttcatcagctgatgctggactgctggcagaaagaccgcaacgcaagacccagatttccacaggtggtcagcgccttggacaaaatgatcaggaatccagcctctctcaagattgtggcaagggagaacggtggagcatcccaccccctgctggatcaaaggcagccacattactccgcttttgggagtgtgggggagtggctccgtgcgatcaagatgggccgttatgaggaatcattcgcagccgccggattcggctctttcgagctggtgagccaaatctccgctgaagatctgctgcgaatcggagtaacactagcaggacaccagaagaaaatcctggccagtgtgcagcatatgaaaagccaggccaagcccggtacccctggcggaactggcggaccggctccacaatactag

SEQ ID NO: 146315 - DNA, 2808 bp, Artificial Sequence
  derived and/or modified sequence
atggagctgcgggtgctgctgtgctgggccagcctggccgccgccctggaggagacattattgaacaccaaactggaaaccgctgatctcaaatgggtgaccttcccccaggtagacggacagtgggaggagctttctggactggacgaagaacagcactccgtgagaacgtacgaggtgtgtgatgtgcagagggcccccgggcaagcccattggcttagaacgggttgggtgccgaggagaggagccgtgcacgtttatgccactcttcgattcactatgttggagtgcttatcactacccagggcaggaagatcttgtaaggaaacgtttacagtgttctactatgaatcagacgcagacaccgccactgctcttacccccgcgtggatggaaaacccgtacattaaggtcgacacggtcgccgcagagcacctgacgaggaaacgccctggtgcggaggccactggaaaggtgaacgtgaaaaccctacgtctcgggccgctcagcaaggctggcttttacctggccttccaggatcaaggcgcctgcatggctcttctctccctccatctgttttataagaagtgtgcccagttgaccgtcaatctaactaggttcccagaaacggtaccgagggaactcgtggttccggttgcaggttcctgcgtggttgacgccgttcccgcgcctggtccaagcccatccctgtattgtcgtgaagacggtcaatgggcagagcaacccgtgacggggtgcagttgtgctcccggctttgaagccgccgaggggaacaccaaatgtagggcatgcgcccagggcacattcaagccactgtccggagagggatcctgtcagccctgtcccgctaacagtcactcaaatacaattggcagcgccgtgtgccagtgcagggtggggtacttcagggcccgtaccgatccacggggcgccccctgtactactcccccttcagcaccccggtccgtggtgagccgtctcaatggaagttctcttcaccttgaatggtccgcacccctggaatccgggggccgggaggatttaacttatgcactgagatgtagggagtgcaggccaggaggcagttgcgctccctgtggcggcgatctgaccttcgatccaggcccgagggacctggttgaaccgtgggtggttgtccggggtctgcgacccgatttcacttacactttcgaagtgactgcactgaacggcgtgagcagcctggctactggaccagtgccatttgagccggtgaatgttactaccgatcgagaggtccctcctgccgtcagcgatatccgcgtcacgagatcatctccctcatctctgagtctggcctgggcggtacctcgggctccttctggggctgtcctggattacgaggtgaagtaccacgagaaaggcgccgaaggtccaagctccgttagattcctaaaaacaagcgaaaatagggctgagcttaggggcctcaagcgcggtgcctcttacctggtgcaggtgagagccaggtctgaggccgggtatggcccctttgggcaggagcaccattcgcagactcaacttgacgagagtgaggggtggcgagagcagctggctctgattgccggcaccgcggtcgttggagttgtgttagtcctcgtggtgattgtcgtggcggtgctctgtcttcgcaaacagtcaaatggtagagaggccgagtactccgataaacacgggcagtatttaattgggcacggcactaaagtatatatagacccattcacttacgaagaccctaatgaggccgttcgcgaattcgctaaagagatcgacgtcagttatgtgaaaattgaagaggttattggggccggcgagttcggggaagtgtgcaggggcaggctcaaggccccagggaagaaggagagctgtgttgcgataaagactctgaaagggggttacaccgagcgtcagcgtagggaattcctaagcgaggcctctatcatgggacaatttgagcatccaaacattatcagactagagggcgtcgtgacgaactctatgcccgtcatgatcctgacagaattcatggagaacggtgctctggattcattccttcgactaaacgatggccagtttactgttattcagttggttggcatgctgcgaggtatcgcatccggtatgagatacctcgctgagatgtcctatgtccaccgtgacctggccgcgcgcaacatcctcgtaaactctaacctcgtctgcaaagtgtctgacttcggactatcaagatttctggaggagaattcttctgatcccacatatactagctcattgggaggcaaaatccccattcggtggactgcccctgaggctattgctttccggaagttcacatccgcatctgatgcctggagctacggaatcgttatgtgggaggtgatgagcttcggagagcggccttactgggatatgtcaaatcaagacgtgataaacgccatcgagcaggattaccgccttcctcccccccccgactgcccaacttcgttgcatcagcttatgctggattgttggcaaaaagatcgcaacgcgcggccgaggttcccccaggttgtctctgccctggacaagatgataaggaacccggcatctcttaagatcgttgccagagaaaatgggggtgacttactccgcataggagtaacattggctggacaccagaaaaagatcctggcctcggtccagcacatgaagtctcaggcaaagcccggaacaccaggcggcacagggggcccagcaccacagtattag

SEQ ID NO: 146316 - DNA, 2964 bp, Artificial Sequence
  derived and/or modified sequence
atggagttaagagtcctgttgtgttgggcatctttggcagcagccctggaggaaactctcctgaataccaagctggaaacagctgatctaaagtgggtgacatttcctcaggtggatggacagtgggaggagctctccgggctggatgaagaacagcattccgttcggacctacgaagtatgtgatgtccagcgcgcaccgggacaggcacattggcttagaaccggttgggtgccgaggcggggagccgtccatgtgtacgcaacattgaggttcaccatgctggaatgcctctctctgcctcgggctggcagaagctgtaaggagacctttactgtcttttattatgaatccgacgccgacacagcaactgccctgacccccgcttggatggagaacccgtacatcaaagtcgacactgtcgcagctgaacatttgactcgaaaacgacccggagccgaggccaccggaaaagtgaacgtgaaaactctccggctgggcccactctccaaggccggattctacttagcgtttcaggaccagggagcgtgcatggctttactctcgcttcatctgttctataaaaaatgtgcccagcttacggtcaaccttacccgtttccccgagacagtacccagagagctggttgtgccggtcgccggaagttgcgtggtggacgccgtcccggctcccggtccctcgccgagtttatactgcagagaggacgggcagtgggcagagcaaccagtgactgggtgttcatgtgccccaggcttcgaagccgctgaaggcaacaccaagtgccgggcttgtgctcagggcacctttaaacctctctctggtgaagggagttgccagccctgtcccgctaacagccactccaataccatcggaagtgcagtctgtcaatgcagggtgggttattttagggccaggaccgaccccagaggcgcaccttgcactactcctccgtccgctccaagatctgtagttagtcgactcaacggaagttctctccacctggaatggagcgcaccactcgaatctggaggaagagaggacctcacttatgctctccggtgccgcgaatgtaggcccggtggctcctgtgcaccttgtggtggagatctcacatttgaccctgggcctcgcgatcttgtcgagccttgggtagtcgtgagaggtctgagaccagactttacatacacttttgaggtgaccgctttgaatggagtaagcagcctggcgaccggtccggtgccctttgagccggtgaacgtcactacagaccgggaggtccccccagccgtttccgatatccgcgtcactaggagctctccttcctcattgtctctcgcctgggccgtaccccgagccccttctggcgcagtccttgattacgaggtcaaataccatgagaagggggctgagggacctagctctgtgaggttcttgaaaacatccgagaacagagcagagctgaggggcctgaagcggggtgcgagttaccttgtacaagtgcgcgcacgctcagaggcaggatacggaccttttgggcaggagcaccactcccaaacacagttggatgaaagtgaaggctggcgggaacagctcgcactcatagcaggtacggcggtggtgggcgtcgtgctcgttctcgttgtaatcgtggtcgctgtgttgtgcctgcgcaagcagagcaatggccgagaagctgaatactctgacaagcacggacagtatttgataggccatgggactaaggtgtacattgacccatttacctacgaagaccctaacgaggctgtgcgggagtttgccaaggagatagatgtatcttatgttaagatagaggaagtcatcggagccggagaatttggcgaagtatgtcgcggaaggcttaaggcccctgggaagaaagaatcttgtgtggctatcaaaacattgaaaggcggttacacagaacgtcagcggagagagtttctgtccgaggcctccataatggggcagttcgaacaccctaacatcatcaggctagagggcgttgtgacaaatagcatgcccgtcatgatcctcaccgaattcatggaaaacggggctcttgactcattccttcggttgaacgacggccaatttaccgttattcagctcgtcggtatgctgcggggaatcgcaagcggtatgagatatctggcggaaatgtcttacgtacatcgggacttggctgcccgtaacatccttgtcaactcaaacttagtgtgcaaggtttcagacttcggcttgtctcgcttcctcgaagaaaacagctccgaccccacatacacctctagcctggggggtaagatacccattcgatggacagctccggaagctattgcgttcaggaagtttactagcgcttccgatgcgtggtcgtatgggatcgtcatgtgggaagtcatgtcttttggagagaggccatattgggatatgagtaatcaggatgtaattaatgcgatcgaacaggattatcggctgccaccgcctcccgactgcccaacctcccttcaccagctgatgctggactgttggcagaaagataggaacgctcgtcccagattcccccaggttgtcagtgccttggacaaaatgatccgtaatcctgcctccctcaaaattgtggcacgggagaacggaggcgctagccatccgctgcttgaccaaaggcagccacattatagcgcatttggctcggtcggcgaatggttacgtgctattaaaatgggccgttacgaagagagcttcgccgcagcagggttcgggtcttttgaattggttagtcagatctcagccgaggacctcttaaggatcggcgtgactctcgcgggtcaccagaagaagattcttgcctcagttcaacatatgaaatcccaagctaaacccggtacgccaggcggaacaggcggtcccgcaccacagtactag

SEQ ID NO: 146317 - DNA, 2808 bp, Artificial Sequence
  derived and/or modified sequence
atggagctgagagtgctgctctgctgggcgagcctggccgctgcattggaagagacgctgcttaacacaaaactggagaccgccgatctgaagtgggtgacattccctcaggtggacggccagtgggaggaactctctggcctggacgaggaacagcacagtgtgaggacctacgaggtgtgtgacgtgcagagggctccaggccaggctcattggcttcgaaccggctgggtgcccaggagaggtgctgtgcatgtgtacgccaccctcaggtttactatgctggagtgcttgtccctgccccgagccggacgctcatgtaaggaaactttcacagtgttttactacgaatccgacgccgatactgccacggcgctgactcctgcctggatggaaaatccttacataaaggtcgacaccgtggccgctgagcacctgactcggaagcggcctggcgctgaggcaaccggtaaggtcaacgtcaaaacattacgtctcgggccactgagtaaggctggcttctatctggcattccaggaccagggcgcttgcatggctctcttaagtctgcatctgttttacaagaagtgcgcccagttaaccgtgaatttgacacgttttccagagacagttccccgagagctcgtcgtgcctgtggccggttcttgcgtcgttgatgccgtgccagcccctgggccttccccctccctgtactgccgggaggatgggcagtgggccgagcagccagtaactgggtgtagttgtgcaccgggttttgaagctgcagaagggaacacaaagtgccgggcttgtgcccagggcacctttaaaccccttagcggagagggcagctgccagccctgcccagccaactcgcattccaataccattggtagtgccgtgtgccagtgcagagtcggctatttccgggctagaactgatcctaggggagccccatgtaccactccccctagcgcccctcgctcggttgtgtctcgcttaaacgggtcatccctgcacctggagtggtccgcccctctggagtccgggggacgtgaggacctcacctacgccttacgatgccgtgaatgccggccaggtggcagctgcgccccttgtggtggagacttaacatttgatcctgggccacgagacctggtcgaaccttgggttgtggtcagggggctacgccctgacttcacatacacctttgaagtgacagcactgaacggcgtgtcgagcctcgccacaggacccgtgccattcgaacctgtaaacgtgacgaccgacagagaggttccacccgcagtgagtgacatccgcgtgacccggagctctcccagctctctgtctttggcgtgggctgttcctagggctccttcaggcgctgtcttagactatgaggtcaaatatcatgaaaagggagccgaagggcctagttccgtccggtttctgaagacttcagaaaacagggccgagctgcggggtctcaagcgcggagcctcatacctcgtgcaggttcgagctagatctgaagccggttatggcccattcggacaggagcaccatagccagactcagctggatgagagcgagggatggagggagcagttagcgctcatcgcgggtacggccgtagtgggagtggtactggtgctggtcgttatagtcgtggccgtgctttgtttgcgcaagcagtcgaatggtcgtgaggcagaatacagcgataagcacggccagtacttaatcggacacggtaccaaggtctatattgacccattcacatacgaggacccaaatgaggcagtgcgggagtttgccaaagaaattgacgtgtcctatgtgaaaatagaggaggtaatcggcgcaggtgaattcggcgaagtctgcaggggtaggcttaaggcccctggcaagaaggaatcatgtgtcgccattaaaactcttaaaggtggatacacagagagacagaggcgtgaatttttgtctgaagcaagtattatgggccaattcgagcatccaaacattataagactggaaggggtagtgaccaattccatgcctgtgatgattctgactgagtttatggaaaatggagcccttgactcctttctgaggctgaacgatggccagtttaccgtcattcagcttgtcggaatgctccggggaatagcctccggcatgcgatatctggccgagatgagctatgtgcatagagaccttgccgctagaaatatcctggtgaattcaaacctggtctgcaaggtttctgactttggtctgagccgattcctcgaggaaaacagcagcgatcccacttacacgtcatccctgggcggtaagataccaatcaggtggaccgcccctgaagctatcgccttcagaaaatttacctccgcaagcgatgcgtggtcctacggcattgtcatgtgggaagtgatgtcttttggagaaagaccttactgggacatgtccaaccaggatgtcatcaacgcgatcgagcaggactaccggctgcctcccccaccagactgcccaacatcacttcatcagcttatgttagattgctggcaaaaagatcggaacgctagacctcgttttccgcaagtggtctctgctcttgataaaatgatcagaaaccccgcttccctgaaaatcgtggcccgtgaaaatgggggagaccttctgaggatcggcgtcaccctggcaggacatcagaaaaagatattggcctctgtccagcacatgaaatcccaggcaaaacctggcacccccggtgggactgggggtcccgctccgcagtactag

SEQ ID NO: 146318 - protein, 1512 aa, Artificial Sequence
  derived and/or modified sequence
MATLSLTVNSGDPPLGALLAVEHVKDDVSISVEEGKENILHVSENVIFTDVNSILRYLARVATTAGLYGSNLMEHTEIDHWLEFSATKLSSCDSFTSTINELNHCLSLRTYLVGNSLSLADLCVWATLKGNAAWQEQLKQKKAPVHVKRWFGFLEAQQAFQSVGTKWDVSTTKARVAPEKKQDVGKFVELPGAEMGKVTVRFPPEASGYLHIGHAKAALLNQHYQVNFKGKLIMRFDDTNPEKEKEDFEKVILEDVAMLHIKPDQFTYTSDHFETIMKYAEKLIQEGKAYVDDTPAEQMKAEREQRIDSKHRKNPIEKNLQMWEEMKKGSQFGQSCCLRAKIDMSSNNGCMRDPTLYRCKIQPHPRTGNKYNVYPTYDFACPIVDSIEGVTHALRTTEYHDRDEQFYWIIEALGIRKPYIWEYSRLNLNNTVLSKRKLTWFVNEGLVDGWDDPRFPTVRGVLRRGMTVEGLKQFIAAQGSSRSVVNMEWDKIWAFNKKVIDPVAPRYVALLKKEVIPVNVPEAQEEMKEVAKHPKNPEVGLKPVWYSPKVFIEGADAETFSEGEMVTFINWGNLNITKIHKNADGKIISLDAKLNLENKDYKKTTKVTWLAETTHALPIPVICVTYEHLITKPVLGKDEDFKQYVNKNSKHEELMLGDPCLKDLKKGDIIQLQRRGFFICDQPYEPVSPYSCKEAPCVLIYIPDGHTKEMPTSGSKEKTKVEATKNETSAPFKERPTPSLNNNCTTSEDSLVLYNRVAVQGDVVRELKAKKAPKEDVDAAVKQLLSLKAEYKEKTGQEYKPGNPPAEIGQNISSNSSASILESKSLYDEVAAQGEVVRKLKAEKSPKAKINEAVECLLSLKAQYKEKTGKEYIPGQPPLSQSSDSSPTRNSEPAGLETPEAKVLFDKVASQGEVVRKLKTEKAPKDQVDIAVQELLQLKAQYKSLIGVEYKPVSATGAEDKDKKKKEKENKSEKQNKPQKQNDGQRKDPSKNQGGGLSSSGAGEGQGPKKQTRLGLEAKKEENLADWYSQVITKSEMIEYHDISGCYILRPWAYAIWEAIKDFFDAEIKKLGVENCYFPMFVSQSALEKEKTHVADFAPEVAWVTRSGKTELAEPIAIRPTSETVMYPAYAKWVQSHRDLPIKLNQWCNVVRWEFKHPQPFLRTREFLWQEGHSAFATMEEAAEEVLQILDLYAQVYEELLAIPVVKGRKTEKEKFAGGDYTTTIEAFISASGRAIQGGTSHHLGQNFSKMFEIVFEDPKIPGEKQFAYQNSWGLTTRTIGVMTMVHGDNMGLVLPPRVACVQVVIIPCGITNALSEEDKEALIAKCNDYRRRLLSVNIRVRADLRDNYSPGWKFNHWELKGVPIRLEVGPRDMKSCQFVAVRRDTGEKLTVAENEAETKLQAILEDIQVTLFTRASEDLKTHMVVANTMEDFQKILDSGKIVQIPFCGEIDCEDWIKKTTARDQDLEPGAPSMGAKSLCIPFKPLCELQPGAKCVCGKNPAKYYTLFGRSY

SEQ ID NO: 146319 - protein, 987 aa, Artificial Sequence
  derived and/or modified sequence
MATLSLTVNSGDPPLGALLAVEHVKDDVSISVEEGKENILHVSENVIFTDVNSILRYLARVATTAGLYGSNLMEHTEIDHWLEFSATKLSSCDSFTSTINELNHCLSLRTYLVGNSLSLADLCVWATLKGNAAWQEQLKQKKAPVHVKRWFGFLEAQQAFQSVGTKWDVSTTKARVAPEKKQDVGKFVELPGAEMGKVTVRFPPEASGYLHIGHAKAALLNQHYQVNFKGKLIMRFDDTNPEKEKEDFEKVIKSVVMTLCQKSIKVTGLPNTFMVILEDVAMLHIKPDQFTYTSDHFETIMKYAEKLIQEGKAYVDDTPAEQMKAEREQRIDSKHRKNPIEKNLQMWEEMKKGSQFGQSCCLRAKIDMSSNNGCMRDPTLYRCKIQPHPRTGNKYNVYPTYDFACPIVDSIEGVTHALRTTEYHDRDEQFYWIIEALGIRKPYIWEYSRLNLNNTVLSKRKLTWFVNEGLVDGWDDPRFPTVRGVLRRGMTVEGLKQFIAAQGSSRSVVNMEWDKIWAFNKKVIDPVAPRYVALLKKEVIPVNVPEAQEEMKEVAKHPKNPEVGLKPVWYSPKVFIEGADAETFSEGEMVTFINWGNLNITKIHKNADGKIISLDAKLNLENKDYKKTTKVTWLAETTHALPIPVICVTYEHLITKPVLGKDEDFKQYVNKNSKHEELMLGDPCLKDLKKGDIIQLQRRGFFICDQPYEPVSPYSCKEAPCVLIYIPDGHTKEMPTSGSKEKTKVEATKNETSAPFKERPTPSLNNNCTTSEDSLVLYNRVAVQGDVVRELKAKKAPKEDVDAAVKQLLSLKAEYKEKTGQEYKPGNPPAEIGQNISSNSSASILESKSLYDEVAAQGEVVRKLKAEKSPKAKINEAVECLLSLKAQYKEKTGKEYIPGQPPLSQSSDSSPTRNSEPAGLETPEAKVLFDKVASQGEVVRKLKTEKAPKDQVDIAVQELLQLKAQYKSLIGVEYKPVSATGAEDKDK

SEQ ID NO: 146320 - protein, 975 aa, Artificial Sequence
  derived and/or modified sequence
MATLSLTVNSGDPPLGALLAVEHVKDDVSISVEEGKENILHVSENVIFTDVNSILRYLARVATTAGLYGSNLMEHTEIDHWLEFSATKLSSCDSFTSTINELNHCLSLRTYLVGNSLSLADLCVWATLKGNAAWQEQLKQKKAPVHVKRWFGFLEAQQAFQSVGTKWDVSTTKARVAPEKKQDVGKFVELPGAEMGKVTVRFPPEASGYLHIGHAKAALLNQHYQVNFKGKLIMRFDDTNPEKEKEDFEKVILEDVAMLHIKPDQFTYTSDHFETIMKYAEKLIQEGKAYVDDTPAEQMKAEREQRIDSKHRKNPIEKNLQMWEEMKKGSQFGQSCCLRAKIDMSSNNGCMRDPTLYRCKIQPHPRTGNKYNVYPTYDFACPIVDSIEGVTHALRTTEYHDRDEQFYWIIEALGIRKPYIWEYSRLNLNNTVLSKRKLTWFVNEGLVDGWDDPRFPTVRGVLRRGMTVEGLKQFIAAQGSSRSVVNMEWDKIWAFNKKLRALCKKVIDPVAPRYVALLKKEVIPVNVPEAQEEMKEVAKHPKNPEVGLKPVWYSPKVFIEGADAETFSEGEMVTFINWGNLNITKIHKNADGKIISLDAKLNLENKDYKKTTKVTWLAETTHALPIPVICVTYEHLITKPVLGKDEDFKQYVNKNSKHEELMLGDPCLKDLKKGDIIQLQRRGFFICDQPYEPVSPYSCKEAPCVLIYIPDGHTKEMPTSGSKEKTKVEATKNETSAPFKERPTPSLNNNCTTSEDSLVLYNRVAVQGDVVRELKAKKAPKEDVDAAVKQLLSLKAEYKEKTGQEYKPGNPPAEIGQNISSNSSASILESKSLYDEVAAQGEVVRKLKAEKSPKAKINEAVECLLSLKAQYKEKTGKEYIPGQPPLSQSSDSSPTRNSEPAGLETPEAKVLFDKVASQGEVVRKLKTEKAPKDQVDIAVQELLQLKAQYKSLIGVEYKPVSATGAEDKDKKKKEK

SEQ ID NO: 146321 - DNA, 4539 bp, Artificial Sequence
  derived and/or modified sequence
atggcgacactaagtttgaccgtgaattccggggatcccccattgggggcattgctggctgtggaacacgtgaaggacgacgtttccatttctgtggaagagggaaaggagaatatccttcacgtctctgagaacgtaatctttacagacgtgaattctattctccggtacttggccagggtggccactacagccggtctttacggcagcaatttgatggaacacacagagatcgaccactggttggagttttccgctactaaattatcatcttgcgattcattcacatcaaccattaacgagctgaaccattgcctttccctaagaacctatctggtcggaaattctctgagtctggcagatctctgcgtatgggcgactctgaagggcaatgcagcctggcaagagcagctgaagcaaaaaaaagctccggtgcatgtcaaacgctggttcggcttcctggaagcacagcaggcttttcagtccgttgggacaaaatgggacgtatccaccaccaaggccagagttgcgccagagaagaagcaggacgtgggcaagtttgttgagttgcctggcgccgaaatgggcaaggtgaccgtgcgcttcccccccgaggcaagcggttacttacacattggccacgccaaggccgccctcctcaaccagcattatcaagtgaattttaaagggaaattgataatgaggtttgacgacacaaatcccgagaaggagaaagaagattttgagaaagtgattctcgaggatgtcgctatgttacacattaagcctgatcagtttacttacaccagcgaccacttcgagaccattatgaaatacgccgagaagctgattcaagagggaaaggcatatgtggatgacactcctgccgaacagatgaaggctgagagggagcaaaggatcgactcaaagcacaggaaaaatcctatagagaagaatcttcaaatgtgggaggagatgaagaagggcagccagttcgggcagagctgctgtttgcgggcaaagatcgatatgagctcaaataatggatgtatgagagatccgacactttaccgctgtaagatccagccacacccgaggactggtaacaaatacaacgtgtacccaacttatgactttgcctgtcccatagtggatagcattgaaggtgttactcatgccctaagaacaacagagtaccatgacagagacgagcaattttattggattattgaagctctaggtatccgcaaaccctatatctgggaatatagccggctcaacctgaataacactgtactttcgaagcgtaaactgacctggtttgtgaatgagggtctcgtggatggctgggatgatccaagatttcctaccgtgaggggtgtgctaagaagaggtatgaccgtcgaaggcctgaagcagtttatagccgcccaggggtcttcccgttctgtcgtcaatatggagtgggataagatatgggccttcaataaaaaagtgatagaccccgtcgccccacgctatgtggcacttctgaagaaagaagttatccccgtgaacgtccccgaagcccaggaggaaatgaaagaggtggccaaacaccccaaaaatcctgaggtaggtctgaagccagtctggtacagccctaaggtcttcatcgagggcgccgatgcagagacatttagcgagggcgagatggtcacattcattaactggggaaacttgaatatcaccaaaatccacaagaacgcggatgggaaaatcatttcgcttgatgccaaattgaatcttgagaacaaggactacaagaaaacaaccaaggtgacttggctcgccgaaacaacccacgccctaccaataccagtgatctgcgtgacctacgagcacctgattaccaaaccagtgcttgggaaggatgaagacttcaagcaatatgtcaataagaactctaaacacgaggagctgatgctcggcgatccatgtctgaaagatctgaagaagggcgatattattcagctgcagcgcaggggattttttatttgtgatcagccttacgaaccagtatccccctattcttgtaaagaagctccgtgtgtgctgatatatatcccagacgggcatacgaaggaaatgcccactagcgggtctaaggaaaagaccaaggttgaggctacaaagaacgagaccagcgcaccctttaaggaaagaccaacacccagcctaaacaataactgtacaacctccgaagactcacttgtgctttataacagagttgccgtgcaaggagacgtagtgagggaacttaaagcaaaaaaggctccaaaagaggatgtcgatgctgcggtcaagcagcttctgtcactcaaggccgagtacaaggagaaaactgggcaagagtataaacccggcaaccctccagcagaaatcggacaaaacattagttcaaactcatccgctagcattctcgagagtaagagcctttacgacgaggttgctgcacaaggcgaggtcgtgcgtaagctcaaagccgagaagtcacccaaggccaaaattaatgaagccgtagaatgtctgctctcactgaaggcccagtacaaggagaagacaggcaaagagtacattccaggccaaccacctctgtctcagagcagcgattccagccccacgaggaactctgaaccagccggtctggaaaccccagaggcaaaggtgttgttcgacaaagtagcctcacaaggggaggtggtccgcaaactcaagacagaaaaagcaccaaaagaccaggtcgatatcgccgtccaagaattacttcagctcaaggcacagtataagagcttgatcggggtcgagtataagccggtcagcgccactggagctgaggacaaagacaagaagaaaaaggaaaaggagaataaatccgaaaaacagaataagccacagaagcagaatgatgggcaaaggaaagacccctccaagaatcagggaggtggcttatcttcgagcggagccggagagggccaaggtccaaagaagcagacacgtctgggcctggaggccaagaaggaagaaaaccttgctgattggtacagccaggtcataacgaagtcagagatgatcgagtaccacgatattagtggctgttatatcctccggccttgggcctatgctatctgggaggctatcaaagacttcttcgatgcagaaatcaagaagctcggcgtggagaattgctacttccccatgtttgtgagccagagcgctctggagaaggagaagacccacgtcgccgatttcgcccccgaggtggcctgggtaactagatccggcaagaccgagttggcagaacccattgcaatccgacccacctccgaaacagtaatgtatcctgcttacgccaaatgggtgcagtcccatagggatctgcccatcaagttgaatcagtggtgtaacgtggtccgctgggaatttaaacacccgcagccgtttttgcggacccgagagttcctgtggcaggagggccattctgcttttgccaccatggaagaagccgctgaagaagttctccagatccttgacctctacgctcaggtatatgaggagttattagcaattccggtggtcaaaggaagaaagacagagaaggaaaaattcgctggtggggattacacaacaaccatcgaagcgtttataagtgccagtggacgcgctatacaggggggaacttcccatcatctgggacagaacttttctaaaatgttcgaaatagtcttcgaggatcccaagatcccaggagagaaacagttcgcctaccagaactcctgggggctcactactaggacgattggtgtcatgacaatggtgcatggagacaacatgggcctggtgcttccacccagggttgcttgtgtgcaggtggtgattataccttgcggcattacgaacgccttgtctgaggaagacaaggaagccctgattgccaaatgcaacgattataggagacgcctcttgtcagtgaacatccgggttcgggcggacctgagggacaactactcccccgggtggaagttcaatcactgggaactcaagggggtccccatcaggctcgaggtgggacctcgagatatgaagtcttgccagttcgtcgcagtgcgtcgcgataccggcgagaagctcacagtcgcagagaacgaggccgaaaccaagctgcaggctatcctggaggacattcaggtgacactgttcactagggcctccgaagaccttaaaactcatatggtggtggcaaataccatggaagactttcaaaaaatattagatagcgggaagatcgtccagatacccttctgtggcgagatcgactgcgaggactggataaaaaaaaccacagcacgcgaccaggacttggaacctggcgcaccgtcgatgggcgccaaatctctgtgtattccatttaaacctctctgcgagctgcagcctggtgccaaatgtgtatgcggtaagaaccctgccaaatattatacactcttcggcagaagctactag

SEQ ID NO: 146322 - DNA, 2964 bp, Artificial Sequence
  derived and/or modified sequence
atggccacactgtcactgactgtgaatagcggggatcctccccttggcgccttgctggcggtcgaacacgtcaaggacgacgtctccatcagtgtggaggagggtaaggagaacattctgcacgtcagtgagaacgtgattttcactgatgtcaactcaatattgagatacctggctcgcgtcgcaaccaccgccggcctgtacgggagtaatttgatggaacatacagagattgaccattggctcgagttttctgctacaaagttgagttcctgcgattcatttacctctaccatcaacgagcttaatcactgcctttccctgcggacttatctcgtaggaaactcccttagcttagccgacctatgtgtctgggcaaccctaaagggaaacgctgcctggcaggagcagctgaaacaaaagaaggcaccagttcacgtaaagcgatggtttggcttcctcgaagcccagcaggcttttcagtcagttggcaccaaatgggacgtgtccaccaccaaggcgcgtgtggccccagagaaaaaacaagacgtgggcaaattcgtggagctgcctggagcggagatgggtaaggtcacagtgaggttccccccagaagctagtgggtatctgcacatcggccatgctaaagccgctctgttgaaccagcactaccaagttaacttcaagggaaagctcatcatgcggtttgacgacaccaaccctgagaaagaaaaggaggatttcgagaaagtgattaagagtgtcgtgatgacgctgtgccagaagtcaatcaaggtgacggggctgccgaacacattcatggtgattttagaggatgtcgccatgcttcacattaagccagaccagttcacctatacgagtgatcacttcgagacaattatgaagtacgcggagaagctcatccaagaggggaaggcatacgtcgatgatacacccgccgagcagatgaaggcagagcgggagcagaggattgatagcaaacatagaaagaaccctatagaaaagaatctgcagatgtgggaggagatgaaaaaagggtcccagttcggacaatcttgttgcctgcgcgctaaaatcgacatgtcttcgaacaacggctgtatgagagacccaactctgtatcgctgcaagatacaacctcatccacgcactggaaataaatacaacgtgtacccgacgtacgacttcgcatgtcctatcgtagattccatcgagggcgtgacccatgccctgcggacaacagagtaccacgaccgcgacgaacagttttactggatcatagaagcccttgggatccgcaagccgtacatttgggagtatagtcgcttaaacctgaacaataccgtcctttccaagcgcaagctaacttggttcgtaaacgaggggctcgtggacgggtgggacgatcctcggttccctactgttaggggagtcctaagacgtgggatgactgttgaagggctcaagcagttcattgctgcacagggctcatctagaagcgtcgtaaatatggaatgggacaagatttgggctttcaacaagaaagtgatcgatccagtggcacctaggtacgtggcattgcttaaaaaggaagtcattcctgtaaatgtgccagaagcacaggaagagatgaaggaggtggctaagcatccgaagaaccccgaggtaggcctaaagcctgtctggtactcgccaaaggtgtttatcgaaggcgctgatgccgaaacattctcggagggggaaatggtcacttttatcaattggggcaacctgaatattactaagattcacaaaaatgctgacgggaagatcatcagtctggatgccaagcttaatctcgagaacaaggactacaaaaagactacaaaagtaacctggctcgctgaaacaacacatgccctgcccatcccggtaatttgcgtgacttacgaacacctcataacaaagcctgtgctcgggaaagatgaagatttcaaacaatacgtcaacaagaatagtaaacacgaagaactgatgctgggcgatccatgcttgaaagacctaaagaaaggtgatatcattcagctccaacggaggggctttttcatatgtgaccagccctacgagcccgtctccccatactcatgcaaggaagctccgtgtgtgctgatctacattcccgatggacacaccaaggagatgccgacatccggctcaaaggaaaaaaccaaggtcgaagcaaccaaaaacgagacatctgcccccttcaaagagcggccaacaccttctctaaataacaactgcactacaagtgaggattccttggtgttgtataaccgcgtggccgttcagggagatgttgtgcgcgaactgaaggcaaaaaaagctcccaaagaggacgtcgatgcggcagtaaagcagctgctctctctcaaggcagaatataaggagaagactggacaggagtacaaacccggaaaccctcctgctgaaatcgggcagaacatatcctccaactccagcgcgtctatcctggagtctaagtccctgtacgacgaagtggctgcccagggagaggtggtacgtaagctcaaagcagagaaatcaccgaaagccaaaatcaatgaggcagtagaatgccttctgtctctgaaagcccagtacaaagaaaagactgggaaggaatacattccgggacagccaccattaagccaaagtagcgactccagccccactcgtaacagcgagccggctggcctagaaacgccagaggcaaaggtactattcgataaagtggcctcccagggcgaagtcgtacgcaaactgaagaccgagaaggcacccaaggaccaagtggacatcgcagtgcaagagttgttgcaactgaaggcccaatataaaagcctcataggggtggagtataaacctgtcagcgccaccggtgcagaagacaaggataaatag

SEQ ID NO: 146323 - DNA, 2928 bp, Artificial Sequence
  derived and/or modified sequence
atggctactctctctctgacagtgaatagcggcgacccgcctcttggggcactgttagccgtggagcatgttaaggacgacgtgtctatttctgtggaggagggaaaagaaaatattttgcacgtttcggagaacgtgattttcacagacgtgaactcgattctgaggtacctcgctcgagtggccaccaccgctggtctctatgggtcgaatctaatggagcataccgagatcgaccattggctagagttttccgccactaaactctctagctgtgactcctttaccagcactatcaacgaactcaatcactgtctctccctgcggacatacctggtagggaacagcctttcacttgctgacctctgtgtttgggccaccctgaaagggaatgccgcatggcaggaacagctgaaacagaaaaaggcccccgtacacgtgaagcgatggtttgggttcttagaagcacaacaggcctttcaaagtgtagggacgaagtgggacgtatcgacaacaaaggcacgagtcgcccccgagaaaaagcaagacgtgggcaagtttgtggagttgccaggcgccgagatgggaaaagtgaccgtcaggttccctcctgaagcatcaggttacctgcacataggacacgccaaagcggcactcctcaatcagcattatcaggtaaatttcaagggcaaattaatcatgagattcgacgatacgaacccagaaaaagagaaggaggatttcgagaaggttattctggaggacgtcgctatgctgcacatcaagccagaccagtttacatatacctctgatcactttgaaaccattatgaagtacgccgaaaagctcatacaggagggtaaagcatatgtcgacgatacccctgcggagcaaatgaaggccgagagggagcaacgcatcgattcgaaacatcgcaagaaccctattgaaaaaaacctccagatgtgggaggagatgaaaaagggctcccaatttggacaatcttgctgcttgagggcgaagattgatatgagttccaataacggatgtatgagggacccaactctctacagatgcaaaatccagcctcacccgcgtaccgggaataaatacaacgtctacccaacctatgactttgcatgtccaattgtggactcgattgagggagtgacacacgctctgcggacaaccgaataccacgaccgggacgagcagttttattggatcatcgaagccctgggtatccgaaagccttatatctgggaatatagccggctgaacttgaataatacagtgctgtcaaaacggaaactgacatggttcgtgaatgaaggactggttgatggatgggatgaccctagattccccacagtccggggtgttctgagacgcggcatgacagtcgaagggctaaagcagtttattgccgcccagggcagttccaggagtgtggtcaacatggagtgggacaaaatttgggcttttaacaagaaattacgcgccctctgtaaaaaggtcatcgaccctgtcgccccgcgttatgtcgctctgcttaaaaaagaggtcatcccagtgaacgtcccagaggcccaggaagaaatgaaggaagttgctaagcatcccaaaaaccctgaggtcgggctgaaacccgtgtggtactcacctaaagtctttatcgaaggggcggacgccgaaacattctccgagggggaaatggtgacatttattaactggggaaacctgaatattaccaagatccacaagaatgccgacggcaagatcatctccctggatgccaagctcaatctggaaaataaggattacaaaaaaactaccaaggtcacctggctggcagagaccactcatgctttaccgatcccagtcatatgcgttacttatgagcacttgatcacaaagcccgtgctgggcaaggacgaggactttaagcaatacgtgaacaagaatagcaaacatgaggagctgatgctgggggatccttgtctgaaagacctaaagaagggagacatcattcagttgcagaggcggggcttctttatttgcgaccagccttatgagcccgtgagtccctattcttgcaaagaggcaccgtgtgtgttaatttacattcccgacgggcacaccaaagagatgccaaccagcggctctaaagagaaaacaaaggtggaagcaacaaaaaacgagacctccgcaccgttcaaggagaggcccactcctagtctgaacaataattgtacgacctcagaagattccctggtcctctacaacagagttgccgtccagggcgacgtggtcagggaattaaaggctaagaaagccccgaaagaagacgtagatgcagccgtgaaacagttgctttccctgaaagcagaatataaggagaaaacgggccaagagtacaaacccggtaatcctcctgccgagattgggcaaaatatatcctctaatagcagcgcctctatattggagtctaagtctttgtacgacgaggtggccgcacagggcgaagttgtccgcaagctgaaagccgagaagtcccccaaagcaaagattaacgaagctgttgagtgtctgttgagccttaaggcccagtataaggaaaagaccgggaaggagtacatacccggtcaaccacctctttcacagtcttctgattcatcccctacccgaaactctgaaccagcgggccttgagactcccgaggccaaagtgttgtttgataaggtggcttcacaaggtgaagtcgtaagaaagctgaaaaccgaaaaggcacctaaagaccaggtggacatcgcggtccaggagctgctgcagttgaaagcacagtacaagtccttaattggggtcgagtacaaacccgtcagtgcgacaggagccgaggacaaggataaaaagaagaaagagaaatag

SEQ ID NO: 146324 - DNA, 5014 bp, Artificial Sequence
  derived and/or modified sequence
agcacgaaaggccacgcaggccgttctaaccctggcggccaagaggaggggtagcaggctctggaacctgcgggcggggacgaagacggcgcgcgacgatgtcgcaccgcggcgtgcgcggtgtcggcagtagctgcggcgcaggggcggagcgaaggctgcggcggcgtcgggtacgcgcacacgttgcatcttcttcctttcgcggggtcctccgtagttctggcacgagccaggcgtactgacaggtggaccagcggactggtggagatggcgacgctctctctgaccgtgaattcaggagaccctccgctaggagctttgctggcagtagaacacgtgaaagacgatgtcagcatttccgttgaagaagggaaagagaatattcttcatgtttctgaaaatgtgatattcacagatgtgaattctatacttcgctacttggctagagttgcaactacagctgggttatatggctctaatctgatggaacatactgagattgatcactggttggagttcagtgctacaaaattatcttcatgtgattcctttacttctacaattaatgaactcaatcattgcctgtctctgagaacatacttagttggaaactccttgagtttagcagatttatgtgtttgggccaccctaaaaggaaatgctgcctggcaagaacagttgaaacagaagaaagctccagttcatgtaaaacgttggtttggctttcttgaagcccagcaggccttccagtcagtaggtaccaagtgggatgtttcaacaaccaaagctcgagtggcacctgagaaaaagcaagatgttgggaaatttgttgagcttccaggtgcggagatgggaaaggttaccgtcagatttcctccagaggccagtggttacttacacattgggcatgcaaaagctgctcttctgaaccagcactaccaggttaactttaaagggaaactgatcatgagatttgatgacacaaatcctgaaaaagaaaaggaagattttgagaaggttatcttggaagatgttgcaatgttgcatatcaaaccagatcaatttacttatacttcggatcattttgaaactataatgaagtatgcagagaagctaattcaagaagggaaggcttatgtggatgatactcctgctgaacagatgaaagcagaacgtgagcagaggatagactctaaacatagaaaaaaccctattgagaagaatctacaaatgtgggaagaaatgaaaaaagggagccagtttggtcagtcctgttgtttgcgagcaaaaattgacatgagtagtaacaatggatgcatgagagatccaaccctttatcgctgcaaaattcaaccacatccaagaactggaaataaatacaatgtttatccaacatatgattttgcctgccccatagttgacagcatcgaaggtgttacacatgccctgagaacaacagaataccatgacagagatgagcagttttactggattattgaagctttaggcataagaaaaccatatatttgggaatatagtcggctaaatctcaacaacacagtgctatccaaaagaaaactcacatggtttgtcaatgaaggactagtagatggatgggatgacccaagatttcctacggttcgtggtgtactgagaagagggatgacagttgaaggactgaaacagtttattgctgctcagggctcctcacgttcagtcgtgaacatggagtgggacaaaatctgggcgtttaacaaaaaggttattgacccagtggctccacgatatgttgcattactgaagaaagaagtgatcccagtgaatgtacctgaagctcaggaggagatgaaagaagtagccaaacacccaaagaatcctgaggttggcttgaagcctgtgtggtatagtcccaaagttttcattgaaggtgctgatgcagagactttttcggagggtgagatggttacatttataaattggggcaacctcaacattacaaaaatacacaaaaatgcagatggaaaaatcatatctcttgatgcaaagttgaatttggaaaacaaagactacaagaaaaccactaaggtcacttggcttgcagagactacacatgctcttcctattccagtaatctgtgtcacttatgagcacttgatcacaaagccagtgctaggaaaagacgaggactttaagcagtatgtcaacaagaacagtaagcatgaagagctaatgctaggggatccctgccttaaggatttgaaaaaaggagatattatacaactccagagaagaggattcttcatatgtgatcaaccttatgaacctgttagcccatatagttgcaaggaagccccgtgtgttttgatatacattcctgatgggcacacaaaggaaatgccaacatcagggtcaaaggaaaagaccaaagtagaagccacaaaaaatgagacctctgctccttttaaggaaagaccaacaccttctctgaataataattgtactacatctgaggattccttggtcctttacaatagagtggctgttcaaggagatgtggttcgtgaattaaaagccaagaaagcaccaaaggaagatgtagatgcagctgtaaaacagcttttgtctttgaaagctgaatataaggagaaaactggccaggaatataaacctggaaaccctcctgctgaaataggacagaatatttcttctaattcctcagcaagtattctggaaagtaaatctctgtatgatgaagttgctgcacaaggggaggtggttcgtaagctaaaagctgaaaaatcccctaaggctaaaataaatgaagctgtagaatgcttactgtccctgaaggctcagtataaagaaaaaactgggaaggagtacatacctggtcagcccccattatctcaaagttcggattcaagcccaaccagaaattctgaacctgctggtttagaaacaccagaagcgaaagtactttttgacaaagtagcttctcaaggggaagtagttcggaaacttaaaactgaaaaagcccctaaggatcaagtagatatagctgttcaagaactccttcagctaaaggcacagtacaagtctttgataggagtagagtataagcctgtgtcggccactggagctgaggacaaagataagaagaagaaagaaaaagaaaataaatctgaaaagcagaataagcctcagaaacaaaatgatggccaaaggaaagacccttctaaaaaccaaggaggtgggctctcatcaagtggagcaggagaagggcaggggcctaagaaacagaccaggttgggtcttgaggcaaaaaaagaagaaaatcttgctgattggtattctcaggtcatcacaaagtcagaaatgattgaataccatgacataagtggctgttatattcttcgtccctgggcctatgccatttgggaagccatcaaggacttttttgatgctgagatcaagaaacttggtgttgaaaactgctacttccccatgtttgtgtctcaaagtgcattagagaaagagaagactcatgttgctgactttgccccagaggttgcttgggttacaagatctggcaaaaccgagctggcagaaccaattgccattcgtcctactagtgaaacagtaatgtatcctgcatatgcaaaatgggtacagtcacacagagacctgcccatcaagctcaatcagtggtgcaatgtggtgcgttgggaattcaagcatcctcagcctttcctacgtactcgtgaatttctttggcaggaagggcacagtgcttttgctaccatggaagaggcagcggaagaggtcttgcagatacttgacttatatgctcaggtatatgaagaactcctggcaattcctgttgttaaaggaagaaagacggaaaaggaaaaatttgcaggaggagactatacaactacaatagaagcatttatatctgctagtggaagagctatccagggaggaacatcacatcatttagggcagaatttttccaaaatgtttgaaatcgtttttgaagatccaaagataccaggagagaagcaatttgcctatcaaaactcctggggcctgacaactcgaactattggtgttatgaccatggttcatggggacaacatgggtttagtattaccaccccgtgtagcatgtgttcaggtggtgattattccttgtggcattaccaatgcactttctgaagaagacaaagaagcgctgattgcaaaatgcaatgattatcgaaggcgattactcagtgttaacatccgcgttagagctgatttacgagataattattctccaggttggaaattcaatcactgggagctcaagggagttcccattagacttgaagttgggccacgtgatatgaagagctgtcagtttgtagccgtcagacgagatactggagaaaagctgacagttgctgaaaatgaggcagagactaaacttcaagctattttggaagacatccaggtcacccttttcacaagggcttctgaagaccttaagactcatatggttgtggctaatacaatggaagactttcagaagatactagattctggaaagattgttcagattccattctgtggggaaattgactgtgaggactggatcaaaaagaccactgccagggatcaagatcttgaacctggtgctccatccatgggagctaaaagcctttgcatccccttcaaaccactctgtgaactgcagcctggagccaaatgtgtctgtggcaagaaccctgccaagtactacaccttatttggtcgcagctactgagggatgaacgaaagccccctcttcaactcctctcactttttaaagcattgatattagtatcttctcagatacagaccgttttatgattttttaaaaagtaaaagttctaaaatgaagtcacacaggacaattattcttatgcctaagttaacagtggataaaagacttttctgtaaacaactccagtaataaatatcatgaacta

SEQ ID NO: 146325 - DNA, 5085 bp, Artificial Sequence
  derived and/or modified sequence
agcacgaaaggccacgcaggccgttctaaccctggcggccaagaggaggggtagcaggctctggaacctgcgggcggggacgaagacggcgcgcgacgatgtcgcaccgcggcgtgcgcggtgtcggcagtagctgcggcgcaggggcggagcgaaggctgcggcggcgtcgggtacgcgcacacgttgcatcttcttcctttcgcggggtcctccgtagttctggcacgagccaggcgtactgacaggtggaccagcggactggtggagatggcgacgctctctctgaccgtgaattcaggagaccctccgctaggagctttgctggcagtagaacacgtgaaagacgatgtcagcatttccgttgaagaagggaaagagaatattcttcatgtttctgaaaatgtgatattcacagatgtgaattctatacttcgctacttggctagagttgcaactacagctgggttatatggctctaatctgatggaacatactgagattgatcactggttggagttcagtgctacaaaattatcttcatgtgattcctttacttctacaattaatgaactcaatcattgcctgtctctgagaacatacttagttggaaactccttgagtttagcagatttatgtgtttgggccaccctaaaaggaaatgctgcctggcaagaacagttgaaacagaagaaagctccagttcatgtaaaacgttggtttggctttcttgaagcccagcaggccttccagtcagtaggtaccaagtgggatgtttcaacaaccaaagctcgagtggcacctgagaaaaagcaagatgttgggaaatttgttgagcttccaggtgcggagatgggaaaggttaccgtcagatttcctccagaggccagtggttacttacacattgggcatgcaaaagctgctcttctgaaccagcactaccaggttaactttaaagggaaactgatcatgagatttgatgacacaaatcctgaaaaagaaaaggaagattttgagaaggtaattaaaagtgtagtgatgaccctttgccagaaaagtattaaagttacaggattacctaataccttcatggttatcttggaagatgttgcaatgttgcatatcaaaccagatcaatttacttatacttcggatcattttgaaactataatgaagtatgcagagaagctaattcaagaagggaaggcttatgtggatgatactcctgctgaacagatgaaagcagaacgtgagcagaggatagactctaaacatagaaaaaaccctattgagaagaatctacaaatgtgggaagaaatgaaaaaagggagccagtttggtcagtcctgttgtttgcgagcaaaaattgacatgagtagtaacaatggatgcatgagagatccaaccctttatcgctgcaaaattcaaccacatccaagaactggaaataaatacaatgtttatccaacatatgattttgcctgccccatagttgacagcatcgaaggtgttacacatgccctgagaacaacagaataccatgacagagatgagcagttttactggattattgaagctttaggcataagaaaaccatatatttgggaatatagtcggctaaatctcaacaacacagtgctatccaaaagaaaactcacatggtttgtcaatgaaggactagtagatggatgggatgacccaagatttcctacggttcgtggtgtactgagaagagggatgacagttgaaggactgaaacagtttattgctgctcagggctcctcacgttcagtcgtgaacatggagtgggacaaaatctgggcgtttaacaaaaaggttattgacccagtggctccacgatatgttgcattactgaagaaagaagtgatcccagtgaatgtacctgaagctcaggaggagatgaaagaagtagccaaacacccaaagaatcctgaggttggcttgaagcctgtgtggtatagtcccaaagttttcattgaaggtgctgatgcagagactttttcggagggtgagatggttacatttataaattggggcaacctcaacattacaaaaatacacaaaaatgcagatggaaaaatcatatctcttgatgcaaagttgaatttggaaaacaaagactacaagaaaaccactaaggtcacttggcttgcagagactacacatgctcttcctattccagtaatctgtgtcacttatgagcacttgatcacaaagccagtgctaggaaaagacgaggactttaagcagtatgtcaacaagaacagtaagcatgaagagctaatgctaggggatccctgccttaaggatttgaaaaaaggagatattatacaactccagagaagaggattcttcatatgtgatcaaccttatgaacctgttagcccatatagttgcaaggaagccccgtgtgttttgatatacattcctgatgggcacacaaaggaaatgccaacatcagggtcaaaggaaaagaccaaagtagaagccacaaaaaatgagacctctgctccttttaaggaaagaccaacaccttctctgaataataattgtactacatctgaggattccttggtcctttacaatagagtggctgttcaaggagatgtggttcgtgaattaaaagccaagaaagcaccaaaggaagatgtagatgcagctgtaaaacagcttttgtctttgaaagctgaatataaggagaaaactggccaggaatataaacctggaaaccctcctgctgaaataggacagaatatttcttctaattcctcagcaagtattctggaaagtaaatctctgtatgatgaagttgctgcacaaggggaggtggttcgtaagctaaaagctgaaaaatcccctaaggctaaaataaatgaagctgtagaatgcttactgtccctgaaggctcagtataaagaaaaaactgggaaggagtacatacctggtcagcccccattatctcaaagttcggattcaagcccaaccagaaattctgaacctgctggtttagaaacaccagaagcgaaagtactttttgacaaagtagcttctcaaggggaagtagttcggaaacttaaaactgaaaaagcccctaaggatcaagtagatatagctgttcaagaactccttcagctaaaggcacagtacaagtctttgataggagtagagtataagcctgtgtcggccactggagctgaggacaaagataagaagaagaaagaaaaagaaaataaatctgaaaagcagaataagcctcagaaacaaaatgatggccaaaggaaagacccttctaaaaaccaaggaggtgggctctcatcaagtggagcaggagaagggcaggggcctaagaaacagaccaggttgggtcttgaggcaaaaaaagaagaaaatcttgctgattggtattctcaggtcatcacaaagtcagaaatgattgaataccatgacataagtggctgttatattcttcgtccctgggcctatgccatttgggaagccatcaaggacttttttgatgctgagatcaagaaacttggtgttgaaaactgctacttccccatgtttgtgtctcaaagtgcattagagaaagagaagactcatgttgctgactttgccccagaggttgcttgggttacaagatctggcaaaaccgagctggcagaaccaattgccattcgtcctactagtgaaacagtaatgtatcctgcatatgcaaaatgggtacagtcacacagagacctgcccatcaagctcaatcagtggtgcaatgtggtgcgttgggaattcaagcatcctcagcctttcctacgtactcgtgaatttctttggcaggaagggcacagtgcttttgctaccatggaagaggcagcggaagaggtcttgcagatacttgacttatatgctcaggtatatgaagaactcctggcaattcctgttgttaaaggaagaaagacggaaaaggaaaaatttgcaggaggagactatacaactacaatagaagcatttatatctgctagtggaagagctatccagggaggaacatcacatcatttagggcagaatttttccaaaatgtttgaaatcgtttttgaagatccaaagataccaggagagaagcaatttgcctatcaaaactcctggggcctgacaactcgaactattggtgttatgaccatggttcatggggacaacatgggtttagtattaccaccccgtgtagcatgtgttcaggtggtgattattccttgtggcattaccaatgcactttctgaagaagacaaagaagcgctgattgcaaaatgcaatgattatcgaaggcgattactcagtgttaacatccgcgttagagctgatttacgagataattattctccaggttggaaattcaatcactgggagctcaagggagttcccattagacttgaagttgggccacgtgatatgaagagctgtcagtttgtagccgtcagacgagatactggagaaaagctgacagttgctgaaaatgaggcagagactaaacttcaagctattttggaagacatccaggtcacccttttcacaagggcttctgaagaccttaagactcatatggttgtggctaatacaatggaagactttcagaagatactagattctggaaagattgttcagattccattctgtggggaaattgactgtgaggactggatcaaaaagaccactgccagggatcaagatcttgaacctggtgctccatccatgggagctaaaagcctttgcatccccttcaaaccactctgtgaactgcagcctggagccaaatgtgtctgtggcaagaaccctgccaagtactacaccttatttggtcgcagctactgagggatgaacgaaagccccctcttcaactcctctcactttttaaagcattgatattagtatcttctcagatacagaccgttttatgattttttaaaaagtaaaagttctaaaatgaagtcacacaggacaattattcttatgcctaagttaacagtggataaaagacttttctgtaaacaactccagtaataaatatcatgaact

SEQ ID NO: 146326 - DNA, 5034 bp, Artificial Sequence
  derived and/or modified sequence
agcacgaaaggccacgcaggccgttctaaccctggcggccaagaggaggggtagcaggctctggaacctgcgggcggggacgaagacggcgcgcgacgatgtcgcaccgcggcgtgcgcggtgtcggcagtagctgcggcgcaggggcggagcgaaggctgcggcggcgtcgggtacgcgcacacgttgcatcttcttcctttcgcggggtcctccgtagttctggcacgagccaggcgtactgacaggtggaccagcggactggtggagatggcgacgctctctctgaccgtgaattcaggagaccctccgctaggagctttgctggcagtagaacacgtgaaagacgatgtcagcatttccgttgaagaagggaaagagaatattcttcatgtttctgaaaatgtgatattcacagatgtgaattctatacttcgctacttggctagagttgcaactacagctgggttatatggctctaatctgatggaacatactgagattgatcactggttggagttcagtgctacaaaattatcttcatgtgattcctttacttctacaattaatgaactcaatcattgcctgtctctgagaacatacttagttggaaactccttgagtttagcagatttatgtgtttgggccaccctaaaaggaaatgctgcctggcaagaacagttgaaacagaagaaagctccagttcatgtaaaacgttggtttggctttcttgaagcccagcaggccttccagtcagtaggtaccaagtgggatgtttcaacaaccaaagctcgagtggcacctgagaaaaagcaagatgttgggaaatttgttgagcttccaggtgcggagatgggaaaggttaccgtcagatttcctccagaggccagtggttacttacacattgggcatgcaaaagctgctcttctgaaccagcactaccaggttaactttaaagggaaactgatcatgagatttgatgacacaaatcctgaaaaagaaaaggaagattttgagaaggttatcttggaagatgttgcaatgttgcatatcaaaccagatcaatttacttatacttcggatcattttgaaactataatgaagtatgcagagaagctaattcaagaagggaaggcttatgtggatgatactcctgctgaacagatgaaagcagaacgtgagcagaggatagactctaaacatagaaaaaaccctattgagaagaatctacaaatgtgggaagaaatgaaaaaagggagccagtttggtcagtcctgttgtttgcgagcaaaaattgacatgagtagtaacaatggatgcatgagagatccaaccctttatcgctgcaaaattcaaccacatccaagaactggaaataaatacaatgtttatccaacatatgattttgcctgccccatagttgacagcatcgaaggtgttacacatgccctgagaacaacagaataccatgacagagatgagcagttttactggattattgaagctttaggcataagaaaaccatatatttgggaatatagtcggctaaatctcaacaacacagtgctatccaaaagaaaactcacatggtttgtcaatgaaggactagtagatggatgggatgacccaagatttcctacggttcgtggtgtactgagaagagggatgacagttgaaggactgaaacagtttattgctgctcagggctcctcacgttcagtcgtgaacatggagtgggacaaaatctgggcgtttaacaaaaagctgcgagctctctgtaagaaggttattgacccagtggctccacgatatgttgcattactgaagaaagaagtgatcccagtgaatgtacctgaagctcaggaggagatgaaagaagtagccaaacacccaaagaatcctgaggttggcttgaagcctgtgtggtatagtcccaaagttttcattgaaggtgctgatgcagagactttttcggagggtgagatggttacatttataaattggggcaacctcaacattacaaaaatacacaaaaatgcagatggaaaaatcatatctcttgatgcaaagttgaatttggaaaacaaagactacaagaaaaccactaaggtcacttggcttgcagagactacacatgctcttcctattccagtaatctgtgtcacttatgagcacttgatcacaaagccagtgctaggaaaagacgaggactttaagcagtatgtcaacaagaacagtaagcatgaagagctaatgctaggggatccctgccttaaggatttgaaaaaaggagatattatacaactccagagaagaggattcttcatatgtgatcaaccttatgaacctgttagcccatatagttgcaaggaagccccgtgtgttttgatatacattcctgatgggcacacaaaggaaatgccaacatcagggtcaaaggaaaagaccaaagtagaagccacaaaaaatgagacctctgctccttttaaggaaagaccaacaccttctctgaataataattgtactacatctgaggattccttggtcctttacaatagagtggctgttcaaggagatgtggttcgtgaattaaaagccaagaaagcaccaaaggaagatgtagatgcagctgtaaaacagcttttgtctttgaaagctgaatataaggagaaaactggccaggaatataaacctggaaaccctcctgctgaaataggacagaatatttcttctaattcctcagcaagtattctggaaagtaaatctctgtatgatgaagttgctgcacaaggggaggtggttcgtaagctaaaagctgaaaaatcccctaaggctaaaataaatgaagctgtagaatgcttactgtccctgaaggctcagtataaagaaaaaactgggaaggagtacatacctggtcagcccccattatctcaaagttcggattcaagcccaaccagaaattctgaacctgctggtttagaaacaccagaagcgaaagtactttttgacaaagtagcttctcaaggggaagtagttcggaaacttaaaactgaaaaagcccctaaggatcaagtagatatagctgttcaagaactccttcagctaaaggcacagtacaagtctttgataggagtagagtataagcctgtgtcggccactggagctgaggacaaagataagaagaagaaagaaaaagaaaataaatctgaaaagcagaataagcctcagaaacaaaatgatggccaaaggaaagacccttctaaaaaccaaggaggtgggctctcatcaagtggagcaggagaagggcaggggcctaagaaacagaccaggttgggtcttgaggcaaaaaaagaagaaaatcttgctgattggtattctcaggtcatcacaaagtcagaaatgattgaataccatgacataagtggctgttatattcttcgtccctgggcctatgccatttgggaagccatcaaggacttttttgatgctgagatcaagaaacttggtgttgaaaactgctacttccccatgtttgtgtctcaaagtgcattagagaaagagaagactcatgttgctgactttgccccagaggttgcttgggttacaagatctggcaaaaccgagctggcagaaccaattgccattcgtcctactagtgaaacagtaatgtatcctgcatatgcaaaatgggtacagtcacacagagacctgcccatcaagctcaatcagtggtgcaatgtggtgcgttgggaattcaagcatcctcagcctttcctacgtactcgtgaatttctttggcaggaagggcacagtgcttttgctaccatggaagaggcagcggaagaggtcttgcagatacttgacttatatgctcaggtatatgaagaactcctggcaattcctgttgttaaaggaagaaagacggaaaaggaaaaatttgcaggaggagactatacaactacaatagaagcatttatatctgctagtggaagagctatccagggaggaacatcacatcatttagggcagaatttttccaaaatgtttgaaatcgtttttgaagatccaaagataccaggagagaagcaatttgcctatcaaaactcctggggcctgacaactcgaactattggtgttatgaccatggttcatggggacaacatgggtttagtattaccaccccgtgtagcatgtgttcaggtggtgattattccttgtggcattaccaatgcactttctgaagaagacaaagaagcgctgattgcaaaatgcaatgattatcgaaggcgattactcagtgttaacatccgcgttagagctgatttacgagataattattctccaggttggaaattcaatcactgggagctcaagggagttcccattagacttgaagttgggccacgtgatatgaagagctgtcagtttgtagccgtcagacgagatactggagaaaagctgacagttgctgaaaatgaggcagagactaaacttcaagctattttggaagacatccaggtcacccttttcacaagggcttctgaagaccttaagactcatatggttgtggctaatacaatggaagactttcagaagatactagattctggaaagattgttcagattccattctgtggggaaattgactgtgaggactggatcaaaaagaccactgccagggatcaagatcttgaacctggtgctccatccatgggagctaaaagcctttgcatccccttcaaaccactctgtgaactgcagcctggagccaaatgtgtctgtggcaagaaccctgccaagtactacaccttatttggtcgcagctactgagggatgaacgaaagccccctcttcaactcctctcactttttaaagcattgatattagtatcttctcagatacagaccgttttatgattttttaaaaagtaaaagttctaaaatgaagtcacacaggacaattattcttatgcctaagttaacagtggataaaagacttttctgtaaacaactccagtaataaatatcatgaact

SEQ ID NO: 146327 - DNA, 4539 bp, Artificial Sequence
  derived and/or modified sequence
atggccaccctgagcctgactgtgaacagcggggacccccccctgggcgccctgctggccgtggagcacgtgaaggatgatgtgtccatctctgtggaggagggcaaggagaacatcctgcacgtgtctgaaaatgtcatcttcacagatgtgaacagcatcctgcgctacctggcccgggtggccaccacagctggcctgtatggcagcaacctgatggagcacacagaaattgaccactggctggagttcagcgccaccaagctgagcagctgtgacagcttcaccagcaccatcaatgagctgaaccactgcctgagcctgcggacctacctggtgggcaacagcctgagcctggccgacctgtgtgtgtgggccaccctgaagggaaatgctgcctggcaggagcagctgaagcagaagaaggcccctgtgcacgtgaagcgctggtttggcttcctggaggcccagcaggccttccagagcgtgggcaccaagtgggatgtgtccaccaccaaggcccgggtggcccctgagaagaagcaggatgtgggcaagtttgtggagctgcctggagctgagatgggcaaggtgacagtgcgcttccccccagaggccagcggctacctgcacatcggccacgccaaggccgccctgctgaaccagcactaccaggtgaacttcaagggcaagctgatcatgagatttgatgacaccaaccctgagaaggagaaggaggactttgagaaggtgatcctggaggatgtggccatgctgcacatcaagccagaccagttcacctacaccagtgaccactttgagaccatcatgaagtatgcagagaagctgatccaggagggcaaggcctacgtggatgacaccccagctgagcagatgaaggccgagcgggagcagagaattgacagcaagcacaggaagaaccccatcgagaagaacctgcagatgtgggaggagatgaagaagggcagccagtttggccagagctgctgcctgcgggccaagattgacatgagcagcaacaacggctgcatgagggaccccaccctgtaccgctgcaagatccagccccaccccaggactggaaacaagtacaacgtgtaccccacctatgactttgcctgccccatcgtggacagcattgaaggagtgacccacgccctgcggaccacagagtaccatgacagagatgagcagttctactggatcatcgaggccctgggcatcaggaagccctacatctgggagtacagccggctgaacctgaacaacacagtgctgagcaagaggaagctgacctggtttgtgaatgaaggcctggtggatggctgggatgacccccgcttccccaccgtgcggggcgtgctgcggcggggcatgacagtggagggcctgaagcagttcatcgccgcccagggcagcagccgctctgtggtgaacatggagtgggacaagatctgggccttcaacaagaaggtgattgatcctgtggcccccaggtatgtggccctgctgaagaaggaggtgattcctgtgaatgtgcctgaggcccaggaggagatgaaggaggtggccaagcaccccaagaaccctgaggtgggcctgaagcctgtgtggtacagccccaaggtgttcatcgagggcgcagatgctgagaccttcagcgagggggagatggtgaccttcatcaactggggcaacctgaacatcaccaagatccacaagaatgctgatggcaagatcatcagcctggatgccaagctgaacctggagaacaaggactacaagaagaccaccaaggtgacctggctggccgagaccacccacgccctgcccatccctgtgatctgtgtgacctatgagcacctgatcaccaagcctgtgctgggcaaggatgaggacttcaagcagtatgtgaacaagaacagcaagcatgaggagctgatgctgggggacccctgcctgaaggacctgaagaagggggacatcatccagctgcagaggcggggcttcttcatctgtgaccagccctatgagcctgtgagcccctacagctgcaaggaggccccctgtgtgctgatctacatcccagatggccacaccaaggagatgcccaccagcggcagcaaggagaagaccaaggtggaggccaccaagaatgagaccagcgcccccttcaaggagcggcccacccccagcctgaacaacaactgcaccaccagcgaggacagcctggtgctgtacaacagagtggccgtgcagggagatgtggtgcgggagctgaaggccaagaaggcccccaaggaggatgtggatgctgctgtgaagcagctgctgagcctgaaggccgagtacaaggagaagacaggccaggagtacaagccaggcaaccccccagctgagatcggccagaacatcagcagcaacagcagcgccagcatcctggagagcaagagcctgtatgatgaggtggccgcccagggcgaggtggtgaggaagctgaaggccgagaagagccccaaggccaagatcaatgaagctgtggagtgcctgctgagcctgaaggcccagtacaaggagaagacaggcaaggagtacatccctggccagccccccctgagccagagcagtgacagcagccccaccagaaattctgagcccgccggcctggagaccccagaggccaaggtgctgtttgacaaggtggccagccagggcgaggtggtgaggaagctgaagacagagaaggcccccaaggaccaggtggacattgctgtgcaggagctgctgcagctgaaggcccagtacaagagcctcatcggcgtggagtacaagcctgtgtctgccaccggggctgaggacaaggacaagaagaagaaggagaaggagaacaagtctgagaagcagaacaagccccagaagcagaatgatggccagaggaaggaccccagcaagaaccagggcggcggcctgagcagcagcggggccggggagggccagggccccaagaagcagacccggctgggcctggaggccaagaaggaggagaacctggccgactggtacagccaggtgatcaccaagtctgagatgattgagtaccatgacatcagcggctgctacatcctgcggccctgggcctatgccatctgggaggccatcaaggacttctttgatgctgagatcaagaagctgggcgtggagaactgctacttccccatgtttgtgtcccagagcgccctggagaaggagaagacccacgtggccgactttgcccctgaggtggcctgggtgaccaggtctgggaagacagagctggccgagcccatcgccatccggcccaccagcgagaccgtgatgtacccagcctatgccaagtgggtgcagagccaccgggacctgcccatcaagctgaaccagtggtgcaatgtggtgcgctgggagttcaagcacccccagcccttcctgcggacccgggagttcctgtggcaggagggccacagcgcctttgccaccatggaggaggccgctgaggaggtgctgcagatcctggacctgtatgcccaggtgtatgaggagctgctggccatccctgtggtgaagggcaggaagacagagaaggagaagtttgctggaggagactacaccaccaccatcgaggccttcatcagcgccagcggccgggccatccagggcggcaccagccaccacctgggccagaacttcagcaagatgtttgagatcgtgtttgaggaccccaagatccctggagagaagcagtttgcctaccagaacagctggggcctgaccaccaggaccatcggcgtgatgaccatggtgcatggagacaacatgggcctggtgctgcccccccgggtggcctgtgtgcaggtggtgatcatcccctgtggcatcaccaatgccctgtctgaggaggacaaggaggccctgattgccaagtgcaatgactacagaagaaggctgctgtctgtgaacatccgggtgcgggctgacctgcgggacaactacagccctggctggaagttcaaccactgggagctgaagggcgtgcccatccggctggaggtgggcccccgggacatgaagagctgccagtttgtggccgtgagaagagacaccggggagaagctgactgtggccgagaatgaagctgagaccaagctgcaggccatcctggaggacatccaggtgaccctcttcacccgggccagcgaggacctgaagacccacatggtggtggccaacaccatggaggacttccagaagatcctggacagcggcaagatcgtgcagatccccttctgtggggagattgactgtgaggactggatcaagaagaccacagcccgggaccaggacctggagcccggggcccccagcatgggcgccaagagcctgtgcatccccttcaagcccctgtgtgagctgcagcccggggccaagtgtgtgtgtgggaagaacccagccaagtactacaccctgtttggccgcagctactag

SEQ ID NO: 146328 - DNA, 2964 bp, Artificial Sequence
  derived and/or modified sequence
atggccaccctgagcctgactgtgaacagcggggacccccccctgggcgccctgctggccgtggagcacgtgaaggatgatgtgtccatctctgtggaggagggcaaggagaacatcctgcacgtgtctgaaaatgtcatcttcacagatgtgaacagcatcctgcgctacctggcccgggtggccaccacagctggcctgtatggcagcaacctgatggagcacacagaaattgaccactggctggagttcagcgccaccaagctgagcagctgtgacagcttcaccagcaccatcaatgagctgaaccactgcctgagcctgcggacctacctggtgggcaacagcctgagcctggccgacctgtgtgtgtgggccaccctgaagggaaatgctgcctggcaggagcagctgaagcagaagaaggcccctgtgcacgtgaagcgctggtttggcttcctggaggcccagcaggccttccagagcgtgggcaccaagtgggatgtgtccaccaccaaggcccgggtggcccctgagaagaagcaggatgtgggcaagtttgtggagctgcctggagctgagatgggcaaggtgacagtgcgcttccccccagaggccagcggctacctgcacatcggccacgccaaggccgccctgctgaaccagcactaccaggtgaacttcaagggcaagctgatcatgagatttgatgacaccaaccctgagaaggagaaggaggactttgagaaggtgatcaagtctgtggtgatgaccctgtgccagaagagcatcaaggtgacaggcctgcccaacaccttcatggtgatcctggaggatgtggccatgctgcacatcaagccagaccagttcacctacaccagtgaccactttgagaccatcatgaagtatgcagagaagctgatccaggagggcaaggcctacgtggatgacaccccagctgagcagatgaaggccgagcgggagcagagaattgacagcaagcacaggaagaaccccatcgagaagaacctgcagatgtgggaggagatgaagaagggcagccagtttggccagagctgctgcctgcgggccaagattgacatgagcagcaacaacggctgcatgagggaccccaccctgtaccgctgcaagatccagccccaccccaggactggaaacaagtacaacgtgtaccccacctatgactttgcctgccccatcgtggacagcattgaaggagtgacccacgccctgcggaccacagagtaccatgacagagatgagcagttctactggatcatcgaggccctgggcatcaggaagccctacatctgggagtacagccggctgaacctgaacaacacagtgctgagcaagaggaagctgacctggtttgtgaatgaaggcctggtggatggctgggatgacccccgcttccccaccgtgcggggcgtgctgcggcggggcatgacagtggagggcctgaagcagttcatcgccgcccagggcagcagccgctctgtggtgaacatggagtgggacaagatctgggccttcaacaagaaggtgattgatcctgtggcccccaggtatgtggccctgctgaagaaggaggtgattcctgtgaatgtgcctgaggcccaggaggagatgaaggaggtggccaagcaccccaagaaccctgaggtgggcctgaagcctgtgtggtacagccccaaggtgttcatcgagggcgcagatgctgagaccttcagcgagggggagatggtgaccttcatcaactggggcaacctgaacatcaccaagatccacaagaatgctgatggcaagatcatcagcctggatgccaagctgaacctggagaacaaggactacaagaagaccaccaaggtgacctggctggccgagaccacccacgccctgcccatccctgtgatctgtgtgacctatgagcacctgatcaccaagcctgtgctgggcaaggatgaggacttcaagcagtatgtgaacaagaacagcaagcatgaggagctgatgctgggggacccctgcctgaaggacctgaagaagggggacatcatccagctgcagaggcggggcttcttcatctgtgaccagccctatgagcctgtgagcccctacagctgcaaggaggccccctgtgtgctgatctacatcccagatggccacaccaaggagatgcccaccagcggcagcaaggagaagaccaaggtggaggccaccaagaatgagaccagcgcccccttcaaggagcggcccacccccagcctgaacaacaactgcaccaccagcgaggacagcctggtgctgtacaacagagtggccgtgcagggagatgtggtgcgggagctgaaggccaagaaggcccccaaggaggatgtggatgctgctgtgaagcagctgctgagcctgaaggccgagtacaaggagaagacaggccaggagtacaagccaggcaaccccccagctgagatcggccagaacatcagcagcaacagcagcgccagcatcctggagagcaagagcctgtatgatgaggtggccgcccagggcgaggtggtgaggaagctgaaggccgagaagagccccaaggccaagatcaatgaagctgtggagtgcctgctgagcctgaaggcccagtacaaggagaagacaggcaaggagtacatccctggccagccccccctgagccagagcagtgacagcagccccaccagaaattctgagcccgccggcctggagaccccagaggccaaggtgctgtttgacaaggtggccagccagggcgaggtggtgaggaagctgaagacagagaaggcccccaaggaccaggtggacattgctgtgcaggagctgctgcagctgaaggcccagtacaagagcctcatcggcgtggagtacaagcctgtgtctgccaccggggctgaggacaaggacaagtag

SEQ ID NO: 146329 - DNA, 2928 bp, Artificial Sequence
  derived and/or modified sequence
atggccaccctgagcctgactgtgaacagcggggacccccccctgggcgccctgctggccgtggagcacgtgaaggatgatgtgtccatctctgtggaggagggcaaggagaacatcctgcacgtgtctgaaaatgtcatcttcacagatgtgaacagcatcctgcgctacctggcccgggtggccaccacagctggcctgtatggcagcaacctgatggagcacacagaaattgaccactggctggagttcagcgccaccaagctgagcagctgtgacagcttcaccagcaccatcaatgagctgaaccactgcctgagcctgcggacctacctggtgggcaacagcctgagcctggccgacctgtgtgtgtgggccaccctgaagggaaatgctgcctggcaggagcagctgaagcagaagaaggcccctgtgcacgtgaagcgctggtttggcttcctggaggcccagcaggccttccagagcgtgggcaccaagtgggatgtgtccaccaccaaggcccgggtggcccctgagaagaagcaggatgtgggcaagtttgtggagctgcctggagctgagatgggcaaggtgacagtgcgcttccccccagaggccagcggctacctgcacatcggccacgccaaggccgccctgctgaaccagcactaccaggtgaacttcaagggcaagctgatcatgagatttgatgacaccaaccctgagaaggagaaggaggactttgagaaggtgatcctggaggatgtggccatgctgcacatcaagccagaccagttcacctacaccagtgaccactttgagaccatcatgaagtatgcagagaagctgatccaggagggcaaggcctacgtggatgacaccccagctgagcagatgaaggccgagcgggagcagagaattgacagcaagcacaggaagaaccccatcgagaagaacctgcagatgtgggaggagatgaagaagggcagccagtttggccagagctgctgcctgcgggccaagattgacatgagcagcaacaacggctgcatgagggaccccaccctgtaccgctgcaagatccagccccaccccaggactggaaacaagtacaacgtgtaccccacctatgactttgcctgccccatcgtggacagcattgaaggagtgacccacgccctgcggaccacagagtaccatgacagagatgagcagttctactggatcatcgaggccctgggcatcaggaagccctacatctgggagtacagccggctgaacctgaacaacacagtgctgagcaagaggaagctgacctggtttgtgaatgaaggcctggtggatggctgggatgacccccgcttccccaccgtgcggggcgtgctgcggcggggcatgacagtggagggcctgaagcagttcatcgccgcccagggcagcagccgctctgtggtgaacatggagtgggacaagatctgggccttcaacaagaagctgcgggccctgtgcaagaaggtgattgatcctgtggccccccgctacgtggccctgctgaagaaggaggtgattcctgtgaatgtgcctgaggcccaggaggagatgaaggaggtggccaagcaccccaagaaccctgaggtgggcctgaagcctgtgtggtacagccccaaggtgttcattgaaggagcagatgctgagaccttcagcgagggggagatggtgaccttcatcaactggggcaacctgaacatcaccaagatccacaagaatgctgatggcaagatcatcagcctggatgccaagctgaacctggagaacaaggactacaagaagaccaccaaggtgacctggctggccgagaccacccacgccctgcccatccctgtgatctgtgtgacctatgagcacctgatcaccaagcctgtgctgggcaaggatgaggacttcaagcagtatgtgaacaagaacagcaagcatgaggagctgatgctgggggacccctgcctgaaggacctgaagaagggggacatcatccagctgcagaggcggggcttcttcatctgtgaccagccctatgagcctgtgagcccctacagctgcaaggaggccccctgtgtgctgatctacatcccagatggccacaccaaggagatgcccaccagcggcagcaaggagaagaccaaggtggaggccaccaagaatgagaccagcgcccccttcaaggagcggcccacccccagcctgaacaacaactgcaccaccagcgaggacagcctggtgctgtacaacagagtggccgtgcagggagatgtggtgcgggagctgaaggccaagaaggcccccaaggaggatgtggatgctgctgtgaagcagctgctgagcctgaaggccgagtacaaggagaagacaggccaggagtacaagccaggcaaccccccagctgagatcggccagaacatcagcagcaacagcagcgccagcatcctggagagcaagagcctgtatgatgaggtggccgcccagggcgaggtggtgaggaagctgaaggccgagaagagccccaaggccaagatcaatgaggccgtggagtgcctgctgagcctgaaggcccagtacaaggagaagacaggcaaggagtacatccctggccagccccccctgagccagagcagtgacagcagccccaccaggaacagcgagcctgctggcctggagaccccagaggccaaggtgctgtttgacaaggtggccagccagggcgaggtggtgaggaagctgaagacagagaaggcccccaaggaccaggtggacattgctgtgcaggagctgctgcagctgaaggcccagtacaagagcctgattggagtggagtacaagcctgtgtctgccactggagctgaggacaaggacaagaagaagaaggagaagtag

SEQ ID NO: 146330 - DNA, 4539 bp, Artificial Sequence
  derived and/or modified sequence
atggccaccctgagcctgaccgtgaacagcggcgacccccccctgggcgctttactggcagtagaacacgtcaaagatgacgtcagcatcagtgttgaggaggggaaagaaaacatcttacatgtgtccgagaacgtgattttcaccgatgtcaatagcattctgagatacctggcaagggtggccaccacagcgggcttgtatggctccaatctgatggaacacacggagatcgatcactggctggaatttagtgccacaaagctgtcctcttgcgattcttttacatccacgattaatgagctcaaccactgcctgtccctccggacctatctggtggggaacagtttgagcctggcagatctttgtgtttgggccacccttaaggggaacgctgcctggcaggagcagttaaagcagaaaaaggcgcctgtgcatgtgaaacgttggttcggcttccttgaggctcagcaggccttccaatcggtgggtactaagtgggatgtcagtaccactaaagccagggtagcccccgaaaaaaagcaggatgttggcaagttcgtggaactgcccggcgctgagatgggcaaggtgactgtgaggtttcccccagaggcttccggttatctacatattggtcacgccaaggccgccctgctgaaccagcattaccaggtgaacttcaaaggcaaactgataatgagatttgacgacacaaacccagaaaaagaaaaggaagattttgagaaagtgatcctggaggatgttgcgatgctgcacatcaagcctgaccagtttacctatacgtccgatcacttcgagaccatcatgaagtacgccgagaagctgattcaagagggcaaggcttatgtggatgatactccagcagaacagatgaaagctgagagggagcagagaattgacagtaagcaccgcaagaaccctattgagaagaacttacaaatgtgggaggagatgaagaaaggctcgcagttcggccagagctgttgtcttcgggctaagattgatatgagtagtaataacggctgtatgcgagacccaacgctgtacaggtgtaaaattcagccacatccccggacagggaacaaatacaatgtctatccaacctacgatttcgcctgtccgatcgtggacagtattgagggcgtcacgcacgcgctgcgcactaccgagtaccacgaccgcgatgaacagttctattggattattgaggcacttggcataagaaaaccctatatctgggagtatagtcgcttaaacttgaataatacggttcttagtaagaggaagcttacttggttcgtgaatgagggcctcgtagacggttgggacgatccgcgttttcccactgtgcgcggcgtgcttcggcggggcatgacagtggaggggctgaagcaattcatagcggctcagggaagcagccggtcagtggtgaatatggaatgggacaagatttgggccttcaacaagaaggttattgaccccgtggcccctcggtacgtggcactgctcaaaaaggaagtgatccctgtcaacgttccagaggctcaggaagagatgaaggaagtagctaaacaccctaaaaatccagaggtgggcctaaaaccggtttggtactcacccaaagtgttcattgaaggtgctgacgctgaaactttctccgagggtgaaatggttacattcattaactggggtaacctcaatataactaagatacataagaatgccgacgggaagattatttcactagacgctaaattgaacctggagaataaagactacaaaaagacaaccaaggtcacctggctggctgaaaccacgcacgccttgcccattcccgtgatttgcgtcacttacgagcacctcatcaccaagcctgtgctcggaaaggacgaggactttaaacagtatgttaataaaaattccaaacacgaagagttgatgctcggcgacccctgcttgaaggatctgaagaaaggagatattattcagctgcagcggcgcggtttttttatctgcgatcagccatatgagcccgtcagtccctactcatgtaaagaagccccgtgtgtcctgatctacatccctgacggccacactaaggagatgccgacatcaggcagcaaggagaagacaaaagtggaagccaccaagaatgaaacaagcgctcccttcaaagaaaggcccacgccgtcactaaataataactgcacgacttcggaggatagtctggtgctatacaatagagtcgccgttcagggtgatgtcgttagagagttgaaagctaagaaggcgcccaaggaggatgtcgatgctgctgtgaagcagctcttgtccctcaaagctgaatacaaagagaaaacgggccaagagtacaagcccggaaatcctccagccgagatcggacagaatatttcttcaaattcaagcgcatccatccttgaatccaaaagtctctatgacgaagtggctgcgcaaggcgaggtcgtgcggaaactcaaagctgagaaatcacccaaggctaagatcaatgaggcagtggaatgcttgctgtccctcaaggcgcagtacaaagaaaagactgggaaagagtacattcccggtcaaccgcctctgagccaatcatcagacagctcacctacaaggaactcagagcccgctgggctcgagacgccagaggccaaggttctgtttgacaaagttgcctctcagggagaagtggtgcgcaaactgaagacagaaaaagctcccaaagaccaggtggacatcgctgtgcaggaactcctgcagttgaaggcacaatacaagtctctgatcggggtagagtataaacccgtgtccgccaccggggcggaggataaggacaaaaaaaaaaaggagaaagagaacaaaagtgagaaacagaataagccccaaaaacaaaatgatggccagcggaaggatccctctaagaaccaaggtggaggcttatccagttccggggcgggggaggggcaaggtccaaagaaacagacgcggctcggacttgaagcaaaaaaggaggagaatctggcagattggtacagccaggtgataacaaaaagtgagatgattgaatatcacgatatctcagggtgttatatcttaaggccttgggcctacgccatttgggaggccataaaggatttctttgacgccgagatcaagaagctgggagtggagaattgttatttccccatgttcgtgtctcaaagcgcactcgaaaaagaaaagactcacgtagcagattttgctcccgaggtggcgtgggtgaccaggtccggcaagaccgagcttgctgaacccatagccatcagaccgacctcagagaccgtcatgtacccagcttatgcaaagtgggtgcaatcacaccgggacctgcctatcaaactgaatcagtggtgtaatgtggtgagatgggagtttaaacatccccagccattcttgaggacaagagagtttctttggcaagagggacactccgctttcgctaccatggaggaagctgccgaggaggtgctccagatacttgatctctacgcccaagtctacgaggaacttctggccatcccagtggttaaaggaagaaagacagaaaaggagaaatttgcaggaggtgactatactaccaccatagaggcatttatctcggcctcgggcagggctatccaaggggggacgtctcaccatctggggcaaaattttagcaagatgtttgagattgtcttcgaggaccccaaaatcccgggcgagaagcagttcgcctatcaaaacagttggggcctgaccacacgcacgatcggagttatgacaatggtgcatggcgacaatatgggccttgtgttgcctccacgcgtcgcttgcgtccaagtggtgataatcccttgtgggatcacaaacgctctgagcgaggaagacaaagaggcactgatcgccaagtgcaacgactataggcgacgtctgctctcagtaaatatcagagtccgggccgatctgagagacaactatagcccgggatggaaattcaaccactgggaactgaagggcgtcccaattagactcgaagtgggtccaagggacatgaagagttgccagtttgtggcagtcaggcgagacacaggtgaaaagcttaccgtcgctgaaaatgaagcagagacaaagctccaagccatcctggaggacatccaggtgaccctcttcacccgcgcaagcgaggatttaaaaacacacatggttgtggctaacaccatggaggatttccaaaaaattcttgacagcgggaaaatcgtccagatacctttttgtggagagatagattgcgaagactggatcaaaaagaccactgctcgggatcaggatctggagcctggcgcgccatctatgggtgctaagagtctttgtattcccttcaagcccctatgcgagctgcagcccggggccaagtgtgtgtgtggcaaaaatcccgcaaaatactatactctgtttgggcgctcctattag

SEQ ID NO: 146331 - DNA, 2964 bp, Artificial Sequence
  derived and/or modified sequence
atggccaccctgagcctgaccgtgaacagcggcgacccccccctgggggctctcctcgctgtggagcatgtaaaggacgatgtcagcatctctgtggaggaaggaaaggagaacatcttgcatgtaagcgaaaatgtcattttcacggatgtaaactctattttacggtatctggctcgcgttgcaaccacggctgggctttatggaagcaacttgatggagcatacggagatcgaccattggttagagttttctgccaccaaacttagttcatgcgactccttcacctctactatcaacgagctgaatcattgcctatccctgcgcacgtatctggtcggcaatagtctgtctctggccgatctctgcgtctgggcaactttaaagggtaatgcagcctggcaggagcagctgaagcagaagaaggcccctgttcatgtgaaaagatggttcggcttcttagaagcacagcaagcatttcagtcggtcggcaccaaatgggacgtcagcacaaccaaggctcgcgtggcgccagaaaagaagcaggatgtgggcaagtttgtcgagctacccggcgccgaaatggggaaggtgactgtgagattccccccagaagccagcggttacctgcacataggccatgcaaaggctgctcttctcaaccaacactaccaagtaaatttcaaggggaagcttattatgagattcgatgatacgaatcctgaaaaggagaaggaagactttgagaaggtgattaagagcgtcgtgatgacgttgtgtcagaagtccattaaggtgaccggcttgcccaacacatttatggtgatcctggaggacgtcgcaatgctgcatattaagcccgaccagttcacgtacacttctgatcacttcgagaccattatgaaatatgccgaaaagctcatccaggaggggaaagcctatgtcgatgatacgcccgccgaacagatgaaggctgaacgagagcagagaatcgatagcaagcacagaaagaatcccattgagaagaatcttcagatgtgggaagagatgaagaaaggttctcagttcggtcagtcctgttgtctgcgcgcaaaaattgacatgtccagcaacaatgggtgcatgcgggaccccaccctgtacaggtgcaagatacaaccccatcccagaaccggaaataagtataatgtttatcccacatatgatttcgcctgccccattgtcgactctatcgaaggcgtgacgcatgcacttcgcactacggagtatcatgatagggatgagcaattctactggatcattgaagctctgggaattcggaagccctatatctgggagtattctaggctgaacttgaataatacagtcctctctaagcggaagctgacctggttcgtaaatgaaggacttgtggatggctgggatgatccaagattcccgaccgtgcggggagtccttcgccgagggatgaccgtggagggtttgaagcagtttatagccgcccagggctcctcacggagcgtggtgaacatggaatgggacaagatatgggccttcaataaaaaagtgatcgacccggtcgctccccggtacgtagccctgctgaaaaaggaagtgatcccggtgaatgtaccggaagcccaggaggagatgaaggaggtcgccaaacacccgaagaatcccgaagtggggctcaagcccgtttggtattcacctaaggtgttcattgaaggagctgacgctgagacattctctgagggggaaatggtgacctttattaactggggtaacctgaatataactaagatccataaaaatgccgacggcaagattatttcactggatgctaagctgaatttagagaataaggactataagaagactacgaaggtcacctggctggccgagacaactcacgccctgccaatacccgtgatttgtgtgacctatgaacatctgataacgaagcccgtgctggggaaggacgaagacttcaaacaatacgtgaataaaaacagcaaacatgaggaactaatgcttggcgacccctgcctcaaagacctcaagaaaggcgatattattcagctgcagaggcgtggctttttcatatgcgatcagccatacgaaccggtgagcccttacagttgtaaagaggcgccctgtgttctcatttacatcccagacggccataccaaagagatgcccacttccggatcaaaagaaaagacaaaggtggaggcaacgaaaaatgaaacatccgccccatttaaggagagaccaacacctagtctgaataacaactgcaccacctcagaggattccctagtcctgtacaaccgtgttgctgtccagggcgatgttgtaagggagctgaaagccaaaaaggcaccaaaagaggacgtggacgccgcagtgaagcagctcttgtcattgaaagctgaatataaagagaaaaccgggcaggagtacaagcccggcaaccctcctgctgaaattggccagaacatcagcagcaattcatcggcctccatcctcgagtctaagtctctgtatgacgaggtggcagctcagggtgaggttgttcgcaaactgaaggcagaaaaatctcccaaagcgaagattaacgaggcggtggaatgtctgctgtctcttaaggcccaatacaaggagaagactgggaaggagtacattccaggccagccccctttgtcgcagtcaagcgactctagccctactcggaatagcgaaccagcagggttggagaccccagaggccaaagtcctgttcgataaggttgcttctcagggggaagtggtgcgaaaactgaagaccgagaaagcccctaaggaccaagttgacatagccgtacaggaactcctgcaacttaaggcccagtacaaatccctgatcggcgtcgagtacaagccagtttccgcaactggagctgaagacaaggataaatag

SEQ ID NO: 146332 - DNA, 2928 bp, Artificial Sequence
  derived and/or modified sequence
atggccaccctgagcctgaccgtgaacagcggcgacccccccctgggggcccttctggccgtggagcatgttaaagacgatgtgtccatttcggtggaggaaggcaaagagaatatcctccacgtgagtgaaaatgtaatcttcactgacgtcaattccatccttcggtaccttgctcgagttgccacaacagctgggctgtatggttcaaatctgatggagcacacagaaattgaccattggttggaattcagtgcgaccaaactgtcctcgtgcgattctttcacgtctacgatcaatgagttaaaccactgcctgtccctgaggacctaccttgtcgggaactccctgtccctagccgacctgtgcgtttgggctaccttaaagggaaacgctgcttggcaggaacagttgaagcagaagaaggccccagtccatgtcaaaagatggttcggttttttggaagcacagcaggcgtttcaatccgttggaaccaagtgggacgtcagcaccacaaaagctcgcgtggctccggagaagaagcaggacgtgggcaagttcgtggagttacccggtgccgagatggggaaagtgacagtccggtttcctccggaggcttccggctatctacacattggacacgcaaaggccgcattgctcaatcagcactatcaggtcaattttaagggcaagttaatcatgcgatttgacgatacaaacccagaaaaggaaaaggaggacttcgaaaaggtgatcttagaagacgtggctatgctccatatcaagccagatcagtttacttacacttcagatcattttgagactatcatgaaatatgcggagaaacttatccaagagggaaaggcctatgtcgacgacaccccggcagagcagatgaaagctgagcgtgagcaaaggattgactccaaacacagaaagaatcctattgaaaagaacctgcaaatgtgggaagaaatgaagaaagggagtcagttcgggcagtcttgctgcttacgggcgaaaatagacatgtcttcaaacaatggctgtatgcgcgaccctactctgtaccggtgcaaaattcagccccacccaagaaccggcaataagtataacgtgtatcccacatacgattttgcttgccccattgtggattcaatcgaaggggtcacacatgccttgagaacgacggagtatcacgacagagacgagcagttttactggatcatcgaagctctgggaatccgcaagccgtacatctgggaatactcccgcctgaacctgaacaatactgttttatcgaagagaaagctgacttggttcgtgaacgaaggtctggttgatggatgggacgaccccagatttccaaccgtccgaggagtcttacgccgtgggatgactgtcgagggtctgaagcagtttatcgccgcccagggatctagccggtctgtggtcaatatggagtgggataagatctgggcctttaacaaaaagctccgggcactgtgcaagaaagtcatcgatcccgtggctcctcgctatgtggcactcctgaagaaggaagtcatacctgtcaacgtgcctgaggcacaggaagagatgaaggaagtcgctaagcacccaaaaaacccagaagtgggcctgaagcccgtgtggtattcgcctaaagtgtttatcgaaggagccgatgctgaaactttctctgagggcgagatggtgacttttatcaactggggcaacttgaacattaccaagatccataagaatgctgacgggaaaataatctcactggatgcgaaactgaacctggaaaataaggactataaaaagaccactaaggtgacatggttagctgaaacaacacacgctttgcctatacccgtgatttgcgtgacctatgaacatctgataacaaagcctgtcctgggaaaagacgaggatttcaaacagtacgtgaacaaaaactctaaacatgaggaacttatgctcggcgacccgtgcttgaaagatttgaagaagggggatattattcagctacagagacgggggttttttatttgcgaccagccatatgagccagtctcaccgtatagttgtaaggaggccccttgtgttctcatttacatccctgatggtcacactaaagagatgccaacttcaggttccaaggagaagaccaaggtcgaggcaacaaagaatgagaccagcgcccccttcaaggagaggcccaccccatccctaaacaataattgtacgacatccgaggactcactcgtactgtataaccgcgtggctgtccagggcgatgttgtgcgggagctgaaggctaagaaggcccccaaggaagacgtggacgccgccgtaaagcagctcttgtccctgaaggctgagtacaaggagaagacaggtcaggaatacaaaccgggaaacccacctgcagaaattggacagaatataagctctaatagttccgcaagtatcttggaaagcaaatccctctacgacgaagtggcggcacaaggcgaggtggtgagaaaactgaaagcggaaaagtctcctaaagccaagatcaacgaagccgtcgaatgcttactgtcgcttaaggcccagtataaagaaaaaacggggaaagagtacatcccgggacagccaccactgtcccaatcttctgactcttcaccgaccaggaattcagagcccgctgggctggaaaccccagaagctaaagtgttgttcgataaggttgcttcccaaggcgaggtcgttcggaaactaaaaactgaaaaggctcccaaggatcaagttgatatagctgttcaagagctgctccagttaaaagcccagtacaagagtcttattggggtggagtataagccagtgagcgctacaggcgcagaggataaggacaaaaaaaagaaggaaaaatag

SEQ ID NO: 146333 - DNA, 4539 bp, Artificial Sequence
  derived and/or modified sequence
atggccacactgagcctgactgttaactcgggcgacccacctctgggagccctgctcgcagtcgagcatgtcaaggacgatgtgagtatctctgtcgaagaaggaaaagaaaacatcttacatgtttctgagaacgtgatcttcaccgacgtaaatagtatactgagatatttggcacgagtcgccacaactgctggcctgtatggttcgaatttgatggagcacacggagattgaccactggctcgaattcagcgccaccaagttgagtagctgcgatagctttacatccaccataaacgagctgaaccattgtttaagccttaggacatatctggttggcaactccctgtctctggcagacctgtgcgtatgggctacattgaaggggaacgcagcgtggcaggagcagttgaagcaaaaaaaggcacctgtgcacgtgaaaagatggtttggctttctggaggctcagcaggcatttcagtcagtcgggacgaagtgggatgtctctacaacaaaagctagggtggcccctgagaagaagcaagatgtggggaaattcgtcgagctccccggtgcagagatggggaaggttacagtacggtttcccccagaagcctctggctacttgcacatagggcatgccaaggcagcactcctgaaccagcactaccaagtgaattttaagggtaagttgattatgcgattcgacgacacaaacccagagaaagaaaaggaggattttgagaaggtaatactcgaagatgtggcaatgctgcacattaagccagaccagttcacatatacaagtgaccacttcgagactattatgaaatacgccgaaaaattaatccaggaagggaaggcttatgtggatgacacacccgcagagcagatgaaggcagaacgcgagcagagaatcgactccaagcatagaaagaatcccatcgaaaaaaacttgcaaatgtgggaagagatgaagaaaggctctcagttcggacagagctgctgcctgagagctaaaattgatatgtcctccaacaatggttgcatgagggacccaactttatacagatgcaaaatccagccacatccaaggaccgggaacaagtataacgtgtatcccacttatgattttgcgtgcccaatagtggactccattgaaggggtgactcacgctttaagaacaactgagtatcatgaccgagatgagcaattctattggataatcgaagccttggggatccgcaagccctacatttgggagtatagtcgtctcaatcttaataataccgtcttgtctaagaggaagctcacttggtttgtgaatgaagggcttgtggacggttgggacgatccaagattcccaacggtgcggggtgtattgaggcgcggaatgactgtggagggactaaaacagttcatagcagctcaagggtcttcacgaagtgttgtgaacatggagtgggacaagatctgggcttttaacaaaaaggtgatagaccctgtagccccaaggtatgtggcattattgaagaaggaagtcatcccagtcaatgtccctgaagcacaggaagagatgaaagaagtggccaagcaccccaaaaacccagaggtaggccttaagcctgtgtggtactccccaaaggttttcattgagggagccgatgcagagaccttctcagaaggagagatggttaccttcatcaactgggggaacctcaatatcaccaagatccataagaacgctgacggtaagatcatcagcctggacgccaagctcaatttggaaaacaaggactacaagaagaccacaaaggtgacctggttagcagaaactacccatgcacttcctatcccagtgatttgcgtgacgtacgaacatctgattaccaaaccagtgctgggaaaagacgaggacttcaaacagtacgtgaacaaaaatagcaaacacgaggaactgatgctgggagacccatgtcttaaggatttgaagaagggagatatcattcagctgcagagacgtggattcttcatttgtgaccagccttacgagcccgtgagtccttacagttgcaaagaggcgccatgcgtcctcatctatatcccagatgggcacactaaggaaatgcctacatctggctctaaggaaaagacgaaagtggaggccacaaaaaacgagacctccgctccatttaaagagcgccctaccccctctttgaacaacaattgcaccacgagcgaggactccctcgtgctttacaacagggtggccgttcagggtgatgtggtgcgcgagttaaaagctaagaaagctcctaaagaagacgtggacgcagcagtgaagcagcttctgtctctgaaagccgaatataaggagaagacagggcaggagtacaaaccaggcaaccccccagcggaaattggccagaacattagtagtaatagttccgcctccatattggaatccaaaagtctgtatgacgaagtggccgctcagggcgaggtagtaaggaagctgaaggcagaaaagtcaccaaaggccaaaattaacgaggcagttgagtgccttctctccctaaaggcgcagtacaaggaaaaaacgggaaaggagtacataccaggacagccacccttgagccagtcaagtgattcatctcccacccgaaattccgagcctgccggtcttgagactcccgaggcaaaggttctgtttgataaagtcgcttcgcagggagaggtggtgcgcaaactgaaaaccgaaaaggctcccaaagaccaggtggacattgcggtgcaggagttactccaactcaaggcccagtacaagtctctcatcggcgtcgaatacaaacctgtgtccgcgactggtgcagaagacaaagataagaaaaaaaaagagaaagaaaataagtcagaaaagcagaacaaaccacagaaacagaatgacggccaacggaaagatccctccaagaatcagggtggcggactttccagctcaggagctggggaaggccaaggccctaagaagcagacaagactgggactcgaggctaaaaaggaggagaacttagcagattggtactcgcaggtgattactaagtctgaaatgatagaatatcacgacattagcggctgctatattctccggccttgggcctatgctatctgggaggcgattaaggattttttcgatgcagaaattaaaaaactcggtgtcgaaaactgttatttccctatgtttgtctcacagagcgcgcttgaaaaagagaagacccacgtggcagatttcgcacctgaggtcgcctgggtaactagatccgggaagaccgaattggccgagccgatcgccattaggcccacctccgaaacagtcatgtaccccgcttacgctaaatgggtccagagccacagagatttgccaatcaaactgaatcagtggtgcaacgtggtccgatgggaattcaaacacccacagccctttctccggactcgggagttcctctggcaggaaggtcatagcgcgtttgccaccatggaggaggcggcagaggaggttctccagatcctcgatttgtacgcccaagtgtacgaggagttgctggcgatccccgtggttaaagggcgaaagaccgaaaaagagaaattcgccggtggcgattacacaacaacaatcgaggcttttatttccgctagcgggcgagcaatccagggcggaaccagccaccacctgggccaaaacttcagcaagatgtttgaaatcgtcttcgaggaccccaaaattccaggcgaaaaacagttcgcttaccagaattcttggggccttactacccgcaccattggagtgatgacaatggtgcatggagacaacatgggtttggtgctccctcctagggtagcttgcgtgcaggtagttattatcccctgcggtattactaatgctctgagcgaagaggacaaggaagccctaatcgccaagtgtaacgattacaggcggagacttctgagcgttaatattcgggtgcgggctgatctccgggataactacagtcctggctggaagtttaatcattgggagttgaaaggggtcccaatccggctggaggttgggcctagagatatgaaaagctgtcagtttgtcgccgtacgacgcgacaccggagagaaactgacagtggctgagaacgaggctgaaacaaagctgcaggccattttggaggacattcaggtgacacttttcaccagggcatccgaagacttgaaaacccatatggtcgtggccaatacaatggaggactttcaaaaaatactggatagcgggaaaattgtgcagattccattctgtggggagatcgattgtgaagactggatcaagaagacaactgccagggaccaggacctcgaaccaggcgctccttcaatgggggctaagagtctgtgtattccattcaagcctctctgcgaattacagcccggagctaagtgtgtctgtggaaaaaatccagcgaagtattatactcttttcggacgaagctattag

SEQ ID NO: 146334 - DNA, 2964 bp, Artificial Sequence
  derived and/or modified sequence
atggcaacgcttagtttgactgtgaatagcggcgatccccctctgggggcactgttggcggtagaacacgtgaaggacgacgtgtccatctcagtggaagaaggaaaggaaaacatcttacacgtgtctgagaatgtgatattcaccgacgtcaactctattttacgatatctggcccgtgttgccaccaccgccggactatacggctccaacctgatggaacacactgagatagatcactggctggagttttcggctactaaacttagctcgtgcgacagcttcacatctactattaacgaattgaaccattgcctaagtctgagaacgtatctcgtaggaaatagcctgtccttagccgacctctgcgtctgggctacactgaagggaaacgcagcttggcaggaacaactcaagcagaaaaaggctcccgtgcacgtgaaacggtggtttggctttcttgaagcacagcaggcctttcagtccgtcggtactaagtgggacgtttcaaccaccaaggccagggtcgctcctgagaagaagcaagatgtcggaaagttcgtcgagctgccaggagctgagatggggaaggtcaccgtccgttttcccccagaggctagtggataccttcacatcgggcacgctaaggctgcccttctgaaccagcattatcaagtgaatttcaaaggaaagctaattatgaggttcgacgatacaaaccccgaaaaggaaaaagaagacttcgagaaagttatcaagtccgtcgtcatgacactgtgtcagaagtccatcaaggtgacaggactgcccaacacttttatggttatcctggaagatgttgccatgctgcatattaaaccagatcagtttacctatacttccgatcactttgagactataatgaaatatgccgagaaactgattcaagagggcaaggcgtacgtggatgatactccagcagaacaaatgaaggcagaacgggagcagcgcatcgactccaaacaccgaaagaatccaatagaaaagaatttacagatgtgggaagaaatgaagaagggtagtcaatttggccagagctgttgcttacgcgctaagattgacatgtcgagcaataacggctgcatgcgggatcctacgctttaccggtgcaagattcaacctcatcctagaactgggaataagtataacgtctaccccacgtatgatttcgcatgcccgattgtggacagcatagagggagttacccacgccctgaggaccaccgagtaccatgatcgggatgagcagttttattggatcatcgaggccctcggtattcgaaagccatacatatgggagtactcacggctgaatctcaataatacagtgttatccaaacgcaaactgacctggtttgtcaacgagggcctggtcgacgggtgggacgatcctcggtttccaacggtcaggggagtcctaagacgtggaatgacagtggaagggttaaagcagttcatcgccgctcaagggagcagtcgaagcgtggtcaacatggaatgggacaagatctgggcgttcaacaagaaagtgatcgatccagtggctcccagatatgtcgcactgctgaagaaagaagtaattcctgtcaacgtacctgaggcacaagaagagatgaaggaagtagctaagcatccaaagaacccggaagtcggcctgaaacccgtttggtattcaccaaaagttttcattgaaggtgccgacgccgaaacattctccgagggtgagatggttactttcatcaattggggtaacctcaacattacgaaaatccataaaaacgccgacgggaagatcatatcgctggatgcaaagctgaacctggagaacaaggactacaagaagactacgaaggtaacatggcttgctgagaccacccatgccttgccaatacccgtaatctgtgtcacatacgagcatctgattaccaagccagttttaggcaaagacgaagactttaagcagtacgttaataagaacagcaaacacgaggaactgatgctcggagatccttgtcttaaggatcttaaaaagggtgacataatccagctccagaggcgcggtttctttatttgtgaccagccatacgaaccagtctcgccctattcttgcaaggaagcaccctgtgtcctcatctatattccagatgggcacaccaaggaaatgccgacttctggtagcaaagaaaagacaaaggtggaagccacaaagaatgaaacctccgcacctttcaaggagcggccaaccccatccctgaataataattgcacgacttccgaggatagccttgtgctgtataaccgagttgcagtgcagggggacgttgttcgggaactgaaagccaagaaagcaccgaaagaggacgttgacgccgctgtgaaacagctcttgtcactgaaggcagaatacaaagaaaaaacaggccaagaatataaacccggtaaccccccagcggaaataggccaaaacatttcatcaaatagttctgcgtccatcctggagagtaaaagcctgtatgacgaggttgccgcacagggtgaggtcgttcggaagttgaaggcagagaagagccctaaggctaagatcaacgaagccgtggagtgtctcctgagcctgaaagcccagtacaaggagaagaccggaaaggagtacatccccggacagcccccactttcacagtcaagcgactccagccctaccaggaattccgaacctgcaggactggagacccctgaggctaaggtgctcttcgacaaagtcgcctcacagggcgaggtggtgcgcaaacttaaaacagaaaaagctccaaaggaccaggtggacattgccgttcaggagcttctccaactgaaggctcaatacaaatctctgataggcgtagagtacaagcccgttagcgccactggcgcagaagacaaggacaaatag

SEQ ID NO: 146335 - DNA, 2928 bp, Artificial Sequence
  derived and/or modified sequence
atggcgactctgtcgctgacagtcaatagcggagatccacctctgggcgctttgttggctgtcgagcacgtgaaggatgatgtctccatctccgtcgaagagggtaaggagaacatcctccacgtgtcggaaaacgtgatatttaccgacgtgaacagcattctgcggtaccttgccagggtggccactacggcgggtctctacggcagcaatctgatggagcatacagagatcgaccattggctggaattttccgctacgaaactatcatcatgtgactcatttaccagtaccattaacgaacttaaccactgcctgtctctaagaacttatctcgtcggcaattcactgtcattagctgacttgtgtgtgtgggcgacactgaagggcaacgcagcttggcaggagcagctcaaacaaaagaaggccccagtgcatgtgaaacgctggttcgggttcctggaagcccagcaggctttccagtctgttggaaccaagtgggacgtatccacaacaaaagcccgtgttgcccctgaaaagaagcaagacgtaggtaaattcgttgagctgccgggtgcagaaatgggaaaggtcactgttaggtttcccccagaggcaagcgggtacttgcatattggccacgcaaaggccgctctgcttaaccagcattaccaggttaacttcaaaggaaagttgatcatgcgatttgatgacactaaccccgagaaggaaaaggaggacttcgaaaaggtaatactggaagacgtcgccatgctgcacatcaagcccgatcagtttacatacaccagcgaccactttgagacaattatgaagtatgcggagaagctaattcaagagggaaaagcatatgtagatgatactcccgctgagcagatgaaggctgagagagagcagcgcattgactctaagcaccgtaagaatcccatcgagaaaaacctccagatgtgggaggagatgaaaaagggcagccagtttggtcaatcctgctgcctgcgggcaaaaatcgacatgtccagcaataacggttgcatgcgggatcctaccctttatagatgcaagattcagccacacccccgaaccggtaataaatacaatgtgtaccctacatacgattttgcgtgtccgatcgtcgattcaatcgagggggtgacacacgctctacgcactactgagtaccacgaccgagatgagcagttctactggatcattgaggcactaggcattcggaagccatacatttgggagtactccagactgaacctcaacaatacagtgctcagcaagcgcaaactgacctggttcgttaacgaggggcttgtggatggatgggacgaccctcgtttccccactgtccgcggagtactgcggcgtgggatgacagtggagggccttaagcaattcatcgccgctcagggatcgtcccgcagtgtggttaatatggagtgggataaaatctgggctttcaataagaaactgagagccttatgcaaaaaggttattgaccccgtcgctcctaggtacgtggccctgttgaagaaggaagtgattccggttaacgttcccgaagctcaggaggagatgaaagaagttgcaaagcaccctaagaaccccgaagtggggttgaagcccgtgtggtatagccctaaagtgtttattgagggagcggacgccgaaactttctccgaaggagagatggttacttttattaattggggcaatctgaacatcacgaaaatccacaaaaacgccgacggtaagattatcagtctcgacgccaagttaaacttggagaataaagactacaagaaaacaaccaaagtgacctggctggcggagactacccatgcgttgcccatccccgtgatctgcgtaacatacgaacacctaataaccaagccagtcctcggaaaagatgaagactttaagcagtacgtgaacaagaatagcaaacacgaagaattgatgctaggagatccctgtctgaaagacctgaagaaaggagacatcattcaacttcaacgacgaggattctttatctgtgaccaaccctacgagcctgtgtctccatactcctgcaaggaggcaccctgcgtgctgatctatatccccgacgggcacactaaagagatgccgaccagcgggtccaaagaaaagaccaaggtcgaagctacaaagaacgagacatctgcccctttcaaggagagacccacacccagtctgaacaataactgcaccacaagtgaggatagcctggtgctttacaatcgagttgccgtacagggtgatgtggttagagaactcaaagctaagaaggcccctaaagaagacgttgatgcagcagttaaacagctactgtccttgaaagcagaatataaagagaagactggccaggaatataaacctggcaatccaccggctgagatcgggcagaatatatctagtaattcctctgcctctatcctggagagtaaaagcctttatgacgaggtcgctgcccagggagaagtggtgcggaaacttaaagcggagaagtcaccgaaagccaagatcaatgaggcagtggagtgtctgttgtctcttaaggcgcagtataaagaaaaaactggtaaagagtatatcccgggacagcctcccctgtcccagtcatctgattcctcccctacacggaatagcgaacctgccggactggaaacacccgaagccaaagtattattcgacaaagtggctagtcagggagaggtcgtgcgcaaactcaagaccgaaaaagccccaaaggatcaggtagacatcgccgtgcaagaactacttcaactgaaagcccagtataaaagcctgataggtgtggagtataaaccagtctccgcgacaggtgcagaagataaagacaaaaagaaaaaagagaaatag

SEQ ID NO: 146336 - DNA, 4539 bp, Artificial Sequence
  derived and/or modified sequence
atggccaccctgagcctgaccgtgaacagcggcgacccccccctgggcgccctgctggccgtggagcacgtgaaggacgacgtgagcatcagcgtggaggagggcaaggagaacatcctgcacgtgagcgagaacgtgatcttcaccgacgtgaacagcatcctgagatacctggccagagtggccaccaccgccggcctgtacggcagcaacctgatggagcacaccgagatcgaccactggctggagttcagcgccaccaagctgagcagctgcgacagcttcaccagcaccatcaacgagctgaaccactgcctgagcctgagaacctacctggtgggcaacagcctgagcctggccgacctgtgcgtgtgggccaccctgaagggcaacgccgcctggcaggagcagctgaagcagaagaaggcccccgtgcacgtgaagagatggttcggcttcctggaggcccagcaggccttccagagcgtgggcaccaagtgggacgtgagcaccaccaaggccagagtggcccccgagaagaagcaggacgtgggcaagttcgtggagctgcccggcgccgagatgggcaaggtgaccgtgagattcccccccgaggccagcggctacctgcacatcggccacgccaaggccgccctgctgaaccagcactaccaggtgaacttcaagggcaagctgatcatgagattcgacgacaccaaccccgagaaggagaaggaggacttcgagaaggtgatcctggaggacgtggccatgctgcacatcaagcccgaccagttcacctacaccagcgaccacttcgagaccatcatgaagtacgccgagaagctgatccaggagggcaaggcctacgtggacgacacccccgccgagcagatgaaggccgagagagagcagagaatcgacagcaagcacagaaagaaccccatcgagaagaacctgcagatgtgggaggagatgaagaagggcagccagttcggccagagctgctgcctgagagccaagatcgacatgagcagcaacaacggctgcatgagagaccccaccctgtacagatgcaagatccagccccaccccagaaccggcaacaagtacaacgtgtaccccacctacgacttcgcctgccccatcgtggacagcatcgagggcgtgacccacgccctgagaaccaccgagtaccacgacagagacgagcagttctactggatcatcgaggccctgggcatcagaaagccctacatctgggagtacagcagactgaacctgaacaacaccgtgctgagcaagagaaagctgacctggttcgtgaacgagggcctggtggacggctgggacgaccccagattccccaccgtgagaggcgtgctgagaagaggcatgaccgtggagggcctgaagcagttcatcgccgcccagggcagcagcagaagcgtggtgaacatggagtgggacaagatctgggccttcaacaagaaggtgatcgaccccgtggcccccagatacgtggccctgctgaagaaggaggtgatccccgtgaacgtgcccgaggcccaggaggagatgaaggaggtggccaagcaccccaagaaccccgaggtgggcctgaagcccgtgtggtacagccccaaggtgttcatcgagggcgccgacgccgagaccttcagcgagggcgagatggtgaccttcatcaactggggcaacctgaacatcaccaagatccacaagaacgccgacggcaagatcatcagcctggacgccaagctgaacctggagaacaaggactacaagaagaccaccaaggtgacctggctggccgagaccacccacgccctgcccatccccgtgatctgcgtgacctacgagcacctgatcaccaagcccgtgctgggcaaggacgaggacttcaagcagtacgtgaacaagaacagcaagcacgaggagctgatgctgggcgacccctgcctgaaggacctgaagaagggcgacatcatccagctgcagagaagaggcttcttcatctgcgaccagccctacgagcccgtgagcccctacagctgcaaggaggccccctgcgtgctgatctacatccccgacggccacaccaaggagatgcccaccagcggcagcaaggagaagaccaaggtggaggccaccaagaacgagaccagcgcccccttcaaggagagacccacccccagcctgaacaacaactgcaccaccagcgaggacagcctggtgctgtacaacagagtggccgtgcagggcgacgtggtgagagagctgaaggccaagaaggcccccaaggaggacgtggacgccgccgtgaagcagctgctgagcctgaaggccgagtacaaggagaagaccggccaggagtacaagcccggcaacccccccgccgagatcggccagaacatcagcagcaacagcagcgccagcatcctggagagcaagagcctgtacgacgaggtggccgcccagggcgaggtggtgagaaagctgaaggccgagaagagccccaaggccaagatcaacgaggccgtggagtgcctgctgagcctgaaggcccagtacaaggagaagaccggcaaggagtacatccccggccagccccccctgagccagagcagcgacagcagccccaccagaaacagcgagcccgccggcctggagacccccgaggccaaggtgctgttcgacaaggtggccagccagggcgaggtggtgagaaagctgaagaccgagaaggcccccaaggaccaggtggacatcgccgtgcaggagctgctgcagctgaaggcccagtacaagagcctgatcggcgtggagtacaagcccgtgagcgccaccggcgccgaggacaaggacaagaagaagaaggagaaggagaacaagagcgagaagcagaacaagccccagaagcagaacgacggccagagaaaggaccccagcaagaaccagggcggcggcctgagcagcagcggcgccggcgagggccagggccccaagaagcagaccagactgggcctggaggccaagaaggaggagaacctggccgactggtacagccaggtgatcaccaagagcgagatgatcgagtaccacgacatcagcggctgctacatcctgagaccctgggcctacgccatctgggaggccatcaaggacttcttcgacgccgagatcaagaagctgggcgtggagaactgctacttccccatgttcgtgagccagagcgccctggagaaggagaagacccacgtggccgacttcgcccccgaggtggcctgggtgaccagaagcggcaagaccgagctggccgagcccatcgccatcagacccaccagcgagaccgtgatgtaccccgcctacgccaagtgggtgcagagccacagagacctgcccatcaagctgaaccagtggtgcaacgtggtgagatgggagttcaagcacccccagcccttcctgagaaccagagagttcctgtggcaggagggccacagcgccttcgccaccatggaggaggccgccgaggaggtgctgcagatcctggacctgtacgcccaggtgtacgaggagctgctggccatccccgtggtgaagggcagaaagaccgagaaggagaagttcgccggcggcgactacaccaccaccatcgaggccttcatcagcgccagcggcagagccatccagggcggcaccagccaccacctgggccagaacttcagcaagatgttcgagatcgtgttcgaggaccccaagatccccggcgagaagcagttcgcctaccagaacagctggggcctgaccaccagaaccatcggcgtgatgaccatggtgcacggcgacaacatgggcctggtgctgccccccagagtggcctgcgtgcaggtggtgatcatcccctgcggcatcaccaacgccctgagcgaggaggacaaggaggccctgatcgccaagtgcaacgactacagaagaagactgctgagcgtgaacatcagagtgagagccgacctgagagacaactacagccccggctggaagttcaaccactgggagctgaagggcgtgcccatcagactggaggtgggccccagagacatgaagagctgccagttcgtggccgtgagaagagacaccggcgagaagctgaccgtggccgagaacgaggccgagaccaagctgcaggccatcctggaggacatccaggtgaccctgttcaccagagccagcgaggacctgaagacccacatggtggtggccaacaccatggaggacttccagaagatcctggacagcggcaagatcgtgcagatccccttctgcggcgagatcgactgcgaggactggatcaagaagaccaccgccagagaccaggacctggagcccggcgcccccagcatgggcgccaagagcctgtgcatccccttcaagcccctgtgcgagctgcagcccggcgccaagtgcgtgtgcggcaagaaccccgccaagtactacaccctgttcggcagaagctactag

SEQ ID NO: 146337 - DNA, 2964 bp, Artificial Sequence
  derived and/or modified sequence
atggccaccctgagcctgaccgtgaacagcggcgacccccccctgggcgccctgctggccgtggagcacgtgaaggacgacgtgagcatcagcgtggaggagggcaaggagaacatcctgcacgtgagcgagaacgtgatcttcaccgacgtgaacagcatcctgagatacctggccagagtggccaccaccgccggcctgtacggcagcaacctgatggagcacaccgagatcgaccactggctggagttcagcgccaccaagctgagcagctgcgacagcttcaccagcaccatcaacgagctgaaccactgcctgagcctgagaacctacctggtgggcaacagcctgagcctggccgacctgtgcgtgtgggccaccctgaagggcaacgccgcctggcaggagcagctgaagcagaagaaggcccccgtgcacgtgaagagatggttcggcttcctggaggcccagcaggccttccagagcgtgggcaccaagtgggacgtgagcaccaccaaggccagagtggcccccgagaagaagcaggacgtgggcaagttcgtggagctgcccggcgccgagatgggcaaggtgaccgtgagattcccccccgaggccagcggctacctgcacatcggccacgccaaggccgccctgctgaaccagcactaccaggtgaacttcaagggcaagctgatcatgagattcgacgacaccaaccccgagaaggagaaggaggacttcgagaaggtgatcaagagcgtggtgatgaccctgtgccagaagagcatcaaggtgaccggcctgcccaacaccttcatggtgatcctggaggacgtggccatgctgcacatcaagcccgaccagttcacctacaccagcgaccacttcgagaccatcatgaagtacgccgagaagctgatccaggagggcaaggcctacgtggacgacacccccgccgagcagatgaaggccgagagagagcagagaatcgacagcaagcacagaaagaaccccatcgagaagaacctgcagatgtgggaggagatgaagaagggcagccagttcggccagagctgctgcctgagagccaagatcgacatgagcagcaacaacggctgcatgagagaccccaccctgtacagatgcaagatccagccccaccccagaaccggcaacaagtacaacgtgtaccccacctacgacttcgcctgccccatcgtggacagcatcgagggcgtgacccacgccctgagaaccaccgagtaccacgacagagacgagcagttctactggatcatcgaggccctgggcatcagaaagccctacatctgggagtacagcagactgaacctgaacaacaccgtgctgagcaagagaaagctgacctggttcgtgaacgagggcctggtggacggctgggacgaccccagattccccaccgtgagaggcgtgctgagaagaggcatgaccgtggagggcctgaagcagttcatcgccgcccagggcagcagcagaagcgtggtgaacatggagtgggacaagatctgggccttcaacaagaaggtgatcgaccccgtggcccccagatacgtggccctgctgaagaaggaggtgatccccgtgaacgtgcccgaggcccaggaggagatgaaggaggtggccaagcaccccaagaaccccgaggtgggcctgaagcccgtgtggtacagccccaaggtgttcatcgagggcgccgacgccgagaccttcagcgagggcgagatggtgaccttcatcaactggggcaacctgaacatcaccaagatccacaagaacgccgacggcaagatcatcagcctggacgccaagctgaacctggagaacaaggactacaagaagaccaccaaggtgacctggctggccgagaccacccacgccctgcccatccccgtgatctgcgtgacctacgagcacctgatcaccaagcccgtgctgggcaaggacgaggacttcaagcagtacgtgaacaagaacagcaagcacgaggagctgatgctgggcgacccctgcctgaaggacctgaagaagggcgacatcatccagctgcagagaagaggcttcttcatctgcgaccagccctacgagcccgtgagcccctacagctgcaaggaggccccctgcgtgctgatctacatccccgacggccacaccaaggagatgcccaccagcggcagcaaggagaagaccaaggtggaggccaccaagaacgagaccagcgcccccttcaaggagagacccacccccagcctgaacaacaactgcaccaccagcgaggacagcctggtgctgtacaacagagtggccgtgcagggcgacgtggtgagagagctgaaggccaagaaggcccccaaggaggacgtggacgccgccgtgaagcagctgctgagcctgaaggccgagtacaaggagaagaccggccaggagtacaagcccggcaacccccccgccgagatcggccagaacatcagcagcaacagcagcgccagcatcctggagagcaagagcctgtacgacgaggtggccgcccagggcgaggtggtgagaaagctgaaggccgagaagagccccaaggccaagatcaacgaggccgtggagtgcctgctgagcctgaaggcccagtacaaggagaagaccggcaaggagtacatccccggccagccccccctgagccagagcagcgacagcagccccaccagaaacagcgagcccgccggcctggagacccccgaggccaaggtgctgttcgacaaggtggccagccagggcgaggtggtgagaaagctgaagaccgagaaggcccccaaggaccaggtggacatcgccgtgcaggagctgctgcagctgaaggcccagtacaagagcctgatcggcgtggagtacaagcccgtgagcgccaccggcgccgaggacaaggacaagtag

SEQ ID NO: 146338 - DNA, 2928 bp, Artificial Sequence
  derived and/or modified sequence
atggccaccctgagcctgaccgtgaacagcggcgacccccccctgggcgccctgctggccgtggagcacgtgaaggacgacgtgagcatcagcgtggaggagggcaaggagaacatcctgcacgtgagcgagaacgtgatcttcaccgacgtgaacagcatcctgagatacctggccagagtggccaccaccgccggcctgtacggcagcaacctgatggagcacaccgagatcgaccactggctggagttcagcgccaccaagctgagcagctgcgacagcttcaccagcaccatcaacgagctgaaccactgcctgagcctgagaacctacctggtgggcaacagcctgagcctggccgacctgtgcgtgtgggccaccctgaagggcaacgccgcctggcaggagcagctgaagcagaagaaggcccccgtgcacgtgaagagatggttcggcttcctggaggcccagcaggccttccagagcgtgggcaccaagtgggacgtgagcaccaccaaggccagagtggcccccgagaagaagcaggacgtgggcaagttcgtggagctgcccggcgccgagatgggcaaggtgaccgtgagattcccccccgaggccagcggctacctgcacatcggccacgccaaggccgccctgctgaaccagcactaccaggtgaacttcaagggcaagctgatcatgagattcgacgacaccaaccccgagaaggagaaggaggacttcgagaaggtgatcctggaggacgtggccatgctgcacatcaagcccgaccagttcacctacaccagcgaccacttcgagaccatcatgaagtacgccgagaagctgatccaggagggcaaggcctacgtggacgacacccccgccgagcagatgaaggccgagagagagcagagaatcgacagcaagcacagaaagaaccccatcgagaagaacctgcagatgtgggaggagatgaagaagggcagccagttcggccagagctgctgcctgagagccaagatcgacatgagcagcaacaacggctgcatgagagaccccaccctgtacagatgcaagatccagccccaccccagaaccggcaacaagtacaacgtgtaccccacctacgacttcgcctgccccatcgtggacagcatcgagggcgtgacccacgccctgagaaccaccgagtaccacgacagagacgagcagttctactggatcatcgaggccctgggcatcagaaagccctacatctgggagtacagcagactgaacctgaacaacaccgtgctgagcaagagaaagctgacctggttcgtgaacgagggcctggtggacggctgggacgaccccagattccccaccgtgagaggcgtgctgagaagaggcatgaccgtggagggcctgaagcagttcatcgccgcccagggcagcagcagaagcgtggtgaacatggagtgggacaagatctgggccttcaacaagaagctgagagccctgtgcaagaaggtgatcgaccccgtggcccccagatacgtggccctgctgaagaaggaggtgatccccgtgaacgtgcccgaggcccaggaggagatgaaggaggtggccaagcaccccaagaaccccgaggtgggcctgaagcccgtgtggtacagccccaaggtgttcatcgagggcgccgacgccgagaccttcagcgagggcgagatggtgaccttcatcaactggggcaacctgaacatcaccaagatccacaagaacgccgacggcaagatcatcagcctggacgccaagctgaacctggagaacaaggactacaagaagaccaccaaggtgacctggctggccgagaccacccacgccctgcccatccccgtgatctgcgtgacctacgagcacctgatcaccaagcccgtgctgggcaaggacgaggacttcaagcagtacgtgaacaagaacagcaagcacgaggagctgatgctgggcgacccctgcctgaaggacctgaagaagggcgacatcatccagctgcagagaagaggcttcttcatctgcgaccagccctacgagcccgtgagcccctacagctgcaaggaggccccctgcgtgctgatctacatccccgacggccacaccaaggagatgcccaccagcggcagcaaggagaagaccaaggtggaggccaccaagaacgagaccagcgcccccttcaaggagagacccacccccagcctgaacaacaactgcaccaccagcgaggacagcctggtgctgtacaacagagtggccgtgcagggcgacgtggtgagagagctgaaggccaagaaggcccccaaggaggacgtggacgccgccgtgaagcagctgctgagcctgaaggccgagtacaaggagaagaccggccaggagtacaagcccggcaacccccccgccgagatcggccagaacatcagcagcaacagcagcgccagcatcctggagagcaagagcctgtacgacgaggtggccgcccagggcgaggtggtgagaaagctgaaggccgagaagagccccaaggccaagatcaacgaggccgtggagtgcctgctgagcctgaaggcccagtacaaggagaagaccggcaaggagtacatccccggccagccccccctgagccagagcagcgacagcagccccaccagaaacagcgagcccgccggcctggagacccccgaggccaaggtgctgttcgacaaggtggccagccagggcgaggtggtgagaaagctgaagaccgagaaggcccccaaggaccaggtggacatcgccgtgcaggagctgctgcagctgaaggcccagtacaagagcctgatcggcgtggagtacaagcccgtgagcgccaccggcgccgaggacaaggacaagaagaagaaggagaagtag

SEQ ID NO: 146339 - protein, 1255 aa, Artificial Sequence [sequence omitted]

SEQ ID NO: 146340 - protein, 603 aa, Artificial Sequence
  derived and/or modified sequence
MKLRLPASPETHLDMLRHLYQGCQVVQGNLELTYLPTNASLSFLQDIQEVQGYVLIAHNQVRQVPLQRLRIVRGTQLFEDNYALAVLDNGDPLNNTTPVTGASPGGLRELQLRSLTEILKGGVLIQRNPQLCYQDTILWKDIFHKNNQLALTLIDTNRSRACHPCSPMCKGSRCWGESSEDCQSLTRTVCAGGCARCKGPLPTDCCHEQCAAGCTGPKHSDCLACLHFNHSGICELHCPALVTYNTDTFESMPNPEGRYTFGASCVTACPYNYLSTDVGSCTLVCPLHNQEVTAEDGTQRCEKCSKPCARVCYGLGMEHLREVRAVTSANIQEFAGCKKIFGSLAFLPESFDGDPASNTAPLQPEQLQVFETLEEITGYLYISAWPDSLPDLSVFQNLQVIRGRILHNGAYSLTLQGLGISWLGLRSLRELGSGLALIHHNTHLCFVHTVPWDQLFRNPHQALLHTANRPEDECVGEGLACHQLCARGHCWGPGPTQCVNCSQFLRGQECVEECRVLQGLPREYVNARHCLPCHPECQPQNGSVTCFGPEADQCVACAHYKDPPFCVARCPSGVKPDLSYMPIWKFPDEEGACQPCPINCTHS

SEQ ID NO: 146341 - DNA, 3768 bp, Artificial Sequence
  derived and/or modified sequence
atggagctggccgccctgtgcagatggggcctgctgctggccctgctgccccccggcgccgccagcacccaggtgtgcaccggcaccgacatgaagctgagactgcccgccagccccgagacccacctggacatgctgagacacctgtaccagggctgccaggtggtgcagggcaacctggagctgacctacctgcccaccaacgccagcctgagcttcctgcaggacatccaggaggtgcagggctacgtgctgatcgcccacaaccaggtgagacaggtgcccctgcagagactgagaatcgtgagaggcacccagctgttcgaggacaactacgccctggccgtgctggacaacggcgaccccctgaacaacaccacccccgtgaccggcgccagccccggcggcctgagagagctgcagctgagaagcctgaccgagatcctgaagggcggcgtgctgatccagagaaacccccagctgtgctaccaggacaccatcctgtggaaggacatcttccacaagaacaaccagctggccctgaccctgatcgacaccaacagaagcagagcctgccacccctgcagccccatgtgcaagggcagcagatgctggggcgagagcagcgaggactgccagagcctgaccagaaccgtgtgcgccggcggctgcgccagatgcaagggccccctgcccaccgactgctgccacgagcagtgcgccgccggctgcaccggccccaagcacagcgactgcctggcctgcctgcacttcaaccacagcggcatctgcgagctgcactgccccgccctggtgacctacaacaccgacaccttcgagagcatgcccaaccccgagggcagatacaccttcggcgccagctgcgtgaccgcctgcccctacaactacctgagcaccgacgtgggcagctgcaccctggtgtgccccctgcacaaccaggaggtgaccgccgaggacggcacccagagatgcgagaagtgcagcaagccctgcgccagagtgtgctacggcctgggcatggagcacctgagagaggtgagagccgtgaccagcgccaacatccaggagttcgccggctgcaagaagatcttcggcagcctggccttcctgcccgagagcttcgacggcgaccccgccagcaacaccgcccccctgcagcccgagcagctgcaggtgttcgagaccctggaggagatcaccggctacctgtacatcagcgcctggcccgacagcctgcccgacctgagcgtgttccagaacctgcaggtgatcagaggcagaatcctgcacaacggcgcctacagcctgaccctgcagggcctgggcatcagctggctgggcctgagaagcctgagagagctgggcagcggcctggccctgatccaccacaacacccacctgtgcttcgtgcacaccgtgccctgggaccagctgttcagaaacccccaccaggccctgctgcacaccgccaacagacccgaggacgagtgcgtgggcgagggcctggcctgccaccagctgtgcgccagaggccactgctggggccccggccccacccagtgcgtgaactgcagccagttcctgagaggccaggagtgcgtggaggagtgcagagtgctgcagggcctgcccagagagtacgtgaacgccagacactgcctgccctgccaccccgagtgccagccccagaacggcagcgtgacctgcttcggccccgaggccgaccagtgcgtggcctgcgcccactacaaggacccccccttctgcgtggccagatgccccagcggcgtgaagcccgacctgagctacatgcccatctggaagttccccgacgaggagggcgcctgccagccctgccccatcaactgcacccacagctgcgtggacctggacgacaagggctgccccgccgagcagagagccagccccctgaccagcatcatcagcgccgtggtgggcatcctgctggtggtggtgctgggcgtggtgttcggcatcctgatcaagagaagacagcagaagatcagaaagtacaccatgagaagactgctgcaggagaccgagctggtggagcccctgacccccagcggcgccatgcccaaccaggcccagatgagaatcctgaaggagaccgagctgagaaaggtgaaggtgctgggcagcggcgccttcggcaccgtgtacaagggcatctggatccccgacggcgagaacgtgaagatccccgtggccatcaaggtgctgagagagaacaccagccccaaggccaacaaggagatcctggacgaggcctacgtgatggccggcgtgggcagcccctacgtgagcagactgctgggcatctgcctgaccagcaccgtgcagctggtgacccagctgatgccctacggctgcctgctggaccacgtgagagagaacagaggcagactgggcagccaggacctgctgaactggtgcatgcagatcgccaagggcatgagctacctggaggacgtgagactggtgcacagagacctggccgccagaaacgtgctggtgaagagccccaaccacgtgaagatcaccgacttcggcctggccagactgctggacatcgacgagaccgagtaccacgccgacggcggcaaggtgcccatcaagtggatggccctggagagcatcctgagaagaagattcacccaccagagcgacgtgtggagctacggcgtgaccgtgtgggagctgatgaccttcggcgccaagccctacgacggcatccccgccagagagatccccgacctgctggagaagggcgagagactgccccagccccccatctgcaccatcgacgtgtacatgatcatggtgaagtgctggatgatcgacagcgagtgcagacccagattcagagagctggtgagcgagttcagcagaatggccagagacccccagagattcgtggtgatccagaacgaggacctgggccccgccagccccctggacagcaccttctacagaagcctgctggaggacgacgacatgggcgacctggtggacgccgaggagtacctggtgccccagcagggcttcttctgccccgaccccgcccccggcgccggcggcatggtgcaccacagacacagaagcagcagcaccagaagcggcggcggcgacctgaccctgggcctggagcccagcgaggaggaggcccccagaagccccctggcccccagcgagggcgccggcagcgacgtgttcgacggcgacctgggcatgggcgccgccaagggcctgcagagcctgcccacccacgaccccagccccctgcagagatacagcgaggaccccaccgtgcccctgcccagcgagaccgacggctacgtggcccccctgacctgcagcccccagcccgagtacgtgaaccagcccgacgtgagaccccagccccccagccccagagagggccccctgcccgccgccagacccgccggcgccaccctggagagacccaagaccctgagccccggcaagaacggcgtggtgaaggacgtgttcgccttcggcggcgccgtggagaaccccgagtacctgaccccccagggcggcgccgccccccagccccaccccccccccgccttcagccccgccttcgacaacctgtactactgggaccaggacccccccgagagaggcgccccccccagcaccttcaagggcacccccaccgccgagaaccccgagtacctgggcctggacgtgcccgtgtag

SEQ ID NO: 146342 - DNA, 3768 bp, Artificial Sequence
  derived and/or modified sequence
atggaactggctgcattatgcaggtggggcctgctcctggcactcttgcccccaggcgctgcctctacacaggtctgtaccgggaccgatatgaaattaaggctgccagcttcgccagagacgcacctggatatgctgcgacacctgtaccagggatgccaggtggtgcaaggcaacctggagcttacgtatttacccaccaacgctagtttgtctttcttgcaagatatccaagaggttcagggctacgtgctcatcgcccacaaccaggtgcggcaggtaccactgcagcgacttcgaatcgtccggggtacacaattgtttgaggacaactatgccctggcagtgttagataacggcgaccctctgaacaatacaactcctgtcaccggtgcatcccccggtggtttaagggagctccagctgagatccctgaccgagattttaaagggtggagtgctgattcagaggaacccccagctttgctaccaagatacaatcctttggaaggacattttccataagaacaaccagctagcgctgacattaatcgacactaacaggtcccgggcttgtcacccgtgctcacctatgtgtaaggggtcccgctgctggggtgagtcgagtgaggactgccagtctttgactcgcaccgtctgcgcgggtgggtgtgctagatgcaagggcccattgccaacagactgctgccatgaacaatgtgcggccggctgcacaggcccaaagcacagtgattgcttagcctgcctgcatttcaaccattccggcatctgcgaacttcattgtccagcgctggtgacctacaacacagatactttcgaatctatgcctaacccggaagggaggtatacctttggagcgagctgcgttacagcgtgtccctataactacctgagcaccgacgtgggcagttgtaccttggtctgccccttacacaatcaagaggttactgcagaggacggaacccaaagatgtgagaagtgttctaaaccctgcgctagggtttgttacggcctcggcatggagcatctgcgcgaagttcgggccgtgaccagtgcaaatatccaggaatttgccggctgcaaaaagatcttcgggagcctggcctttctccctgaatcttttgacggagatccagcgagcaacacagcacctctgcagcccgaacaacttcaagtattcgagactctggaggagatcaccggatacctgtatatttccgcctggcccgactccctacctgatctgagtgtgtttcagaacctccaggtaatccgcggacgcattctgcacaacggtgcctacagtctgactttgcagggactgggcatctcatggctcggtctgagatctctccgcgaactgggttcaggcctggccctgattcatcataacacccatctatgcttcgtccacactgtgccctgggatcagctgtttaggaacccccatcaggccctgctgcacacagcaaacagaccggaggatgagtgtgttggcgaagggcttgcctgtcaccaattatgcgctcgcggacattgctggggccccggaccaacacagtgcgtcaattgcagccagtttcttcgggggcaggagtgtgtggaggaatgcagagtcttgcaaggactccctagggagtatgtcaatgcgaggcattgcctcccctgtcacccagagtgccagcctcagaatgggagtgtgacatgttttgggccagaggccgaccagtgcgtagcctgtgcacactataaagatcccccattttgtgtggcgcggtgcccctctggcgtgaaacccgatctttcctatatgccaatctggaagttcccagacgaagaaggggcatgtcagccctgccctatcaactgcacacatagttgcgtggacttggacgataaaggatgccctgcagagcaaagagcatcacctctgacttccatcatcagtgccgtggtcggcattctacttgtcgtggtactcggggtggtgttcggcattctgatcaaacgacgccagcaaaaaataagaaagtatactatgagaagactcttgcaagagacggaactagtcgagccactcaccccgagtggggccatgcctaaccaagcgcaaatgcggattctcaaagagaccgagctccgaaaggtcaaagtgctgggctcgggggcattcggtaccgtgtataaaggaatttggattcccgacggcgagaacgtgaaaattcccgtggcgattaaggtacttcgggagaacacatccccgaaggcaaacaaggaaatactcgatgaggcgtacgtcatggcaggggtcggcagtccctacgtgtcacgtctgctaggcatctgccttacctcaacagtgcagctcgtcacacagctcatgccttacgggtgtttgctcgaccatgtccgtgaaaacagggggcggctcggatcccaggatctccttaattggtgtatgcaaattgctaagggtatgtcctacctggaagatgttcgcctagtgcatcgggatctagccgcaagaaacgtcctggtcaagagcccaaatcacgttaaaataaccgactttggactggccaggctgcttgatatcgacgaaacagagtatcatgctgatggggggaaagttcctattaagtggatggcactagaatcgatccttcgcagaagatttacccatcagtctgatgtgtggtcttacggggtaacagtgtgggagctgatgacattcggcgccaaaccatacgacggcattcctgctagggagataccagacctgctggaaaagggagagcgtctgccgcagcccccgatttgcaccatcgatgtctatatgatcatggtcaaatgttggatgatagatagtgaatgtaggccacggtttcgcgagcttgtgtccgagttttcccggatggccagggatccccagagatttgtcgtgatacagaacgaagacctggggccagcgtctccgctagactctactttttatagaagcctgctggaagacgatgacatgggggatctggtggacgcggaagaatacctggtcccacagcaaggttttttctgtcctgacccggcacctggcgccggcggaatggttcaccatagacaccgcagctcctctactaggtcaggcggaggggatctcactttggggttggagccttccgaagaggaggcgcctcgatcccccctcgccccttccgagggagcaggcagcgatgtgtttgacggcgacctgggcatgggggcagctaagggtcttcagtccctgcctacccatgacccaagcccactccagcgctattcagaggaccctactgtgcccctgccttcggagaccgacgggtatgtggccccacttacatgttcaccacagccagaatatgtgaaccagcccgacgtgcggccccagccaccgtctccaagagaggggccactcccagccgcccgaccggccggcgcgaccctggagcgcccgaaaacattgtcccccggcaagaatggtgtggtgaaagacgtctttgcctttggcggggcagtggagaaccccgagtatttgaccccacagggtggagccgccccgcaacctcacccacctcctgcattcagtccggcattcgacaacctgtattattgggaccaagatccaccggagcgcggggcccccccctctactttcaagggtactccaactgccgagaatcccgagtatcttggtctcgacgtccccgtgtag

SEQ ID NO: 146343 - DNA, 3768 bp, Artificial Sequence
  derived and/or modified sequence
atggagctggccgccctgtgccgctggggcctgctgctggccctgctgcccccaggggccgccagcacccaggtgtgcacaggaacagacatgaagctgcggctgcctgccagccctgagacccacctggacatgctgcggcacctgtaccagggctgccaggtggtgcagggcaacctggagctgacctacctgcccaccaatgccagcctgtccttcctgcaggacatccaggaggtgcagggctacgtgctgattgcccacaaccaggtgcggcaggtgcccctgcagaggctgagaattgtgcggggcacccagctgtttgaggacaactatgccctggccgtgctggacaatggagaccccctgaacaacaccacccctgtgactggagccagccctgggggcctgcgggagctgcagctgcggagcctgacagagatcctgaagggcggcgtgctgatccagaggaacccccagctgtgctaccaggacaccatcctgtggaaggacatcttccacaagaacaaccagctggccctgaccctgattgacaccaacagaagccgggcctgccacccctgcagccccatgtgcaagggcagccgctgctggggcgagagcagcgaggactgccagagcctgaccaggacagtgtgtgccggcggctgtgcccgctgcaagggccccctgcccacagactgctgccacgagcagtgtgccgccggctgcaccggccccaagcacagcgactgcctggcctgcctgcacttcaaccacagcggcatctgtgagctgcactgcccagccctggtgacctacaacacagacacctttgagagcatgcccaaccctgagggccgctacacctttggagccagctgtgtgacagcctgcccctacaactacctgagcacagatgtgggcagctgcaccctggtgtgccccctgcacaaccaggaggtgacagcagaagatggcacccagagatgtgagaagtgcagcaagccctgtgcccgggtgtgctacggcctgggcatggagcacctgcgggaggtgcgggctgtgaccagcgccaacatccaggagtttgctggctgcaagaagatcttcggcagcctggccttcctgcctgagagctttgatggagaccctgccagcaacacagcccccctgcagcctgagcagctgcaggtgtttgagaccctggaggagatcaccggctacctgtacatcagcgcctggccagacagcctgcctgacctgtctgtgttccagaacctgcaggtgatccggggccgcatcctgcacaacggggcctacagcctgaccctgcagggcctgggcatctcctggctgggcctgcggagcctgcgggagctgggcagcggcctggccctgatccaccacaacacccacctgtgctttgtgcacacagtgccctgggaccagctgttcaggaacccccaccaggccctgctgcacacagccaacagaccagaagatgaatgtgtgggggagggcctggcctgccaccagctgtgtgcccggggccactgctggggccctggccccacccagtgtgtgaactgcagccagttcctgcggggccaggagtgtgtggaggagtgccgggtgctgcagggcctgccccgggagtatgtgaatgcccggcactgcctgccctgccaccctgagtgccagccccagaatggatctgtgacctgctttggacctgaggccgaccagtgtgtggcctgtgcccactacaaggacccccccttctgtgtggcccgctgccccagcggcgtgaagccagacctgagctacatgcccatctggaagttcccagatgaggagggcgcctgccagccctgccccatcaactgcacccacagctgtgtggacctggatgacaagggctgcccagctgagcagagggccagccccctgaccagcatcatctctgctgtggtgggcatcctgctggtggtggtgctgggcgtggtgtttggcatcctgatcaagaggcggcagcagaagatcaggaagtacaccatgaggcggctgctgcaggagacagagctggtggagcccctgaccccatctggggccatgcccaaccaggcccagatgaggatcctgaaggagacagagctgaggaaggtgaaggtgctgggcagcggggcctttggaacagtgtacaagggcatctggatcccagatggagaaaatgtgaagatccctgtggccatcaaggtgctgcgggagaacaccagccccaaggccaacaaggagatcctggatgaggcctacgtgatggccggcgtgggcagcccctacgtgtcccggctgctgggcatctgcctgaccagcacagtgcagctggtgacccagctgatgccctacggctgcctgctggaccacgtgcgggagaacagaggccgcctgggcagccaggacctgctgaactggtgcatgcagatcgccaagggcatgagctacctggaggatgtgcggctggtgcaccgggacctggccgccagaaatgtgctggtgaagagccccaaccacgtgaagatcacagactttggcctggcccggctgctggacattgatgaaacagagtaccacgcagatggcggcaaggtgcccatcaagtggatggccctggagagcatcctgcggcggcgcttcacccaccagagtgatgtgtggagctatggagtgacagtgtgggagctgatgaccttcggggccaagccctatgatggcatcccagcccgggagatcccagacctgctggagaagggggagcggctgccccagccccccatctgcaccattgatgtgtacatgatcatggtgaagtgctggatgattgattctgagtgccggccccgcttccgggagctggtgtctgagttcagcaggatggcccgggacccccagagatttgtggtgatccagaatgaagacctgggccctgccagccccctggacagcaccttctaccgcagcctgctggaggatgatgacatgggagacctggtggatgctgaggagtacctggtgccccagcagggcttcttctgcccagaccctgcccctggagctgggggcatggtgcaccaccgccacaggagcagcagcaccaggtctgggggcggggacctgaccctgggcctggagcccagcgaggaggaggcccccaggagccccctggcccccagcgagggcgccggcagtgatgtgtttgatggagacctgggcatgggcgccgccaagggcctgcagagcctgcccacccatgaccccagccccctgcagcgctacagcgaggaccccaccgtgcccctgcccagcgagacagatggctacgtggcccccctgacctgcagcccccagccagaatatgtgaaccagccagatgtgcggccccagccccccagcccccgggagggccccctgcctgctgcccggcctgctggggccaccctggagcggcccaagaccctgagccctgggaagaatggagtggtgaaggatgtgtttgcctttggaggagctgtggagaaccctgagtacctgaccccccagggcggggccgccccccagccccaccccccaccagccttctccccagcctttgacaacctgtactactgggaccaggaccccccagagcggggggccccacccagcaccttcaagggcacccccacagctgagaaccctgagtacctgggcctggatgtgcctgtgtag

SEQ ID NO: 146344 - DNA, 3768 bp, Artificial Sequence
  derived and/or modified sequence
atggagctggccgccctgtgccggtggggcctgctgctggccctgctaccccccggggcagcctccacgcaggtgtgtaccgggactgacatgaaactgaggctgcctgcctcccccgaaacccatctggacatgctccggcatctttaccaggggtgccaggtggtgcagggcaatctcgaactcacctatctgcccacaaacgcgagtttatcgtttctgcaggacatacaggaagtccagggatacgtactaatagcccacaatcaggtccgtcaggtgccgcttcagcggctgcgtatagtgaggggaacccagttatttgaggataattacgcattggcagttctcgacaacggagatccactgaacaatacaacacccgtcactggagcctccccaggtgggctaagagagttacagctcaggtccctgaccgagattctgaaaggaggagttctgatccaaaggaaccctcagctttgctaccaagacaccatattgtggaaggacatcttccacaagaacaatcagctggcattgaccctaattgataccaaccgctctagggcttgccacccttgctccccaatgtgtaagggtagtcgctgttggggggaatcttctgaggattgccaaagcttaactaggacagtctgtgccggcggctgcgcaaggtgcaaaggacccctgcccaccgattgctgtcacgagcagtgcgcagcgggctgtacgggcccaaagcactctgattgcctggcctgtcttcattttaatcactccggaatctgtgagttacactgtccggccctagttacctataacacggacaccttcgagagtatgccgaacccagagggacggtacaccttcggagccagttgtgtgacagcctgcccctacaattacctgagtaccgatgtaggttcgtgcacactcgtttgccccctccacaaccaggaggtgaccgccgaggatggtacccaaagatgtgagaagtgtagcaagccttgtgcacgggtatgttacggcctggggatggaacatctgcgcgaggtgagggcggttacttcagccaacatccaggagtttgccgggtgcaagaagatcttcgggagcctcgcctttctacccgagtcctttgacggtgaccccgctagtaacactgcccccctgcagcccgagcagctacaggtgtttgagactttggaggagatcaccggatatttgtatatatccgcttggccagattcgctccccgacctatcagttttccagaatctccaggtgatccggggaagaatcctccataacggggcgtactcattgacgctgcagggactggggatctcatggttaggcctgcggagtttaagagagctcggatctgggctcgctctgatccatcataacacacacctatgctttgtgcatacagtgccttgggatcagctgtttagaaatccgcatcaagctttactgcacaccgccaatcggcctgaagacgagtgcgtgggggaagggctcgcctgtcatcagctttgcgccagaggacactgctggggacccggcccaacacagtgcgttaattgcagccagtttttaaggggtcaggagtgcgtagaggagtgccgagtgctgcagggcctgccacgagagtacgtgaacgctagacattgtcttccttgccaccccgagtgtcagcctcagaacggcagtgtaacttgttttggaccagaagctgatcaatgcgttgcttgcgcccactataaagacccacccttttgcgtggcccgctgccccagtggcgtgaaacctgacctgagctacatgccaatctggaagtttcctgacgaagagggggcatgccagccctgccccattaactgtacccattcatgtgtcgatctcgacgacaagggctgcccggcagagcaacgcgcttcccccctgaccagtattatttctgcagtagtgggaatcctgctagtcgtggtcttaggtgtggtgttcggaatattaattaagaggagacagcagaaaatccgcaaatacactatgcggcgccttctgcaggagaccgaactggtggaacccctcaccccatccggagcaatgccgaaccaagcacagatgaggattctgaaggaaaccgaactgcggaaagtgaaggtactggggagcggcgccttcggcaccgtttataaaggtatatggattcctgacggggagaacgtcaagattccagtggctatcaaggtcttaagagagaacacatcccctaaggcaaacaaagagattctcgacgaggcctatgtgatggcgggggtagggtcgccatatgtgtctcggctactggggatctgtcttaccagcacagtccaattggtgactcagttgatgccttacggatgccttcttgaccatgttagggagaaccgtggcaggctcggatcccaagacctcctgaactggtgcatgcaaattgccaaaggcatgtcctatctcgaagacgttcgcctcgtccaccgagatctggctgctcgtaacgttttggtaaagtcacctaatcatgtgaagataacagattttggccttgcccggctgcttgacatcgacgagactgagtatcacgccgatggtggaaaagtgccaatcaagtggatggccctggaatccattttgcggcgcagatttacacaccagagtgacgtttggagctacggagtgacagtctgggagcttatgacgttcggcgccaaaccatacgacggcatccccgcccgggaaatccccgacctacttgagaaaggagaacgactccctcagccaccaatatgtaccattgacgtgtacatgataatggtgaagtgctggatgatcgactcagagtgccgccccaggttcagagaattggtgagtgaattttctagaatggcccgcgatccacagagatttgtggtgattcagaatgaagatctggggccagcttcacccctggattcaaccttttacaggtcactcttggaggatgatgatatgggggatctggtggacgctgaagagtacttggtaccccagcagggcttcttctgccctgaccctgcgccaggcgctggaggcatggtgcatcaccgacatcgcagcagttccactcgctctggcggaggcgatctgaccctcggactggagccgtccgaggaagaggcaccccggagtcctctcgctccttctgagggcgccggctcagatgtgttcgatggtgatctcgggatgggagcagctaaggggctgcagagtcttcctacccatgatccatctcccctgcagcgatattcagaagatcccacagttcccctgcctagcgagaccgacgggtacgtcgctcccctgacttgtagcccgcagcctgagtatgttaaccagcctgacgtgcgtccccagccaccttctccccgggaaggacctctacccgcagcgagacccgccggtgcgaccctggagcggcccaagaccctcagcccggggaagaatggcgtcgttaaggacgtgtttgcttttggaggggccgtagaaaacccagagtacctgaccccacagggaggtgcagctccccagcctcaccctccaccggccttctcccctgcctttgacaatttgtactactgggaccaggaccctccagaacggggcgcaccgccgtcgaccttcaagggtacccctactgctgaaaatccagagtacctgggacttgacgtgccggtttag

SEQ ID NO: 146345 - DNA, 3768 bp, Artificial Sequence
  derived and/or modified sequence
atggagcttgcggctctgtgcagatggggtctactactggccctgcttcctcctggagccgcaagcacgcaggtgtgcacaggaactgacatgaagcttcgcctgccagcttccccagagacacacctggatatgctccgccatctctaccaaggttgccaggtggtccagggtaatctggagctcacctatcttccaacaaatgcgtccttaagtttcctacaggatatacaggaggtgcagggctacgtgctgattgctcacaatcaggtccgccaggtgcccctccaaaggttgaggatcgtgaggggaacacaacttttcgaagataattacgcgcttgctgtcctggacaatggggaccctctgaataatacgaccccagtaactggagcaagcccaggcggactgcgagaactccagctgcgtagtctcactgaaatcttaaagggaggtgtgctgatacagagaaatccccaactgtgctatcaggatacgatactttggaaggatattttccacaagaacaatcaactcgcgcttacccttatcgatacaaatcgatcgcgcgcttgtcacccctgcagcccgatgtgcaaagggtcacgctgctggggggagtcttcagaggactgccagtccctgacccggacggtctgtgcagggggatgcgcaagatgcaaaggcccactccccacagactgctgccacgaacagtgcgccgcaggctgcacagggccaaaacacagtgattgcctggcctgtctgcactttaatcactccgggatttgtgagctgcactgccccgcactggtgacttataatactgatacattcgagagtatgcccaacccagaggggagatacaccttcggagcttcttgtgtgactgcctgcccttataactacctgtctaccgacgtgggatcctgtaccctagtttgtccgcttcacaaccaagaggtgaccgctgaggacggcacgcagaggtgcgagaagtgtagcaagccctgcgcccgagtgtgctatggactagggatggaacacctgagagaggtccgcgctgtgaccagcgctaatattcaagagtttgcagggtgtaagaaaatcttcgggtcgctcgccttcctgcccgagtcttttgacggagatcccgcttcaaacactgctcccctgcagcccgaacaacttcaggttttcgagactctggaggagattacggggtacttgtacatctccgcctggcccgatagtctgcccgacttgagtgtgtttcaaaatcttcaagtcattcgcggaagaatcctccacaatggagcttatagcctgaccctccaaggcttaggtatcagttggctgggcctgcggtctctccgggagcttggtagtggactagcacttatacaccataacacccacctctgttttgtccacaccgtgccatgggatcaattgtttcggaacccccatcaggcccttctccatacggcaaatagaccagaagacgagtgcgtgggcgagggcctggcatgccaccaactctgcgcaagggggcattgctgggggcctgggcctacccagtgtgtgaattgctcccagttcctcaggggccaggagtgcgtggaagaatgccgcgttctacaaggcctgcccagagagtacgtgaacgcaaggcactgcctgccctgtcatcccgaatgccagcctcaaaatggctcagtgacgtgctttggaccggaggctgaccagtgcgtcgcgtgtgcccattataaagatccgcctttttgtgtcgctcggtgtccttctggagtaaaacccgacctgtcatacatgccaatatggaagttcccggatgaggaaggagcctgccagccatgccccatcaattgcacccactcctgtgtggaccttgacgataagggttgccccgcagaacagcgggctagccccctcaccagcattatttcagccgttgtgggtatactcctggtggtggtgctgggggtggtgttcggtattctgatcaagcgccgtcagcaaaaaattcgcaagtacaccatgcgcaggcttctgcaggagacagagctggtcgagccattaaccccctctggcgctatgccaaaccaagctcagatgagaatcctgaaggagacagagctgcgtaaagtcaaggtgctcggctccggtgcattcggcaccgtttacaagggcatttggatccctgacggagaaaatgtcaaaatccccgtggccattaaagtactgagagagaacactagtcccaaagctaacaaagagatcttggatgaagcctacgtgatggctggcgttggctcaccttatgtgtctaggctgttgggcatctgcttgacctccacggtacaattggtcacccagcttatgccgtatggctgcctgctggaccatgtgagagagaatcggggacgccttggatcacaagacctgctgaattggtgcatgcagattgcgaaaggaatgtcttacctggaggacgttcgattagtccacagagacctggctgctcgcaacgtgttagtcaaaagtccgaatcacgtcaaaatcacagacttcggactcgcccgtctgttagacatagatgaaacggagtatcacgctgatggaggaaaagtccctatcaagtggatggcactcgaatcaatactgagaaggcgattcacacaccagtctgatgtttggtcgtacggagtgaccgtttgggaactcatgacctttggcgctaaaccatacgatggtattcccgcaagggagatacccgacctattagaaaagggagaacgactgcctcagccccctatttgtaccattgatgtatacatgatcatggtcaagtgctggatgattgactctgaatgcagaccccgttttagagagctggtttccgaatttagtagaatggccagggatcctcaacggttcgtagttattcagaacgaagatctgggcccagcgtctccactagactccactttctatcgttctcttctggaagacgacgatatgggtgacctcgtggacgccgaggaatatcttgtccctcagcagggcttcttctgtcctgatccggcacctggagccggagggatggtgcatcaccggcaccgatcatcgtctacgcgcagcggtggaggcgacctgaccttaggcctagagcctagcgaagaggaggcaccaagatcaccacttgctcccagcgagggcgctggctcggacgtcttcgacggagacctgggaatgggcgcagcgaagggcctgcagagcttgcccacacacgatccctcaccattacagcggtattctgaggaccccacagttccgctgcccagcgagacagatggttatgtcgctccactgacatgctcaccccagcccgagtacgttaaccagccagacgtccgcccacagccgccttcgcctcgggagggtcccctccccgcagctagacctgcgggagccaccctggaaaggcctaagacgctgtctccgggtaagaatggagtggtcaaagacgtgtttgcatttgggggtgccgttgagaaccccgaatatttgacgccacaagggggtgccgctccacagccgcacccaccacccgctttttcccctgcttttgataacctttattattgggaccaagatcctcctgagagaggcgctccgccttcaacctttaaagggacacccacagccgaaaacccagaatacctgggactcgacgtgcctgtctag

SEQ ID NO: 146346 - DNA, 4624 bp, Artificial Sequence
  derived and/or modified sequence
ggaggaggtggaggaggagggctgcttgaggaagtataagaatgaagttgtgaagctgagattcccctccattgggaccggagaaaccaggggagccccccgggcagccgcgcgccccttcccacggggccctttactgcgccgcgcgcccggcccccacccctcgcagcaccccgcgccccgcgccctcccagccgggtccagccggagccatggggccggagccgcagtgagcaccatggagctggcggccttgtgccgctgggggctcctcctcgccctcttgccccccggagccgcgagcacccaagtgtgcaccggcacagacatgaagctgcggctccctgccagtcccgagacccacctggacatgctccgccacctctaccagggctgccaggtggtgcagggaaacctggaactcacctacctgcccaccaatgccagcctgtccttcctgcaggatatccaggaggtgcagggctacgtgctcatcgctcacaaccaagtgaggcaggtcccactgcagaggctgcggattgtgcgaggcacccagctctttgaggacaactatgccctggccgtgctagacaatggagacccgctgaacaataccacccctgtcacaggggcctccccaggaggcctgcgggagctgcagcttcgaagcctcacagagatcttgaaaggaggggtcttgatccagcggaacccccagctctgctaccaggacacgattttgtggaaggacatcttccacaagaacaaccagctggctctcacactgatagacaccaaccgctctcgggcctgccacccctgttctccgatgtgtaagggctcccgctgctggggagagagttctgaggattgtcagagcctgacgcgcactgtctgtgccggtggctgtgcccgctgcaaggggccactgcccactgactgctgccatgagcagtgtgctgccggctgcacgggccccaagcactctgactgcctggcctgcctccacttcaaccacagtggcatctgtgagctgcactgcccagccctggtcacctacaacacagacacgtttgagtccatgcccaatcccgagggccggtatacattcggcgccagctgtgtgactgcctgtccctacaactacctttctacggacgtgggatcctgcaccctcgtctgccccctgcacaaccaagaggtgacagcagaggatggaacacagcggtgtgagaagtgcagcaagccctgtgcccgagtgtgctatggtctgggcatggagcacttgcgagaggtgagggcagttaccagtgccaatatccaggagtttgctggctgcaagaagatctttgggagcctggcatttctgccggagagctttgatggggacccagcctccaacactgccccgctccagccagagcagctccaagtgtttgagactctggaagagatcacaggttacctatacatctcagcatggccggacagcctgcctgacctcagcgtcttccagaacctgcaagtaatccggggacgaattctgcacaatggcgcctactcgctgaccctgcaagggctgggcatcagctggctggggctgcgctcactgagggaactgggcagtggactggccctcatccaccataacacccacctctgcttcgtgcacacggtgccctgggaccagctctttcggaacccgcaccaagctctgctccacactgccaaccggccagaggacgagtgtgtgggcgagggcctggcctgccaccagctgtgcgcccgagggcactgctggggtccagggcccacccagtgtgtcaactgcagccagttccttcggggccaggagtgcgtggaggaatgccgagtactgcaggggctccccagggagtatgtgaatgccaggcactgtttgccgtgccaccctgagtgtcagccccagaatggctcagtgacctgttttggaccggaggctgaccagtgtgtggcctgtgcccactataaggaccctcccttctgcgtggcccgctgccccagcggtgtgaaacctgacctctcctacatgcccatctggaagtttccagatgaggagggcgcatgccagccttgccccatcaactgcacccactcctgtgtggacctggatgacaagggctgccccgccgagcagagagccagccctctgacgtccatcatctctgcggtggttggcattctgctggtcgtggtcttgggggtggtctttgggatcctcatcaagcgacggcagcagaagatccggaagtacacgatgcggagactgctgcaggaaacggagctggtggagccgctgacacctagcggagcgatgcccaaccaggcgcagatgcggatcctgaaagagacggagctgaggaaggtgaaggtgcttggatctggcgcttttggcacagtctacaagggcatctggatccctgatggggagaatgtgaaaattccagtggccatcaaagtgttgagggaaaacacatcccccaaagccaacaaagaaatcttagacgaagcatacgtgatggctggtgtgggctccccatatgtctcccgccttctgggcatctgcctgacatccacggtgcagctggtgacacagcttatgccctatggctgcctcttagaccatgtccgggaaaaccgcggacgcctgggctcccaggacctgctgaactggtgtatgcagattgccaaggggatgagctacctggaggatgtgcggctcgtacacagggacttggccgctcggaacgtgctggtcaagagtcccaaccatgtcaaaattacagacttcgggctggctcggctgctggacattgacgagacagagtaccatgcagatgggggcaaggtgcccatcaagtggatggcgctggagtccattctccgccggcggttcacccaccagagtgatgtgtggagttatggtgtgactgtgtgggagctgatgacttttggggccaaaccttacgatgggatcccagcccgggagatccctgacctgctggaaaagggggagcggctgccccagccccccatctgcaccattgatgtctacatgatcatggtcaaatgttggatgattgactctgaatgtcggccaagattccgggagttggtgtctgaattctcccgcatggccagggacccccagcgctttgtggtcatccagaatgaggacttgggcccagccagtcccttggacagcaccttctaccgctcactgctggaggacgatgacatgggggacctggtggatgctgaggagtatctggtaccccagcagggcttcttctgtccagaccctgccccgggcgctgggggcatggtccaccacaggcaccgcagctcatctaccaggagtggcggtggggacctgacactagggctggagccctctgaagaggaggcccccaggtctccactggcaccctccgaaggggctggctccgatgtatttgatggtgacctgggaatgggggcagccaaggggctgcaaagcctccccacacatgaccccagccctctacagcggtacagtgaggaccccacagtacccctgccctctgagactgatggctacgttgcccccctgacctgcagcccccagcctgaatatgtgaaccagccagatgttcggccccagcccccttcgccccgagagggccctctgcctgctgcccgacctgctggtgccactctggaaaggcccaagactctctccccagggaagaatggggtcgtcaaagacgtttttgcctttgggggtgccgtggagaaccccgagtacttgacaccccagggaggagctgcccctcagccccaccctcctcctgccttcagcccagccttcgacaacctctattactgggaccaggacccaccagagcggggggctccacccagcaccttcaaagggacacctacggcagagaacccagagtacctgggtctggacgtgccagtgtgaaccagaaggccaagtccgcagaagccctgatgtgtcctcagggagcagggaaggcctgacttctgctggcatcaagaggtgggagggccctccgaccacttccaggggaacctgccatgccaggaacctgtcctaaggaaccttccttcctgcttgagttcccagatggctggaaggggtccagcctcgttggaagaggaacagcactggggagtctttgtggattctgaggccctgcccaatgagactctagggtccagtggatgccacagcccagcttggccctttccttccagatcctgggtactgaaagccttagggaagctggcctgagaggggaagcggccctaagggagtgtctaagaacaaaagcgacccattcagagactgtccctgaaacctagtactgccccccatgaggaaggaacagcaatggtgtcagtatccaggctttgtacagagtgcttttctgtttagtttttactttttttgttttgtttttttaaagatgaaataaagacccagggggagaatgggtgttgtatggggaggcaagtgtggggggtccttctccacacccactttgtccatttgcaaatatattttggaaaacagcta

SEQ ID NO: 146347 - DNA, 4806 bp, Artificial Sequence
  derived and/or modified sequence
gttcccggatttttgtgggcgcctgccccgcccctcgtccccctgctgtgtccatatatcgaggcgatagggttaagggaaggcggacgcctgatgggttaatgagcaaactgaagtgttttccatgatcttttttgagtcgcaattgaagtaccacctcccgagggtgattgcttccccatgcggggtagaacctttgctgtcctgttcaccactctacctccagcacagaatttggcttatgccaaatccgaaaatattgtgaccaggaaccattctgtccaactcttctatttcaggtggcaaagcaaagctatattcaagaccacatgcaaagctactccctgagcaaagagtcacagataaaacgggggcaccagtagaatggccaggacaaacgcagtgcagcacagagactcagaccctggcagccatgcctgcgcaggcagtgatgagagtgacatgtactgttgtggacatgcacaaaagtgagtgtgcaccggcacagacatgaagctgcggctccctgccagtcccgagacccacctggacatgctccgccacctctaccagggctgccaggtggtgcagggaaacctggaactcacctacctgcccaccaatgccagcctgtccttcctgcaggatatccaggaggtgcagggctacgtgctcatcgctcacaaccaagtgaggcaggtcccactgcagaggctgcggattgtgcgaggcacccagctctttgaggacaactatgccctggccgtgctagacaatggagacccgctgaacaataccacccctgtcacaggggcctccccaggaggcctgcgggagctgcagcttcgaagcctcacagagatcttgaaaggaggggtcttgatccagcggaacccccagctctgctaccaggacacgattttgtggaaggacatcttccacaagaacaaccagctggctctcacactgatagacaccaaccgctctcgggcctgccacccctgttctccgatgtgtaagggctcccgctgctggggagagagttctgaggattgtcagagcctgacgcgcactgtctgtgccggtggctgtgcccgctgcaaggggccactgcccactgactgctgccatgagcagtgtgctgccggctgcacgggccccaagcactctgactgcctggcctgcctccacttcaaccacagtggcatctgtgagctgcactgcccagccctggtcacctacaacacagacacgtttgagtccatgcccaatcccgagggccggtatacattcggcgccagctgtgtgactgcctgtccctacaactacctttctacggacgtgggatcctgcaccctcgtctgccccctgcacaaccaagaggtgacagcagaggatggaacacagcggtgtgagaagtgcagcaagccctgtgcccgagtgtgctatggtctgggcatggagcacttgcgagaggtgagggcagttaccagtgccaatatccaggagtttgctggctgcaagaagatctttgggagcctggcatttctgccggagagctttgatggggacccagcctccaacactgccccgctccagccagagcagctccaagtgtttgagactctggaagagatcacaggttacctatacatctcagcatggccggacagcctgcctgacctcagcgtcttccagaacctgcaagtaatccggggacgaattctgcacaatggcgcctactcgctgaccctgcaagggctgggcatcagctggctggggctgcgctcactgagggaactgggcagtggactggccctcatccaccataacacccacctctgcttcgtgcacacggtgccctgggaccagctctttcggaacccgcaccaagctctgctccacactgccaaccggccagaggacgagtgtgtgggcgagggcctggcctgccaccagctgtgcgcccgagggcactgctggggtccagggcccacccagtgtgtcaactgcagccagttccttcggggccaggagtgcgtggaggaatgccgagtactgcaggggctccccagggagtatgtgaatgccaggcactgtttgccgtgccaccctgagtgtcagccccagaatggctcagtgacctgttttggaccggaggctgaccagtgtgtggcctgtgcccactataaggaccctcccttctgcgtggcccgctgccccagcggtgtgaaacctgacctctcctacatgcccatctggaagtttccagatgaggagggcgcatgccagccttgccccatcaactgcacccactcctgtgtggacctggatgacaagggctgccccgccgagcagagagccagccctctgacgtccatcatctctgcggtggttggcattctgctggtcgtggtcttgggggtggtctttgggatcctcatcaagcgacggcagcagaagatccggaagtacacgatgcggagactgctgcaggaaacggagctggtggagccgctgacacctagcggagcgatgcccaaccaggcgcagatgcggatcctgaaagagacggagctgaggaaggtgaaggtgcttggatctggcgcttttggcacagtctacaagggcatctggatccctgatggggagaatgtgaaaattccagtggccatcaaagtgttgagggaaaacacatcccccaaagccaacaaagaaatcttagacgaagcatacgtgatggctggtgtgggctccccatatgtctcccgccttctgggcatctgcctgacatccacggtgcagctggtgacacagcttatgccctatggctgcctcttagaccatgtccgggaaaaccgcggacgcctgggctcccaggacctgctgaactggtgtatgcagattgccaaggggatgagctacctggaggatgtgcggctcgtacacagggacttggccgctcggaacgtgctggtcaagagtcccaaccatgtcaaaattacagacttcgggctggctcggctgctggacattgacgagacagagtaccatgcagatgggggcaaggtgcccatcaagtggatggcgctggagtccattctccgccggcggttcacccaccagagtgatgtgtggagttatggtgtgactgtgtgggagctgatgacttttggggccaaaccttacgatgggatcccagcccgggagatccctgacctgctggaaaagggggagcggctgccccagccccccatctgcaccattgatgtctacatgatcatggtcaaatgttggatgattgactctgaatgtcggccaagattccgggagttggtgtctgaattctcccgcatggccagggacccccagcgctttgtggtcatccagaatgaggacttgggcccagccagtcccttggacagcaccttctaccgctcactgctggaggacgatgacatgggggacctggtggatgctgaggagtatctggtaccccagcagggcttcttctgtccagaccctgccccgggcgctgggggcatggtccaccacaggcaccgcagctcatctaccaggagtggcggtggggacctgacactagggctggagccctctgaagaggaggcccccaggtctccactggcaccctccgaaggggctggctccgatgtatttgatggtgacctgggaatgggggcagccaaggggctgcaaagcctccccacacatgaccccagccctctacagcggtacagtgaggaccccacagtacccctgccctctgagactgatggctacgttgcccccctgacctgcagcccccagcctgaatatgtgaaccagccagatgttcggccccagcccccttcgccccgagagggccctctgcctgctgcccgacctgctggtgccactctggaaaggcccaagactctctccccagggaagaatggggtcgtcaaagacgtttttgcctttgggggtgccgtggagaaccccgagtacttgacaccccagggaggagctgcccctcagccccaccctcctcctgccttcagcccagccttcgacaacctctattactgggaccaggacccaccagagcggggggctccacccagcaccttcaaagggacacctacggcagagaacccagagtacctgggtctggacgtgccagtgtgaaccagaaggccaagtccgcagaagccctgatgtgtcctcagggagcagggaaggcctgacttctgctggcatcaagaggtgggagggccctccgaccacttccaggggaacctgccatgccaggaacctgtcctaaggaaccttccttcctgcttgagttcccagatggctggaaggggtccagcctcgttggaagaggaacagcactggggagtctttgtggattctgaggccctgcccaatgagactctagggtccagtggatgccacagcccagcttggccctttccttccagatcctgggtactgaaagccttagggaagctggcctgagaggggaagcggccctaagggagtgtctaagaacaaaagcgacccattcagagactgtccctgaaacctagtactgccccccatgaggaaggaacagcaatggtgtcagtatccaggctttgtacagagtgcttttctgtttagtttttactttttttgttttgtttttttaaagatgaaataaagacccagggggagaatgggtgttgtatggggaggcaagtgtggggggtccttctccacacccactttgtccatttgcaaatatattttggaaaacagcta

SEQ ID NO: 146348 - protein, 363 aa, Artificial Sequence
  derived and/or modified sequence
MVGSPDTVGMNYGSYMEEKHMPPPNMTTNERRVIVPADPTLWSTDHVRQWLEWAVKEYGLPDVNILLFQNIDGKELCKMTKDDFQRLTPSYNADILLSHLHYLRETPLPHLTSDDVDKALQNSPRLMHARNTDLPYEPPRRSAWTGHGHPTPQSKAAQPSPSTVPKTEDQRPQLDPYQILGPTSSRLANPGSGQIQLWQFLLELLSDSSNSSCITWEGTNGEFKMTDPDEVARRWGERKSKPNMNYDKLSRALRYYYDKNIMTKVHGKRYAYKFDFHGIAQALQPHPPESSLYKYPSDLPYMGSYHAHPQKMNFVAPHPPALPVTSSSFFAAPNPYWNSPTGGIYPNTRLPTSHMPSHLGTYY

SEQ ID NO: 146349 - protein, 462 aa, Artificial Sequence
  derived and/or modified sequence
MIQTVPDPAAHIKEALSVVSEDQSLFECAYGTPHLAKTEMTASSSSDYGQTSKMSPRVPQQDWLSQPPARVTIKMECNPSQVNGSRNSPDECSVAKGGKMVGSPDTVGMNYGSYMEEKHMPPPNMTTNERRVIVPADPTLWSTDHVRQWLEWAVKEYGLPDVNILLFQNIDGKELCKMTKDDFQRLTPSYNADILLSHLHYLRETPLPHLTSDDVDKALQNSPRLMHARNTDLPYEPPRRSAWTGHGHPTPQSKAAQPSPSTVPKTEDQRPQLDPYQILGPTSSRLANPGSGQIQLWQFLLELLSDSSNSSCITWEGTNGEFKMTDPDEVARRWGERKSKPNMNYDKLSRALRYYYDKNIMTKVHGKRYAYKFDFHGIAQALQPHPPESSLYKYPSDLPYMGSYHAHPQKMNFVAPHPPALPVTSSSFFAAPNPYWNSPTGGIYPNTRLPTSHMPSHLGTYY

SEQ ID NO: 146350 - DNA, 5042 bp, Artificial Sequence
  derived and/or modified sequence
gttttcacttggtcggaatggggagagtgtgcaagagatcgctgcgggacaggttcctagagatcgctccgggacggtcgtgacggcccccgagggacatgagagaagaggagcggcgctcaggttattccaggatctttggagacccgaggaaagccgtgttgaccaaaagcaagacaaatgactcacagagaaaaaagatggcagaaccaagggcaactaaagccgtcaggttctgaacagctggtagatgggctggcttactgaaggacatgattcagactgtcccggacccagcagctcatatcaaggaagccttatcagttgtgagtgaggaccagtcgttgtttgagtgtgcctacggaacgccacacctggctaagacagagatgaccgcgtcctcctccagcgactatggacagacttccaagatgagcccacgcgtccctcagcaggattggctgtctcaacccccagccagggtcaccatcaaaatggaatgtaaccctagccaggtgaatggctcaaggaactctcctgatgaatgcagtgtggccaaaggcgggaagatggtgggcagcccagacaccgttgggatgaactacggcagctacatggaggagaagcacatgccacccccaaacatgaccacgaacgagcgcagagttatcgtgccagcagatcctacgctatggagtacagaccatgtgcggcagtggctggagtgggcggtgaaagaatatggccttccagacgtcaacatcttgttattccagaacatcgatgggaaggaactgtgcaagatgaccaaggacgacttccagaggctcacccccagctacaacgccgacatccttctctcacatctccactacctcagagagactcctcttccacatttgacttcagatgatgttgataaagccttacaaaactctccacggttaatgcatgctagaaacacagatttaccatatgagccccccaggagatcagcctggaccggtcacggccaccccacgccccagtcgaaagctgctcaaccatctccttccacagtgcccaaaactgaagaccagcgtcctcagttagatccttatcagattcttggaccaacaagtagccgccttgcaaatccaggcagtggccagatccagctttggcagttcctcctggagctcctgtcggacagctccaactccagctgcatcacctgggaaggcaccaacggggagttcaagatgacggatcccgacgaggtggcccggcgctggggagagcggaagagcaaacccaacatgaactacgataagctcagccgcgccctccgttactactatgacaagaacatcatgaccaaggtccatgggaagcgctacgcctacaagttcgacttccacgggatcgcccaggccctccagccccaccccccggagtcatctctgtacaagtacccctcagacctcccgtacatgggctcctatcacgcccacccacagaagatgaactttgtggcgccccaccctccagccctccccgtgacatcttccagtttttttgctgccccaaacccatactggaattcaccaactgggggtatataccccaacactaggctccccaccagccatatgccttctcatctgggcacttactactaaagacctggcggaggcttttcccatcagcgtgcattcaccagcccatcgccacaaactctatcggagaacatgaatcaaaagtgcctcaagaggaatgaaaaaagctttactggggctggggaaggaagccggggaagagatccaaagactcttgggagggagttactgaagtcttactacagaaatgaggaggatgctaaaaatgtcacgaatatggacatatcatctgtggactgaccttgtaaaagacagtgtatgtagaagcatgaagtcttaaggacaaagtgccaaagaaagtggtcttaagaaatgtataaactttagagtagagtttggaatcccactaatgcaaactgggatgaaactaaagcaatagaaacaacacagttttgacctaacataccgtttataatgccattttaaggaaaactacctgtatttaaaaatagaaacatatcaaaaacaagagaaaagacacgagagagactgtggcccatcaacagacgttgatatgcaactgcatggcatgtgctgttttggttgaaatcaaatacattccgtttgatggacagctgtcagctttctcaaactgtgaagatgacccaaagtttccaactcctttacagtattaccgggactatgaactaaaaggtgggactgaggatgtgtatagagtgagcgtgtgattgtagacagaggggtgaagaaggaggaggaagaggcagagaaggaggagaccagggctgggaaagaaacttctcaagcaatgaagactggactcaggacatttggggactgtgtacaatgagttatggagactcgagggttcatgcagtcagtgttataccaaacccagtgttaggagaaaggacacagcgtaatggagaaaggggaagtagtagaattcagaaacaaaaatgcgcatctctttctttgtttgtcaaatgaaaattttaactggaattgtctgatatttaagagaaacattcaggacctcatcattatgtgggggctttgttctccacagggtcaggtaagagatggccttcttggctgccacaatcagaaatcacgcaggcattttgggtaggcggcctccagttttcctttgagtcgcgaacgctgtgcgtttgtcagaatgaagtatacaagtcaatgtttttccccctttttatataataattatataacttatgcatttatacactacgagttgatctcggccagccaaagacacacgacaaaagagacaatcgatataatgtggccttgaattttaactctgtatgcttaatgtttacaatatgaagttattagttcttagaatgcagaatgtatgtaataaaataagcttggcctagcatggcaaatcagatttatacaggagtctgcatttgcactttttttagtgactaaagttgcttaatgaaaacatgtgctgaatgttgtggattttgtgttataatttactttgtccaggaacttgtgcaagggagagccaaggaaataggatgtttggcacccaaatggcgtcagcctctccaggtccttcttgcctcccctcctgtcttttatttctagccccttttggaacagaaggaccccgggtttcacattggagcctccatatttatgcctggaatggaaagaggcctatgaagctggggttgtcattgagaaattctagttcagcacctggtcacaaatcacccttaattcctgctatgattaaaatacatttgttgaacagtgaacaagctaccactcgtaaggcaaactgtattattactggcaaataaagcgtcatggatagctgcaatttctcactttacagaaacaagggataacgtctagatttgctgcggggtttctctttcaggagctctcactaggtagacagctttagtcctgctacatcagagttacctgggcactgtggcttgggattcactagccctgagcctgatgttgctggctatcccttgaagacaatgtttatttccataatctagagtcagtttccctgggcatcttttctttgaatcacaaatgctgccaaccttggtccaggtgaaggcaactcaaaaggtgaaaatacaaggtgaccgtgcgaaggcgctagccgaaacatcttagctgaataggtttctgaactggcccttttcatagctgtttcagggcctgtttttttcacgttgcagtccttttgctatgattatgtgaagttgccaaacctctgtgctgtggatgttttggcagtgggctttgaagtcggcaggacacgattaccaatgctcctgacaccccgtgtcatttggattagacggagcccaaccatccatcattttgcagcagcctgggaaggcccacaaagtgcccgtatctccttagggaaaataaataaatacaatcatgaaagctggcagttaggctgacccaaactgtgctaatggaaaagatcagtcatttttattttggaatgcaaagtcaagacacacctacattcttcatagaaatacacatttacttggataatcactcagttctctcttcaagactgtctcatgagcaagatcataaaaacaagacatgattatcatattcaattttaacagatgttttccattagatccctcaaccctccacccccagtccaggttattagcaagtcttatgagcaactgggataattttggataacatgataatactgagttccttcaaatacataattcttaaattgtttcaaaatggcattaactctctgttactgttgtaatctaattccaaagccccctccaggtcatattcataattgcatgaaccttttctctctgtttgtccctgtctcttggcttgccctgatgtatactcagactcctgtacaatcttactcctgctggcaagagatttgtcttcttttcttgtcttcaattggctttcgggccttgtatgtggtaaaatcaccaaatcacagtcaagactgtgtttttgttcctagtttgatgcccttatgtcccggaggggttcacaaagtgctttgtcaggactgctgcagttagaaggctcactgcttctcctaagccttctgcacagatgtggcacctgcaacccaggagcaggagccggaggagctgccctctgacagcaggtgcagcagagatggctacagctcaggagctgggaaggtgatggggcacagggaaagcacagatgttctgcagcgccccaaagtgacccattgcctggagaaagagaagaaaatattttttaaaaagctagtttatttagcttctcattaattcattcaaataaagtcgtgaggtgactaattagagaataaaaattactttggactactcaaaaatacaccaaaaaaaa

SEQ ID NO: 146351 - DNA, 1389 bp, Artificial Sequence
  derived and/or modified sequence
atgatccagaccgtgcccgaccccgccgcccacatcaaggaggccctgagcgtggtgagcgaggaccagagcctgttcgagtgcgcctacggcaccccccacctggccaagaccgagatgaccgccagcagcagcagcgactacggccagaccagcaagatgagccccagagtgccccagcaggactggctgagccagccccccgccagagtgaccatcaagatggagtgcaaccccagccaggtgaacggcagcagaaacagccccgacgagtgcagcgtggccaagggcggcaagatggtgggcagccccgacaccgtgggcatgaactacggcagctacatggaggagaagcacatgcccccccccaacatgaccaccaacgagagaagagtgatcgtgcccgccgaccccaccctgtggagcaccgaccacgtgagacagtggctggagtgggccgtgaaggagtacggcctgcccgacgtgaacatcctgctgttccagaacatcgacggcaaggagctgtgcaagatgaccaaggacgacttccagagactgacccccagctacaacgccgacatcctgctgagccacctgcactacctgagagagacccccctgccccacctgaccagcgacgacgtggacaaggccctgcagaacagccccagactgatgcacgccagaaacaccgacctgccctacgagccccccagaagaagcgcctggaccggccacggccaccccaccccccagagcaaggccgcccagcccagccccagcaccgtgcccaagaccgaggaccagagaccccagctggacccctaccagatcctgggccccaccagcagcagactggccaaccccggcagcggccagatccagctgtggcagttcctgctggagctgctgagcgacagcagcaacagcagctgcatcacctgggagggcaccaacggcgagttcaagatgaccgaccccgacgaggtggccagaagatggggcgagagaaagagcaagcccaacatgaactacgacaagctgagcagagccctgagatactactacgacaagaacatcatgaccaaggtgcacggcaagagatacgcctacaagttcgacttccacggcatcgcccaggccctgcagccccacccccccgagagcagcctgtacaagtaccccagcgacctgccctacatgggcagctaccacgcccacccccagaagatgaacttcgtggccccccacccccccgccctgcccgtgaccagcagcagcttcttcgccgcccccaacccctactggaacagccccaccggcggcatctaccccaacaccagactgcccaccagccacatgcccagccacctgggcacctactactag

SEQ ID NO: 146352 - DNA, 1389 bp, Artificial Sequence
  derived and/or modified sequence
atgatccagacagtccctgatcccgccgcgcacatcaaggaagccctgagcgttgtgtccgaagatcagagcctgtttgagtgtgcctatggcacaccacacctggccaaaaccgagatgactgcgtctagctcttccgactatggccagacatctaagatgagccctagagtccctcagcaagattggctgagccagcccccagctagagtgaccattaagatggaatgtaacccctcccaggtgaacggatctagaaattccccagatgaatgctctgtcgccaaaggagggaaaatggttggaagcccagacacagtcgggatgaattatgggagctatatggaagagaagcatatgcctccccccaatatgacgacaaacgaaagacgtgtgatcgtgcctgcagatcctacgctgtggtctaccgaccacgtccgacaatggttagaatgggctgtgaaagaatatggcctccccgatgtgaacatactcttgttccagaatatcgacggtaaggaactgtgcaagatgaccaaagatgactttcagaggctcaccccatcatacaacgccgacattttgctgagccacttacactatctgcgcgaaacaccactcccacacctcacatctgacgacgttgataaggcattacagaactcgccaaggttgatgcatgcacgcaatactgatctgccttatgagcctccccgccggagtgcatggactggacacgggcacccaaccccacagagcaaagcggcccagcccagtccttccacagtgcctaaaacggaggatcagcgacctcaactcgacccataccagatcctgggccctacaagtagccgtctagccaatcccggcagcggacagattcagctatggcagttcctgctggaacttctgagcgattcttccaactcctcttgtataacctgggagggaactaatggagaattcaagatgactgatccggacgaagttgctcgccgatggggcgagcggaagtccaaaccgaacatgaactacgacaaactttcacgggccttacgctattattatgacaaaaacattatgaccaaagtccacggcaagcggtacgcctacaaatttgacttccacggcatcgcccaagccctgcaacctcatccccccgaaagctccctgtataagtatccatcagacctgccttatatgggcagctaccacgctcatccacaaaagatgaatttcgtggcaccccacccacccgcattgcctgtaacatcttcaagcttttttgctgctcccaatccatactggaactccccgactggaggcatctacccaaacactagactgccgacttctcatatgccatcccatctgggtacttactactag

SEQ ID NO: 146353 - DNA, 1389 bp, Artificial Sequence
  derived and/or modified sequence
atgattcagaccgtccctgacccagccgcccacattaaggaggccctgtccgtcgtgtcagaagatcagagtctctttgagtgtgcatacggcaccccccatttggcaaagacagaaatgacagctagttcttcgtccgattacggccagacaagcaagatgagtcctagggtgccacagcaggattggttgtctcagccccccgctcgggttactatcaaaatggaatgcaaccccagtcaggtgaatggctctcgcaacagcccagatgaatgctctgttgcgaaggggggcaagatggtgggaagccccgacacagtgggcatgaactatggatcctacatggaggagaaacacatgcctccaccaaacatgacgacgaacgaacgtcgcgtgatcgtgccggcagaccccaccctttggtcaactgaccacgtgaggcaatggttagagtgggccgtgaaagaatacggactgccggacgtcaacattctcctcttccagaatatcgatgggaaagagttgtgtaagatgactaaagacgacttccagcgcttaacacctagttacaatgcagacattctgttaagccatcttcactacttacgagaaacgcctctgccacacctgacgagtgatgatgtggacaaggcactgcagaacagccctcgcttgatgcacgcaaggaatacagatcttccgtacgagccccctcgtcggagcgcatggaccgggcacggtcaccctacaccccagagtaaggctgctcagccgtccccttcaacagtaccgaagaccgaagatcagaggcctcaactagatccttaccagattctggggcccaccagctctcgcttagccaaccctggcagtggccagattcagctttggcagtttcttctggagctgctgagtgactcctctaactcaagttgtataacgtgggaagggacaaacggcgagttcaagatgacagacccggacgaggtagcccggcggtggggcgagaggaaaagtaagccgaatatgaactacgacaagctgagcagagcgctgcgctactactatgacaaaaatatcatgacaaaggttcacggtaagcggtacgcatacaaattcgattttcacggaattgcccaagcgctgcagcctcaccccccggaatccagtctctataagtatccctcagatttaccctatatgggttcataccacgcccatccccagaagatgaactttgtcgcaccccacccccctgcgctgccggtgactagctctagcttttttgccgcgccaaatccatattggaactccccaaccggcggcatctatccaaacacgaggctgcccaccagccatatgccttcccatctgggcacctactactag

SEQ ID NO: 146354 - DNA, 1389 bp, Artificial Sequence
  derived and/or modified sequence
atgatccagacagtgcctgaccctgctgcccacatcaaggaggccctgtctgtggtgtctgaggaccagagcctgtttgaatgtgcctacggcaccccccacctggccaagacagagatgacagccagcagcagcagtgactatggccagaccagcaagatgagcccccgggtgccccagcaggactggctgagccagcccccagcccgggtgaccatcaagatggagtgcaaccccagccaggtgaatggcagcaggaacagcccagatgaatgttctgtggccaagggcggcaagatggtgggcagcccagacacagtgggcatgaactacggcagctacatggaggagaagcacatgcccccacccaacatgaccaccaatgaaagaagagtgattgtgcctgctgaccccaccctgtggagcacagaccacgtgcggcagtggctggagtgggccgtgaaggagtatggcctgcctgatgtgaacatcctgctcttccagaacattgatggcaaggagctgtgcaagatgaccaaggatgacttccagaggctgacccccagctacaatgctgacatcctgctgagccacctgcactacctgcgggagacccccctgccccacctgaccagtgatgatgtggacaaggccctgcagaacagcccccggctgatgcacgccaggaacacagacctgccctatgagcccccaagaagaagtgcctggacaggccacggccaccccaccccccagagcaaggccgcccagcccagccccagcacagtgcccaagacagaggaccagaggccccagctggacccctaccagatcctgggccccaccagcagccggctggccaaccctggcagcggccagatccagctgtggcagttcctgctggagctgctgagtgacagcagcaacagcagctgcatcacctgggagggcaccaatggagagttcaagatgacagatcctgatgaggtggcccggcgctggggcgagaggaagagcaagcccaacatgaactatgacaagctgagccgggccctgcgctactactatgacaagaacatcatgaccaaggtgcacggcaagagatatgcctacaagtttgacttccacggcatcgcccaggccctgcagccccaccccccagagagcagcctgtacaagtaccccagcgacctgccctacatgggcagctaccacgcccacccccagaagatgaactttgtggccccccaccccccagccctgcctgtgaccagcagcagcttctttgctgcccccaacccctactggaacagccccaccggcggcatctaccccaacacccggctgcccaccagccacatgcccagccacctgggcacctactactag

SEQ ID NO: 146355 - DNA, 1389 bp, Artificial Sequence
  derived and/or modified sequence
atgatccagaccgtgcccgaccccgccgcccacatcaaggaggccctcagtgtagtgtccgaggatcagagcttgttcgagtgcgcatacggtacgcctcacctggctaaaaccgagatgacagcgtccagcagcagcgactatggccaaacatctaagatgtccccgcgcgtcccccagcaggattggttatcacagccacccgctcgagtgacaatcaaaatggagtgtaatccgagccaggtgaatggctccagaaactcccccgacgagtgttccgtggccaagggcgggaagatggttggttctccagataccgtgggtatgaattacggctcctacatggaagagaagcatatgccaccccccaacatgactaccaacgagaggcgggtcatcgtacccgcagacccaacactttggtcaacggaccacgtacggcagtggctggaatgggcagtaaaagagtatgggttgcccgatgtcaatatcttgcttttccaaaatattgatggtaaagagctgtgtaagatgaccaaagacgactttcagaggttaaccccttcttataacgctgacatcctgttatcacacctgcactatctccgggagacgccccttccacacctgacatcagacgatgtggacaaagcacttcagaactcgccacgactcatgcacgcccgaaacactgatctcccgtacgaacctccacgtaggagcgcctggaccggacatggccacccaactccgcagtcgaaagcagctcagccctctccaagtactgtacccaagactgaggatcaacggccgcagcttgacccatatcaaatccttggacccacaagctcacggctggcaaaccctgggagcggtcaaatacagctgtggcaattcttgctagagttgttaagcgatagctctaactcgtcctgtatcacatgggaaggaaccaatggtgagttcaagatgacagacccggacgaagtcgctcgccgctggggcgaaaggaagtctaaaccaaacatgaactacgacaagttaagtcgcgctctgcggtattattacgataagaacatcatgactaaagtgcacggaaagcggtatgcctacaaatttgatttccacggcattgcccaggccttgcagccgcatcctccagaatcctcactttacaaatatccatccgacctcccctatatggggagctatcacgctcacccccagaagatgaatttcgtagccccacacccacctgcactgcctgtcacttccagttctttctttgccgctcccaatccttattggaacagcccaaccggcgggatctaccccaacaccaggttgccaacatcccatatgccctcccatcttggcacttattactag

SEQ ID NO: 146356 - DNA, 1389 bp, Artificial Sequence
  derived and/or modified sequence
atgatccagaccgtgcccgaccccgccgcccacatcaaggaggccttgagtgtggtgtcggaagatcagtccctgtttgagtgcgcctacggcaccccacacctggctaagacggaaatgaccgcctctagttcgagcgactatgggcagactagtaagatgtcaccaagagtgccacaacaggattggctgtctcagccgcccgctcgcgtcacaatcaagatggagtgtaacccctctcaagtcaatggctctcggaactcaccagacgagtgcagcgttgctaagggagggaagatggtggggtcccccgacactgtgggtatgaattacgggtcctatatggaagaaaaacacatgcccccaccaaacatgacgacgaatgaaaggagagtcatcgtccctgccgaccccaccctttggtccaccgatcacgtccgacaatggctcgaatgggcagtcaaagagtatgggttacccgatgtcaacattctgttgtttcagaacatcgacggcaaggagctgtgtaaaatgaccaaagatgattttcaaaggctgaccccctcctataatgctgatatcttactgagtcacctccactatcttagggagacacctctccctcatttgacatcagatgatgtagacaaggcactgcagaacagccctaggctgatgcacgccagaaacactgacttgccatacgaacccccccgccggtctgcctggaccggacatggccacccaacaccccagtccaaagcagcacagccatcacccagtacagtgcctaagactgaggaccagcggccccaattagatccgtaccagattctcggacccacttcgtctaggctggcgaatccaggttctggacaaatccagctctggcagtttctcctcgaactgctgagtgacagcagcaacagctcttgcattacctgggaggggacaaacggagaatttaaaatgactgaccctgatgaggtcgccagaaggtggggcgaaaggaagtctaagcccaatatgaattacgataagctatcccgggcactgaggtattactatgacaagaacattatgaccaaggtgcacgggaaacgatatgcctacaagttcgactttcacggtatcgctcaagccctgcaaccacaccctcctgagtcttcattgtacaaataccccagcgatctcccatatatgggcagctaccacgctcacccacaaaagatgaactttgtggcgcctcaccctccagctctccctgttactagttcaagcttctttgcagcccccaatccatactggaattcacctactggtggcatttaccccaatacccggctgccgacatcccatatgcccagtcacctcggcacctactactag

SEQ ID NO: 146357 - DNA, 1389 bp, Artificial Sequence
  derived and/or modified sequence
atgattcagaccgtccccgaccctgctgctcacataaaagaggcattgagcgtagtctcagaagaccagtctttgtttgagtgcgcatatggaacccctcatctggccaagaccgagatgacggcgtcatcttcttctgattatggccaaacttcaaaaatgtctcccagggtaccccagcaggactggttgtcacagccacctgcaagggtcacaatcaagatggagtgcaatcctagtcaggtcaacggctcacgaaacagccctgacgagtgttcagtcgcaaaaggcggaaagatggtcggttcccctgatactgtaggcatgaactatggcagctacatggaggagaaacacatgcctccacctaacatgacgaccaatgagaggagggtgatcgtacctgctgaccctactctgtggagcaccgatcacgtgcggcaatggcttgagtgggccgtcaaggagtacggcctgccagatgttaacatcctgctgtttcagaatatcgatggcaaagagctctgtaaaatgacaaaagatgacttccagcggctgaccccgtcctataatgccgatatcttgctgtcacatctgcattacttacgtgaaaccccattgccccacctgaccagcgatgatgttgacaaggccctgcaaaactctcctcggttaatgcacgcccgtaatactgacctgccttacgagcccccacgcagaagcgcctggacaggtcacggtcatccgaccccccagtcaaaggctgcgcagccatcaccaagcactgttcccaaaacagaagaccaaagaccgcagctcgacccctaccagattcttgggcctacttctagtagactggccaaccccggttctggccaaatacagctgtggcagtttcttcttgagctgctcagcgatagctcaaacagctcatgtataacctgggaagggacaaatggggagttcaaaatgaccgaccccgacgaagtggcaagacggtggggagaacgaaagtccaaacccaatatgaactacgataaactgtcccgtgccctgcgttattactatgataagaatatcatgacaaaggtacatggcaaaaggtatgcctacaagttcgatttccatggtatcgctcaagctctgcaaccacatccccctgaaagctcgctgtacaaatacccgagcgatttgccttatatgggctcgtaccacgcccatccacagaagatgaattttgttgctcctcatccacctgcactcccagtgacttcttcttccttttttgccgcacccaatccttactggaatagccccacaggtggtatttaccccaacaccagactccccacctctcatatgccgagtcatctggggacttattactag

SEQ ID NO: 146358 - DNA, 1389 bp, Artificial Sequence
  derived and/or modified sequence
atgattcaaacagttcccgatcccgcagctcacataaaagaagccctgtcagtcgtgagtgaggaccaatcgttattcgaatgcgcctacggcacacctcacctggcaaaaacagagatgacagcctcctcatctagcgactacggtcaaacaagtaaaatgtcaccccgtgtgccccagcaggactggttgagccagcctccagccagagtcaccatcaagatggagtgcaacccttcgcaggtgaatggttcccgcaatagccccgacgaatgcagtgtggccaaggggggtaagatggtaggatctcccgacaccgtggggatgaattacggcagctatatggaagagaaacatatgcctccccctaatatgacaacaaatgagcgtcgggtcattgttcccgcagatccaactctctggtctaccgaccatgtccgccagtggctggaatgggccgtcaaggagtatggcttgccggacgttaatatcctgttatttcagaacattgacggaaaggagctgtgtaaaatgactaaggatgactttcagagattaactccatcttacaatgccgatatactgctcagccacctgcattaccttcgcgagacccctctgccccatcttaccagcgatgatgtggacaaggcattgcaaaattcacctcgcctgatgcatgccagaaataccgatctgccctatgagcccccacgaagatctgcttggaccggccatggccatcccacccctcagtccaaagcggcacagcctagcccttccaccgttcccaaaaccgaagaccagcggcctcagctcgacccctatcagatcctggggcctacttcttctcgtctcgccaaccccggatccggccaaattcagctatggcagtttttgctcgagctgctcagtgattcctctaattcctcttgtattacttgggaaggtaccaacggcgaatttaagatgactgatcccgacgaggttgcgcgaaggtggggggagagaaagagcaagccaaacatgaactatgacaagcttagtagggctctgagatactattacgacaagaacattatgacaaaggtgcacggtaaacgctacgcttataaattcgattttcatggaatcgcccaggccctgcagccccaccccccagagagctcactctacaaataccccagcgacctgccttatatgggctcatatcacgcacaccctcagaagatgaattttgtggcccctcaccctcccgctttaccagtcacctcgagttcttttttcgcagccccaaatccatattggaattcgcccacaggtggtatttaccccaataccaggctgcccacaagccatatgccatcacatctgggaacctattactag

SEQ ID NO: 146359 - DNA, 4651 bp, Artificial Sequence
  derived and/or modified sequence
aaagcaagacaaatgactcacagagaaaaaagatggcagaaccaagggcaactaaagccgtcaggttctgaacagctggtagatgggctggcttactgaaggacatgattcagactgtcccggacccagcagctcatatcaaggaactctcctgatgaatgcagtgtggccaaaggcgggaagatggtgggcagcccagacaccgttgggatgaactacggcagctacatggaggagaagcacatgccacccccaaacatgaccacgaacgagcgcagagttatcgtgccagcagatcctacgctatggagtacagaccatgtgcggcagtggctggagtgggcggtgaaagaatatggccttccagacgtcaacatcttgttattccagaacatcgatgggaaggaactgtgcaagatgaccaaggacgacttccagaggctcacccccagctacaacgccgacatccttctctcacatctccactacctcagagagactcctcttccacatttgacttcagatgatgttgataaagccttacaaaactctccacggttaatgcatgctagaaacacagatttaccatatgagccccccaggagatcagcctggaccggtcacggccaccccacgccccagtcgaaagctgctcaaccatctccttccacagtgcccaaaactgaagaccagcgtcctcagttagatccttatcagattcttggaccaacaagtagccgccttgcaaatccaggcagtggccagatccagctttggcagttcctcctggagctcctgtcggacagctccaactccagctgcatcacctgggaaggcaccaacggggagttcaagatgacggatcccgacgaggtggcccggcgctggggagagcggaagagcaaacccaacatgaactacgataagctcagccgcgccctccgttactactatgacaagaacatcatgaccaaggtccatgggaagcgctacgcctacaagttcgacttccacgggatcgcccaggccctccagccccaccccccggagtcatctctgtacaagtacccctcagacctcccgtacatgggctcctatcacgcccacccacagaagatgaactttgtggcgccccaccctccagccctccccgtgacatcttccagtttttttgctgccccaaacccatactggaattcaccaactgggggtatataccccaacactaggctccccaccagccatatgccttctcatctgggcacttactactaaagacctggcggaggcttttcccatcagcgtgcattcaccagcccatcgccacaaactctatcggagaacatgaatcaaaagtgcctcaagaggaatgaaaaaagctttactggggctggggaaggaagccggggaagagatccaaagactcttgggagggagttactgaagtcttactacagaaatgaggaggatgctaaaaatgtcacgaatatggacatatcatctgtggactgaccttgtaaaagacagtgtatgtagaagcatgaagtcttaaggacaaagtgccaaagaaagtggtcttaagaaatgtataaactttagagtagagtttggaatcccactaatgcaaactgggatgaaactaaagcaatagaaacaacacagttttgacctaacataccgtttataatgccattttaaggaaaactacctgtatttaaaaatagaaacatatcaaaaacaagagaaaagacacgagagagactgtggcccatcaacagacgttgatatgcaactgcatggcatgtgctgttttggttgaaatcaaatacattccgtttgatggacagctgtcagctttctcaaactgtgaagatgacccaaagtttccaactcctttacagtattaccgggactatgaactaaaaggtgggactgaggatgtgtatagagtgagcgtgtgattgtagacagaggggtgaagaaggaggaggaagaggcagagaaggaggagaccagggctgggaaagaaacttctcaagcaatgaagactggactcaggacatttggggactgtgtacaatgagttatggagactcgagggttcatgcagtcagtgttataccaaacccagtgttaggagaaaggacacagcgtaatggagaaaggggaagtagtagaattcagaaacaaaaatgcgcatctctttctttgtttgtcaaatgaaaattttaactggaattgtctgatatttaagagaaacattcaggacctcatcattatgtgggggctttgttctccacagggtcaggtaagagatggccttcttggctgccacaatcagaaatcacgcaggcattttgggtaggcggcctccagttttcctttgagtcgcgaacgctgtgcgtttgtcagaatgaagtatacaagtcaatgtttttccccctttttatataataattatataacttatgcatttatacactacgagttgatctcggccagccaaagacacacgacaaaagagacaatcgatataatgtggccttgaattttaactctgtatgcttaatgtttacaatatgaagttattagttcttagaatgcagaatgtatgtaataaaataagcttggcctagcatggcaaatcagatttatacaggagtctgcatttgcactttttttagtgactaaagttgcttaatgaaaacatgtgctgaatgttgtggattttgtgttataatttactttgtccaggaacttgtgcaagggagagccaaggaaataggatgtttggcacccaaatggcgtcagcctctccaggtccttcttgcctcccctcctgtcttttatttctagccccttttggaacagaaggaccccgggtttcacattggagcctccatatttatgcctggaatggaaagaggcctatgaagctggggttgtcattgagaaattctagttcagcacctggtcacaaatcacccttaattcctgctatgattaaaatacatttgttgaacagtgaacaagctaccactcgtaaggcaaactgtattattactggcaaataaagcgtcatggatagctgcaatttctcactttacagaaacaagggataacgtctagatttgctgcggggtttctctttcaggagctctcactaggtagacagctttagtcctgctacatcagagttacctgggcactgtggcttgggattcactagccctgagcctgatgttgctggctatcccttgaagacaatgtttatttccataatctagagtcagtttccctgggcatcttttctttgaatcacaaatgctgccaaccttggtccaggtgaaggcaactcaaaaggtgaaaatacaaggtgaccgtgcgaaggcgctagccgaaacatcttagctgaataggtttctgaactggcccttttcatagctgtttcagggcctgtttttttcacgttgcagtccttttgctatgattatgtgaagttgccaaacctctgtgctgtggatgttttggcagtgggctttgaagtcggcaggacacgattaccaatgctcctgacaccccgtgtcatttggattagacggagcccaaccatccatcattttgcagcagcctgggaaggcccacaaagtgcccgtatctccttagggaaaataaataaatacaatcatgaaagctggcagttaggctgacccaaactgtgctaatggaaaagatcagtcatttttattttggaatgcaaagtcaagacacacctacattcttcatagaaatacacatttacttggataatcactcagttctctcttcaagactgtctcatgagcaagatcataaaaacaagacatgattatcatattcaattttaacagatgttttccattagatccctcaaccctccacccccagtccaggttattagcaagtcttatgagcaactgggataattttggataacatgataatactgagttccttcaaatacataattcttaaattgtttcaaaatggcattaactctctgttactgttgtaatctaattccaaagccccctccaggtcatattcataattgcatgaaccttttctctctgtttgtccctgtctcttggcttgccctgatgtatactcagactcctgtacaatcttactcctgctggcaagagatttgtcttcttttcttgtcttcaattggctttcgggccttgtatgtggtaaaatcaccaaatcacagtcaagactgtgtttttgttcctagtttgatgcccttatgtcccggaggggttcacaaagtgctttgtcaggactgctgcagttagaaggctcactgcttctcctaagccttctgcacagatgtggcacctgcaacccaggagcaggagccggaggagctgccctctgacagcaggtgcagcagagatggctacagctcaggagctgggaaggtgatggggcacagggaaagcacagatgttctgcagcgccccaaagtgacccattgcctggagaaagagaagaaaatattttttaaaaagctagtttatttagcttctcattaattcattcaaataaagtcgtgaggtgactaattagagaataaaaattactttggactactcaaaaatacaccaaa

SEQ ID NO: 146360 - DNA, 4914 bp, Artificial Sequence
  derived and/or modified sequence
gttattccaggatctttggagacccgaggaaagccgtgttgaccaaaagcaagacaaatgactcacagagaaaaaagatggcagaaccaagggcaactaaagccgtcaggttctgaacagctggtagatgggctggcttactgaaggacatgattcagactgtcccggacccagcagctcatatcaaggaagccttatcagttgtgagtgaggaccagtcgttgtttgagtgtgcctacggaacgccacacctggctaagacagagatgaccgcgtcctcctccagcgactatggacagacttccaagatgagcccacgcgtccctcagcaggattggctgtctcaacccccagccagggtcaccatcaaaatggaatgtaaccctagccaggtgaatggctcaaggaactctcctgatgaatgcagtgtggccaaaggcgggaagatggtgggcagcccagacaccgttgggatgaactacggcagctacatggaggagaagcacatgccacccccaaacatgaccacgaacgagcgcagagttatcgtgccagcagatcctacgctatggagtacagaccatgtgcggcagtggctggagtgggcggtgaaagaatatggccttccagacgtcaacatcttgttattccagaacatcgatgggaaggaactgtgcaagatgaccaaggacgacttccagaggctcacccccagctacaacgccgacatccttctctcacatctccactacctcagagagactcctcttccacatttgacttcagatgatgttgataaagccttacaaaactctccacggttaatgcatgctagaaacacagatttaccatatgagccccccaggagatcagcctggaccggtcacggccaccccacgccccagtcgaaagctgctcaaccatctccttccacagtgcccaaaactgaagaccagcgtcctcagttagatccttatcagattcttggaccaacaagtagccgccttgcaaatccaggcagtggccagatccagctttggcagttcctcctggagctcctgtcggacagctccaactccagctgcatcacctgggaaggcaccaacggggagttcaagatgacggatcccgacgaggtggcccggcgctggggagagcggaagagcaaacccaacatgaactacgataagctcagccgcgccctccgttactactatgacaagaacatcatgaccaaggtccatgggaagcgctacgcctacaagttcgacttccacgggatcgcccaggccctccagccccaccccccggagtcatctctgtacaagtacccctcagacctcccgtacatgggctcctatcacgcccacccacagaagatgaactttgtggcgccccaccctccagccctccccgtgacatcttccagtttttttgctgccccaaacccatactggaattcaccaactgggggtatataccccaacactaggctccccaccagccatatgccttctcatctgggcacttactactaaagacctggcggaggcttttcccatcagcgtgcattcaccagcccatcgccacaaactctatcggagaacatgaatcaaaagtgcctcaagaggaatgaaaaaagctttactggggctggggaaggaagccggggaagagatccaaagactcttgggagggagttactgaagtcttactacagaaatgaggaggatgctaaaaatgtcacgaatatggacatatcatctgtggactgaccttgtaaaagacagtgtatgtagaagcatgaagtcttaaggacaaagtgccaaagaaagtggtcttaagaaatgtataaactttagagtagagtttggaatcccactaatgcaaactgggatgaaactaaagcaatagaaacaacacagttttgacctaacataccgtttataatgccattttaaggaaaactacctgtatttaaaaatagaaacatatcaaaaacaagagaaaagacacgagagagactgtggcccatcaacagacgttgatatgcaactgcatggcatgtgctgttttggttgaaatcaaatacattccgtttgatggacagctgtcagctttctcaaactgtgaagatgacccaaagtttccaactcctttacagtattaccgggactatgaactaaaaggtgggactgaggatgtgtatagagtgagcgtgtgattgtagacagaggggtgaagaaggaggaggaagaggcagagaaggaggagaccagggctgggaaagaaacttctcaagcaatgaagactggactcaggacatttggggactgtgtacaatgagttatggagactcgagggttcatgcagtcagtgttataccaaacccagtgttaggagaaaggacacagcgtaatggagaaaggggaagtagtagaattcagaaacaaaaatgcgcatctctttctttgtttgtcaaatgaaaattttaactggaattgtctgatatttaagagaaacattcaggacctcatcattatgtgggggctttgttctccacagggtcaggtaagagatggccttcttggctgccacaatcagaaatcacgcaggcattttgggtaggcggcctccagttttcctttgagtcgcgaacgctgtgcgtttgtcagaatgaagtatacaagtcaatgtttttccccctttttatataataattatataacttatgcatttatacactacgagttgatctcggccagccaaagacacacgacaaaagagacaatcgatataatgtggccttgaattttaactctgtatgcttaatgtttacaatatgaagttattagttcttagaatgcagaatgtatgtaataaaataagcttggcctagcatggcaaatcagatttatacaggagtctgcatttgcactttttttagtgactaaagttgcttaatgaaaacatgtgctgaatgttgtggattttgtgttataatttactttgtccaggaacttgtgcaagggagagccaaggaaataggatgtttggcacccaaatggcgtcagcctctccaggtccttcttgcctcccctcctgtcttttatttctagccccttttggaacagaaggaccccgggtttcacattggagcctccatatttatgcctggaatggaaagaggcctatgaagctggggttgtcattgagaaattctagttcagcacctggtcacaaatcacccttaattcctgctatgattaaaatacatttgttgaacagtgaacaagctaccactcgtaaggcaaactgtattattactggcaaataaagcgtcatggatagctgcaatttctcactttacagaaacaagggataacgtctagatttgctgcggggtttctctttcaggagctctcactaggtagacagctttagtcctgctacatcagagttacctgggcactgtggcttgggattcactagccctgagcctgatgttgctggctatcccttgaagacaatgtttatttccataatctagagtcagtttccctgggcatcttttctttgaatcacaaatgctgccaaccttggtccaggtgaaggcaactcaaaaggtgaaaatacaaggtgaccgtgcgaaggcgctagccgaaacatcttagctgaataggtttctgaactggcccttttcatagctgtttcagggcctgtttttttcacgttgcagtccttttgctatgattatgtgaagttgccaaacctctgtgctgtggatgttttggcagtgggctttgaagtcggcaggacacgattaccaatgctcctgacaccccgtgtcatttggattagacggagcccaaccatccatcattttgcagcagcctgggaaggcccacaaagtgcccgtatctccttagggaaaataaataaatacaatcatgaaagctggcagttaggctgacccaaactgtgctaatggaaaagatcagtcatttttattttggaatgcaaagtcaagacacacctacattcttcatagaaatacacatttacttggataatcactcagttctctcttcaagactgtctcatgagcaagatcataaaaacaagacatgattatcatattcaattttaacagatgttttccattagatccctcaaccctccacccccagtccaggttattagcaagtcttatgagcaactgggataattttggataacatgataatactgagttccttcaaatacataattcttaaattgtttcaaaatggcattaactctctgttactgttgtaatctaattccaaagccccctccaggtcatattcataattgcatgaaccttttctctctgtttgtccctgtctcttggcttgccctgatgtatactcagactcctgtacaatcttactcctgctggcaagagatttgtcttcttttcttgtcttcaattggctttcgggccttgtatgtggtaaaatcaccaaatcacagtcaagactgtgtttttgttcctagtttgatgcccttatgtcccggaggggttcacaaagtgctttgtcaggactgctgcagttagaaggctcactgcttctcctaagccttctgcacagatgtggcacctgcaacccaggagcaggagccggaggagctgccctctgacagcaggtgcagcagagatggctacagctcaggagctgggaaggtgatggggcacagggaaagcacagatgttctgcagcgccccaaagtgacccattgcctggagaaagagaagaaaatattttttaaaaagctagtttatttagcttctcattaattcattcaaataaagtcgtgaggtgactaattagagaataaaaattactttggactactcaaaaatacaccaaa

SEQ ID NO: 146361 - DNA, 5034 bp, Artificial Sequence
  derived and/or modified sequence
gttttcacttggtcggaatggggagagtgtgcaagagatcgctgcgggacaggttcctagagatcgctccgggacggtcgtgacggcccccgagggacatgagagaagaggagcggcgctcaggttattccaggatctttggagacccgaggaaagccgtgttgaccaaaagcaagacaaatgactcacagagaaaaaagatggcagaaccaagggcaactaaagccgtcaggttctgaacagctggtagatgggctggcttactgaaggacatgattcagactgtcccggacccagcagctcatatcaaggaagccttatcagttgtgagtgaggaccagtcgttgtttgagtgtgcctacggaacgccacacctggctaagacagagatgaccgcgtcctcctccagcgactatggacagacttccaagatgagcccacgcgtccctcagcaggattggctgtctcaacccccagccagggtcaccatcaaaatggaatgtaaccctagccaggtgaatggctcaaggaactctcctgatgaatgcagtgtggccaaaggcgggaagatggtgggcagcccagacaccgttgggatgaactacggcagctacatggaggagaagcacatgccacccccaaacatgaccacgaacgagcgcagagttatcgtgccagcagatcctacgctatggagtacagaccatgtgcggcagtggctggagtgggcggtgaaagaatatggccttccagacgtcaacatcttgttattccagaacatcgatgggaaggaactgtgcaagatgaccaaggacgacttccagaggctcacccccagctacaacgccgacatccttctctcacatctccactacctcagagagactcctcttccacatttgacttcagatgatgttgataaagccttacaaaactctccacggttaatgcatgctagaaacacagatttaccatatgagccccccaggagatcagcctggaccggtcacggccaccccacgccccagtcgaaagctgctcaaccatctccttccacagtgcccaaaactgaagaccagcgtcctcagttagatccttatcagattcttggaccaacaagtagccgccttgcaaatccaggcagtggccagatccagctttggcagttcctcctggagctcctgtcggacagctccaactccagctgcatcacctgggaaggcaccaacggggagttcaagatgacggatcccgacgaggtggcccggcgctggggagagcggaagagcaaacccaacatgaactacgataagctcagccgcgccctccgttactactatgacaagaacatcatgaccaaggtccatgggaagcgctacgcctacaagttcgacttccacgggatcgcccaggccctccagccccaccccccggagtcatctctgtacaagtacccctcagacctcccgtacatgggctcctatcacgcccacccacagaagatgaactttgtggcgccccaccctccagccctccccgtgacatcttccagtttttttgctgccccaaacccatactggaattcaccaactgggggtatataccccaacactaggctccccaccagccatatgccttctcatctgggcacttactactaaagacctggcggaggcttttcccatcagcgtgcattcaccagcccatcgccacaaactctatcggagaacatgaatcaaaagtgcctcaagaggaatgaaaaaagctttactggggctggggaaggaagccggggaagagatccaaagactcttgggagggagttactgaagtcttactacagaaatgaggaggatgctaaaaatgtcacgaatatggacatatcatctgtggactgaccttgtaaaagacagtgtatgtagaagcatgaagtcttaaggacaaagtgccaaagaaagtggtcttaagaaatgtataaactttagagtagagtttggaatcccactaatgcaaactgggatgaaactaaagcaatagaaacaacacagttttgacctaacataccgtttataatgccattttaaggaaaactacctgtatttaaaaatagaaacatatcaaaaacaagagaaaagacacgagagagactgtggcccatcaacagacgttgatatgcaactgcatggcatgtgctgttttggttgaaatcaaatacattccgtttgatggacagctgtcagctttctcaaactgtgaagatgacccaaagtttccaactcctttacagtattaccgggactatgaactaaaaggtgggactgaggatgtgtatagagtgagcgtgtgattgtagacagaggggtgaagaaggaggaggaagaggcagagaaggaggagaccagggctgggaaagaaacttctcaagcaatgaagactggactcaggacatttggggactgtgtacaatgagttatggagactcgagggttcatgcagtcagtgttataccaaacccagtgttaggagaaaggacacagcgtaatggagaaaggggaagtagtagaattcagaaacaaaaatgcgcatctctttctttgtttgtcaaatgaaaattttaactggaattgtctgatatttaagagaaacattcaggacctcatcattatgtgggggctttgttctccacagggtcaggtaagagatggccttcttggctgccacaatcagaaatcacgcaggcattttgggtaggcggcctccagttttcctttgagtcgcgaacgctgtgcgtttgtcagaatgaagtatacaagtcaatgtttttccccctttttatataataattatataacttatgcatttatacactacgagttgatctcggccagccaaagacacacgacaaaagagacaatcgatataatgtggccttgaattttaactctgtatgcttaatgtttacaatatgaagttattagttcttagaatgcagaatgtatgtaataaaataagcttggcctagcatggcaaatcagatttatacaggagtctgcatttgcactttttttagtgactaaagttgcttaatgaaaacatgtgctgaatgttgtggattttgtgttataatttactttgtccaggaacttgtgcaagggagagccaaggaaataggatgtttggcacccaaatggcgtcagcctctccaggtccttcttgcctcccctcctgtcttttatttctagccccttttggaacagaaggaccccgggtttcacattggagcctccatatttatgcctggaatggaaagaggcctatgaagctggggttgtcattgagaaattctagttcagcacctggtcacaaatcacccttaattcctgctatgattaaaatacatttgttgaacagtgaacaagctaccactcgtaaggcaaactgtattattactggcaaataaagcgtcatggatagctgcaatttctcactttacagaaacaagggataacgtctagatttgctgcggggtttctctttcaggagctctcactaggtagacagctttagtcctgctacatcagagttacctgggcactgtggcttgggattcactagccctgagcctgatgttgctggctatcccttgaagacaatgtttatttccataatctagagtcagtttccctgggcatcttttctttgaatcacaaatgctgccaaccttggtccaggtgaaggcaactcaaaaggtgaaaatacaaggtgaccgtgcgaaggcgctagccgaaacatcttagctgaataggtttctgaactggcccttttcatagctgtttcagggcctgtttttttcacgttgcagtccttttgctatgattatgtgaagttgccaaacctctgtgctgtggatgttttggcagtgggctttgaagtcggcaggacacgattaccaatgctcctgacaccccgtgtcatttggattagacggagcccaaccatccatcattttgcagcagcctgggaaggcccacaaagtgcccgtatctccttagggaaaataaataaatacaatcatgaaagctggcagttaggctgacccaaactgtgctaatggaaaagatcagtcatttttattttggaatgcaaagtcaagacacacctacattcttcatagaaatacacatttacttggataatcactcagttctctcttcaagactgtctcatgagcaagatcataaaaacaagacatgattatcatattcaattttaacagatgttttccattagatccctcaaccctccacccccagtccaggttattagcaagtcttatgagcaactgggataattttggataacatgataatactgagttccttcaaatacataattcttaaattgtttcaaaatggcattaactctctgttactgttgtaatctaattccaaagccccctccaggtcatattcataattgcatgaaccttttctctctgtttgtccctgtctcttggcttgccctgatgtatactcagactcctgtacaatcttactcctgctggcaagagatttgtcttcttttcttgtcttcaattggctttcgggccttgtatgtggtaaaatcaccaaatcacagtcaagactgtgtttttgttcctagtttgatgcccttatgtcccggaggggttcacaaagtgctttgtcaggactgctgcagttagaaggctcactgcttctcctaagccttctgcacagatgtggcacctgcaacccaggagcaggagccggaggagctgccctctgacagcaggtgcagcagagatggctacagctcaggagctgggaaggtgatggggcacagggaaagcacagatgttctgcagcgccccaaagtgacccattgcctggagaaagagaagaaaatattttttaaaaagctagtttatttagcttctcattaattcattcaaataaagtcgtgaggtgactaattagagaataaaaattactttggactactcaaaaatacacc

SEQ ID NO: 146362 - protein, 508 aa, Artificial Sequence
  derived and/or modified sequence
MSSDDRHLGSSCGSFIKTEPSSPSSGIDALSHHSPSGSSDASGGFGLALGTHANGLDSPPMFAGAGLGGTPCRKSYEDCASGIMEDSAIKCEYMLNAIPKRLCLVCGDIASGYHYGVASCEACKAFFKRTIQGNIEYSCPATNECEITKRRRKSCQACRFMKCLKVGMLKEGVRLDRVRGGRQKYKRRLDSESSPYLSLQISPPAKKPLTKIVSYLLVAEPDKLYAMPPPGMPEGDIKALTTLCDLADRELVVIIGWAKHIPGFSSLSLGDQMSLLQSAWMEILILGIVYRSLPYDDKLVYAEDYIMDEEHSRLAGLLELYRAILQLVRRYKKLKVEKEEFVTLKALALANSDSMYIEDLEAVQKLQDLLHEALQDYELSQRHEEPWRTGKLLLTLPLLRQTAAKAVQHFYSVKLQGKVPMHKLFLEMLEAKVGQEQLRGSPKDERMSSHDGKCPFQSAAFTSRDQSNSPGIPNPRPSSPTPLNERGRQISPSTRTPGGQGKHLWLTM

SEQ ID NO: 146363 - protein, 433 aa, Artificial Sequence
  derived and/or modified sequence
MSSDDRHLGSSCGSFIKTEPSSPSSGIDALSHHSPSGSSDASGGFGLALGTHANGLDSPPMFAGAGLGGTPCRKSYEDCASGIMEDSAIKCEYMLNAIPKRLCLVCGDIASGYHYGVASCEACKAFFKRTIQGNIEYSCPATNECEITKRRRKSCQACRFMKCLKVGMLKEGVRLDRVRGGRQKYKRRLDSESSPYLSLQISPPAKKPLTKIVSYLLVAEPDKLYAMPPPGMPEGDIKALTTLCDLADRELVVIIGWAKHIPGFSSLSLGDQMSLLQSAWMEILILGIVYRSLPYDDKLVYAEDYIMDEEHSRLAGLLELYRAILQLVRRYKKLKVEKEEFVTLKALALANSDSMYIEDLEAVQKLQDLLHEALQDYELSQRHEEPWRTGKLLLTLPLLRQTAAKAVQHFYSVKLQGKVPMHKLFLEMLEAKV

SEQ ID NO: 146364 - protein, 617 aa, Artificial Sequence
  derived and/or modified sequence
MLVPLAKLSCLAYQCFHALKIKKNYLPLCATRWSSTSTVPRITTHYTIYPRDKDKRWEGVNMERFAEEADVVIVGAGPAGLSAAVRLKQLAVAHEKDIRVCLVEKAAQIGAHTLSGACLDPGAFKELFPDWKEKGAPLNTPVTEDRFGILTEKYRIPVPILPGLPMNNHGNYIVRLGHLVSWMGEQAEALGVEVYPGYAAAEVLFHDDGSVKGIATNDVGIQKDGAPKATFERGLELHAKVTIFAEGCHGHLAKQLYKKFDLRANCEPQTYGIGLKELWVIDEKNWKPGRVDHTVGWPLDRHTYGGSFLYHLNEGEPLVALGLVVGLDYQNPYLSPFREFQRWKHHPSIRPTLEGGKRIAYGARALNEGGFQSIPKLTFPGGLLIGCSPGFMNVPKIKGTHTAMKSGILAAESIFNQLTSENLQSKTIGLHVTEYEDNLKNSWVWKELYSVRNIRPSCHGVLGVYGGMIYTGIFYWILRGMEPWTLKHKGSDFERLKPAKDCTPIEYPKPDGQISFDLLSSVALSGTNHEHDQPAHLTLRDDSIPVNRNLSIYDGPEQRFCPAGVYEFVPVEQGDGFRLQINAQNCVHCKTCDIKDPSQNINWVVPEGGGGPAYNGM

SEQ ID NO: 146365 - DNA, 1854 bp, Artificial Sequence
  derived and/or modified sequence
atgctggtgccactggccaagctgagctgcctcgcctaccagtgcttccacgctctaaagattaagaaaaattacctccctttatgcgctactaggtggtcttcgacctcgaccgttccaaggattactacccactatactatttaccctcgggacaaagacaagcgctgggagggagtgaacatggagaggtttgccgaggaagccgatgtcgtcatcgtgggagcgggccctgccggtctttccgccgcagtgcgactcaagcagctggccgtcgcccacgagaaagacataagagtgtgccttgtggaaaaggctgcccagatcggggctcatacattatccggggcctgcctggatcccggcgcttttaaggagctctttcccgattggaaggagaagggtgcacccctgaacacaccagtcactgaagatcgtttcggcatcctgaccgaaaaatatcgcatccccgtgcctattttacccggccttcccatgaacaaccatggcaactacatagtacgccttggccatctagtatcctggatgggcgaacaggccgaggccttgggagttgaagtgtatccgggttacgcagccgcagaagtcctgtttcatgatgatggcagtgttaaaggcatcgccactaatgacgtcggaatacagaaggacggagcgcctaaggctaccttcgaacgtggtctagagctgcatgctaaggtgactatttttgccgaaggctgtcatgggcacttggcaaaacagctatataaaaaattcgatctgcgcgccaactgtgagccccagacatacggtataggcttaaaagaactttgggtgatagatgaaaagaactggaaacccggccgagtggaccacactgttggatggcccctggataggcacacctacgggggatcattcctgtaccatctgaacgaaggagaaccgctcgtagcgctggggctcgtggtcggtttagactaccaaaacccatacctcagcccatttcgagaattccagcggtggaaacatcacccatctatccggccaacccttgagggggggaaacggatcgcatatggtgcccgggctctgaacgaaggggggtttcaatccattcccaagctaacgtttcctggcggcctcctcatcggctgctctcctggctttatgaacgtgccgaagatcaagggcactcacaccgctatgaagagcggcatcctggcagccgagagcatattcaatcaactgacttccgaaaatctccagagcaaaactatcgggctccacgtgaccgagtacgaggataacctcaaaaattcctgggtgtggaaagagctctacagcgtcaggaacattcggccaagctgccacggagtgctgggcgtttacgggggcatgatatatactggtattttttattggatactacgggggatggagccctggaccctcaagcacaaaggctctgatttcgaaagactcaagcctgctaaagactgcacccctatagagtacccaaagcctgacggacagatttcctttgacctgctgtcctcagttgccctctccggcactaaccatgaacatgaccagcccgcccatctgactcttcgtgatgattctatccctgtgaaccggaacctgagcatctatgacggacccgaacaaagattttgtccggcaggagtatatgagttcgtgcctgtggagcaaggtgatgggttccggctgcagatcaatgctcaaaactgcgtgcactgtaaaacctgtgacatcaaggatccatcacaaaacataaattgggtagtcccagaagggggggggggccctgcctataacgggatgtag

SEQ ID NO: 146366 - DNA, 1854 bp, Artificial Sequence
  derived and/or modified sequence
atgctggtgcccctggccaagctgagctgcctggcctaccagtgcttccacgccctgaagatcaagaagaactacctgcccctgtgtgccacccgctggagcagcaccagcacagtgccccgcatcaccacccactacaccatctacccccgggacaaggacaagcgctgggagggcgtgaacatggagagatttgctgaggaggctgatgtggtgattgtgggcgccggccctgctggcctgtctgctgctgtgcggctgaagcagctggccgtggcccacgagaaggacatccgggtgtgcctggtggagaaggccgcccagattggagcccacaccctgagcggggcctgcctggaccccggggccttcaaggagctgttcccagactggaaggagaagggggcccccctgaacacccctgtgacagaggacagatttggcatcctgacagagaagtaccgcatccctgtgcccatcctgcccggcctgcccatgaacaaccacggcaactacatcgtgcggctgggccacctggtgtcctggatgggagagcaggccgaggccctgggcgtggaggtgtacccaggctatgctgctgctgaggtgctcttccatgatgatggctctgtgaagggcatcgccaccaatgatgtgggcatccagaaggatggagcccccaaggccacctttgagcggggcctggagctgcacgccaaggtgaccatctttgctgagggctgccacggccacctggccaagcagctgtacaagaagtttgacctgcgggccaactgtgagccccagacctatggaattggcctgaaggagctgtgggtgattgatgagaagaactggaagccaggccgggtggaccacacagtgggctggcccctggacagacacacctacggcggcagcttcctgtaccacctgaatgaaggagagcccctggtggccctgggcctggtggtgggcctggactaccagaacccctacctgagccccttccgggagttccagcgctggaagcaccaccccagcatccggcccaccctggagggcggcaagagaattgcctatggagcccgggccctgaatgaaggaggcttccagagcatccccaagctgaccttccctgggggcctgctgattggctgcagccctggcttcatgaatgtgcccaagatcaagggcacccacacagccatgaagagcggcatcctggccgctgagagcatcttcaaccagctgaccagcgagaacctgcagagcaagaccatcggcctgcacgtgacagaatatgaggacaacctgaagaacagctgggtgtggaaggagctgtacagcgtgaggaacatccggcccagctgccacggcgtgctgggcgtgtatggaggcatgatctacacaggcatcttctactggatcctgcggggcatggagccctggaccctgaagcacaagggcagtgactttgagcggctgaagccagccaaggactgcacccccatcgagtaccccaagccagatggccagatcagctttgacctgctgagctctgtggccctgagcggcaccaaccatgaacatgaccagcctgcccacctgaccctgagagatgacagcatccctgtgaacagaaacctgagcatctatgatggccctgagcagcgcttctgcccagctggggtgtatgaatttgtgcctgtggagcagggagatggcttccggctgcagatcaatgcccagaactgtgtgcactgcaagacctgtgacatcaaggaccccagccagaacatcaactgggtggtgcctgagggcggcggcggccctgcctacaacggcatgtag

SEQ ID NO: 146367 - DNA, 1854 bp, Artificial Sequence
  derived and/or modified sequence
atgctggtgcccctggccaagctgagctgcctggcctaccagtgcttccacgcactgaagataaagaaaaactaccttccactatgtgctacgcgctggagctctacttcgactgtccccaggatcaccacacattacacaatttatcctagagacaaggacaagcgctgggagggcgtcaacatggaacgcttcgccgaggaagcagatgtcgttatagttggcgccgggccagccggactgtccgctgcggttcggttaaaacagctcgccgtagcccacgaaaaggatatccgagtttgtttagtcgaaaaagcagcacagatcggcgcccataccctgagtggggcatgccttgatcccggagccttcaaggaactctttcctgattggaaggaaaagggagcgcctttgaacacgccagtgactgaagatcgctttgggattcttactgagaaataccggatcccagtgccgattctgccaggcttaccgatgaataatcatggcaattatatcgtcaggctgggccacttggtgtcatggatgggggaacaggcggaagccctcggagtggaagtctacccgggatacgccgctgctgaggtgctattccacgacgatggtagcgtcaaaggaatcgctactaacgacgtagggatccagaaagatggggcacccaaagctacttttgagcggggactggagttgcacgcaaaggtaacaattttcgcggagggctgccatggccatctggccaagcagctttacaagaagttcgatttgcgggctaactgcgagcctcaaacctacggaattggtctgaaggagttgtgggtaatcgatgagaagaattggaagccggggcgagtggaccacaccgtgggttggcctctcgaccggcatacatatggtggtagctttctgtaccacctgaacgaaggagagccgctcgtggcactgggcctggttgtgggcctcgactatcaaaatccatatctctccccctttcgggagtttcagcgttggaaacaccatcctagtatccgccccactcttgagggtggcaagagaatcgcgtatggcgctcgcgcattgaacgaaggggggttccaatcaatacccaagctgacatttcctggaggcctgctgataggatgctcgccaggctttatgaatgtccctaagatcaaaggtacccacacagcaatgaaatcagggatcctcgcagcggaatctatattcaaccagctgacatccgagaatcttcagagtaagaccataggtctccatgtcaccgagtatgaggacaatctgaagaactcttgggtctggaaggaattatattctgtgcggaatattcggccctcctgccacggcgtgctgggtgtttacggcggcatgatctacaccggaattttctattggattctcagaggcatggagccatggacactcaaacacaaagggagcgactttgagaggctgaagcctgcaaaagactgtactccaattgagtaccccaagccagacgggcagatttcatttgacttgcttagctctgtggccctgagtggaactaaccatgagcacgaccaacccgcgcatttaaccctgagagatgattccatccctgtgaaccggaacctgtctatttatgacgggccagagcagcgcttctgtccagcaggcgtgtacgagttcgtacctgtcgagcagggcgatggttttagactgcagatcaacgcacaaaattgtgttcactgtaagacttgcgatataaaagacccgtcccaaaatattaactgggtcgttccagaaggaggcggcggcccagcctacaacggcatgtag

SEQ ID NO: 146368 - DNA, 1854 bp, Artificial Sequence
  derived and/or modified sequence
atgctggtcccattagcaaaattgagctgccttgcttatcagtgttttcacgccctgaagataaaaaagaactatctgcctctgtgtgctacacgctggtcgtccacctccaccgtacctagaatcaccacccactacaccatctatccaagagataaagataaaagatgggagggcgtgaatatggagaggttcgctgaggaggctgatgtagttattgtgggggctgggcctgccggattatccgctgcggttaggcttaagcaattggccgtcgcccacgaaaaggacatccgggtctgccttgtggagaaggccgcacagatcggtgcacacactctgagcggtgcctgcctggatcccggtgcattcaaagaactgtttcccgactggaaggaaaagggggcacctttgaataccccagtgactgaggatcgctttgggatcctgactgaaaagtacagaataccagtccccatcctgcccggattgccgatgaataaccacgggaactatatcgttaggcttggacaccttgtgagttggatgggcgagcaggcagaagccctcggcgtggaagtttatccaggttacgctgctgccgaggtcctgtttcacgacgatggctcagtgaaaggtatcgcgaccaatgacgtcgggatccaaaaggacggggctcccaaggccactttcgagcgaggcctggagcttcatgcaaaagtgacaatcttcgcagagggatgccacggccatttggctaaacagctatacaagaagttcgacctgagggcgaactgcgagccacagacatatggcataggtctcaaagagctgtgggtcatcgacgagaagaactggaaacctgggagagtggaccacaccgtcggatggcccctggatagacacacctatgggggtagttttctctaccatctgaatgagggagaaccgctagtagctcttggcctagtagtggggctagactatcagaatccgtacctctccccatttagggaattccagcgctggaagcatcaccctagcattaggcccactttagagggaggtaagcggattgcctatggcgctcgagccttgaatgaaggagggtttcagtcaattcccaagttaacctttcccggaggcttgctgattgggtgctcacctggcttcatgaacgtacccaagattaaggggacacatactgcaatgaagagcgggatcttggcagctgagtcgatcttcaatcaacttacctctgaaaatctgcagtcaaaaactattggcctgcacgtgactgaatatgaagacaacctcaagaactcctgggtgtggaaagaattatattcagtccggaatatccgtcccagctgtcacggggttttgggggtatatgggggaatgatttacaccgggatattttactggattctacgcggaatggagccctggaccctgaagcataagggctccgactttgagcggttgaaacctgcgaaggactgtaccccaattgagtaccctaagccagacgggcagatctcatttgatttgctgagttcggtggccttgtctggtactaaccacgagcacgaccagccagcacatctgaccctaagggacgactccatccccgttaacaggaacctgtccatatacgatggcccagagcagcggttctgcccagctggagtctacgaattcgttccggttgagcagggagacgggtttcggctccaaattaacgctcagaactgtgttcattgcaagacctgcgacatcaaagacccatcacaaaatatcaactgggtggtacctgagggtgggggaggtcctgcttataatgggatgtag

SEQ ID NO: 146369 - DNA, 1854 bp, Artificial Sequence
  derived and/or modified sequence
atgctggtgcccctggccaagctgagctgcctggcctaccagtgcttccacgccctgaagatcaagaagaactacctgcccctgtgcgccaccagatggagcagcaccagcaccgtgcccagaatcaccacccactacaccatctaccccagagacaaggacaagagatgggagggcgtgaacatggagagattcgccgaggaggccgacgtggtgatcgtgggcgccggccccgccggcctgagcgccgccgtgagactgaagcagctggccgtggcccacgagaaggacatcagagtgtgcctggtggagaaggccgcccagatcggcgcccacaccctgagcggcgcctgcctggaccccggcgccttcaaggagctgttccccgactggaaggagaagggcgcccccctgaacacccccgtgaccgaggacagattcggcatcctgaccgagaagtacagaatccccgtgcccatcctgcccggcctgcccatgaacaaccacggcaactacatcgtgagactgggccacctggtgagctggatgggcgagcaggccgaggccctgggcgtggaggtgtaccccggctacgccgccgccgaggtgctgttccacgacgacggcagcgtgaagggcatcgccaccaacgacgtgggcatccagaaggacggcgcccccaaggccaccttcgagagaggcctggagctgcacgccaaggtgaccatcttcgccgagggctgccacggccacctggccaagcagctgtacaagaagttcgacctgagagccaactgcgagccccagacctacggcatcggcctgaaggagctgtgggtgatcgacgagaagaactggaagcccggcagagtggaccacaccgtgggctggcccctggacagacacacctacggcggcagcttcctgtaccacctgaacgagggcgagcccctggtggccctgggcctggtggtgggcctggactaccagaacccctacctgagccccttcagagagttccagagatggaagcaccaccccagcatcagacccaccctggagggcggcaagagaatcgcctacggcgccagagccctgaacgagggcggcttccagagcatccccaagctgaccttccccggcggcctgctgatcggctgcagccccggcttcatgaacgtgcccaagatcaagggcacccacaccgccatgaagagcggcatcctggccgccgagagcatcttcaaccagctgaccagcgagaacctgcagagcaagaccatcggcctgcacgtgaccgagtacgaggacaacctgaagaacagctgggtgtggaaggagctgtacagcgtgagaaacatcagacccagctgccacggcgtgctgggcgtgtacggcggcatgatctacaccggcatcttctactggatcctgagaggcatggagccctggaccctgaagcacaagggcagcgacttcgagagactgaagcccgccaaggactgcacccccatcgagtaccccaagcccgacggccagatcagcttcgacctgctgagcagcgtggccctgagcggcaccaaccacgagcacgaccagcccgcccacctgaccctgagagacgacagcatccccgtgaacagaaacctgagcatctacgacggccccgagcagagattctgccccgccggcgtgtacgagttcgtgcccgtggagcagggcgacggcttcagactgcagatcaacgcccagaactgcgtgcactgcaagacctgcgacatcaaggaccccagccagaacatcaactgggtggtgcccgagggcggcggcggccccgcctacaacggcatgtag

SEQ ID NO: 146370 - DNA, 3282 bp, Artificial Sequence
  derived and/or modified sequence
gtgctgtgggattcgcggacccctctggccgcgctgtggctgtttcaccgctccccggctgggacttggagtcccttatctttccctggtttggtacatgacccggaagcctcggctggccgttgcgtcatccatggcgccggcgcagagcgagaaggaggtgggaacgccgtgaagcaagagcggtcggcagagcggggaggcgaactgcagcagagttcttgctttccggcaggtgatggcgccccccgcggcctagaggtccagcgcccgccgcgagcagcggacagtcctcctgttgtgtccgaccgagagtcctggtgactttgaacatgctggtgccgctagccaagctgtcctgcctggcatatcagtgctttcatgccttaaaaattaagaaaaattatctacctctatgtgctacaagatggtcttcaacttctactgtgcctcgaattactacccattatactatttatccccgggataaggacaagagatgggaaggagtgaacatggaaaggtttgcagaagaagcagatgttgtaatagttggtgcaggccctgcagggctctctgcagctgttcgtctaaaacagttggctgtggcacatgaaaaggacatccgtgtgtgtctagtggagaaagctgcccagataggagctcatactctctcaggggcttgccttgatccaggtgcttttaaagaactcttcccagactggaaagagaagggggctccacttaacactcctgtaacagaagacagatttggaattttaacagagaaatacagaattcctgtgccaattcttccagggcttccaatgaataatcatggcaattacattgtacgcttgggacatttagtgagctggatgggcgaacaagcagaagcccttggtgttgaagtataccctggttatgcagctgctgaggtcctttttcatgatgatggtagtgtaaaaggaattgccactaacgatgtagggatacaaaaggatggtgcaccaaaggcaacatttgagagaggactggaactacatgctaaagtcacaatttttgcagaaggttgccatggacatctagccaagcaactatataagaagtttgatttgagagcaaattgtgaacctcaaacctacgggattggactgaaggagttatgggttattgatgaaaagaactggaaacctgggagagtagatcacactgttggttggcccttggacagacatacctatggaggatctttcctctatcatttgaatgaaggtgaacccctagtagctcttggtcttgtggttggtctagactatcagaatccatacctgagtccatttagagagttccaaaggtggaaacaccatcctagcattcggccaaccttggaaggtggaaaaaggattgcatacggagccagagctctcaatgaaggtggctttcagtctataccaaaactcacctttcctggtggtttactaattggttgtagtcctggttttatgaatgttcccaagatcaaaggtactcacacagcaatgaaaagtggaattttagcagcagaatctatttttaatcaactaactagtgaaaatctccaatcaaagacaataggactccatgtaactgaatatgaggacaatttgaagaactcatgggtatggaaagagctatattctgttagaaatataagaccgtcctgccacggagtactgggtgtatatggagggatgatttacactggaatcttttactggatattgagaggaatggagccgtggactctgaaacataaaggttctgactttgaacggctcaagccagccaaggattgcacacctattgagtatccaaaacccgatggacagatcagttttgacctcttgtcatctgtggctctgagtggtactaatcatgaacatgaccagccggcacacttaaccttaagggatgacagtatacctgtaaatagaaatctgtcgatatatgatgggcccgagcagcgattctgtcctgcaggagtttatgaatttgtacctgtggaacaaggtgatggatttcggttacagataaatgctcagaactgtgtacattgtaaaacatgtgatattaaagatccaagtcagaatattaactgggtggtacctgaaggtggaggaggacctgcttacaatggaatgtaaactgcagctagccagtttctttcaagtatggcaagctaacgttaaaatgtttagagattaacagatttcagaatgtctttctgcatattactgaacagaatagtcacaaaatgattatcaaataaaaattttatactatatgtaagattgtcccataaagaaattacgggtattgcttttaaataacctttataagaatgcagcatcttcctacctcttcagttcttcagagattcagtaccaagagcaaaattcactactggactttacatttgacttgccaaagttaagtaatcaaatataaaaatgaatatatattctagactaaagttttattgaaacacagccatacccattggttacacattgtctatggctaattttgaattacaactgtgcaggtgagtgggtgtgacattacatggtctacaaagcctaaaaactttatgatctggcccttgcagaagaagtatgcccatccctgaacaagtttgtgtgtgtgtgtgtgtgtgtgtgtgtgtgtgtgtgtgtattatctataagtatgaaaacctagcatcatccaccatggatacatcaaagaatcgaaggaaacaatatacaaacttaagctctcatctctttattcaataagatgtgtctttacaagtttaaaaagactggacaccattattttttatgaataatgcacataaccattttaaaaaacattttacttggccgggcacggtggctcacacctgtaatcccagcactttgggaggccaaggcggggtggatcacaaggtcaggagttcaagaccaacgtgacgtgaccaatatggtgaaaccccatctctactaaaaatacaaaaattagctgggcgtggtggcacgtgcctgtaatcccagctacttgggaagctgaggcaggagaattgcttgaacccgggaggcagaggatgcagtgagccgagattgcgccaccgcactccagcctgggtgacagagcaagactccatctcaaagaaacaaacaaaaccactttacttactgtattgtgacatgtttattaagcatgaacccctatcagtactcctaaactgtaaacagtaag

SEQ ID NO: 146371 - protein, 510 aa, Artificial Sequence
  derived and/or modified sequence
MDGFYDQQVPFMVPGKSRSEECRGRPVIDRKRKFLDTDLAHDSEELFQDLSQLQEAWLAEAQVPDDEQFVPDFQSDNLVLHAPPPTKIKRELHSPSSELSSCSHEQALGANYGEKCLYNYCAYDRKPPSGFKPLTPPTTPLSPTHQNPLFPPPQATLPTSGHAPAAGPVQGVGPAPAPHSLPEPGPQQQTFAVPRPPHQPLQMPKMMPENQYPSEQRFQRQLSEPCHPFPPQPGVPGDNRPSYHRQMSEPIVPAAPPPPQGFKQEYHDPLYEHGVPGMPGPPAHGFQSPMGIKQEPRDYCVDSEVPNCQSSYMRGGYFSSSHEGFSYEKDPRLYFDDTCVVPERLEGKVKQEPTMYREGPPYQRRGSLQLWQFLVTLLDDPANAHFIAWTGRGMEFKLIEPEEVARRWGIQKNRPAMNYDKLSRSLRYYYEKGIMQKVAGERYVYKFVCDPDALFSMAFPDNQRPFLKAESECHLSEEDTLPLTHFEDSPAYLLDMDRCSSLPYAEGFAY

SEQ ID NO: 146372 - protein, 132 aa, Artificial Sequence
  derived and/or modified sequence
MDGFYDQQVPFMVPGKSRSEECRGRPVIDRKRKFLDTDLAHDSEELFQDLSQLQEAWLAEAQVPDDEQFVPDFQSDNLVLHAPPPTKIKRELHSPSSELSSCSHEQALGANYGEKCLYNYCAYDRKPPSGFK

SEQ ID NO: 146373 - protein, 140 aa, Artificial Sequence
  derived and/or modified sequence
MDGFYDQQVPFMVPGKSRSEECRGRPVIDRKRKFLDTDLAHDSEELFQDLSQLQEAWLAEAQVPDDEQFVPDFQSDNLVLHAPPPTKIKRELHSPSSELSSCSHEQALGANYGEKCLYNYCAYDRKPPSGFKPLTPPTTP

SEQ ID NO: 146374 - protein, 150 aa, Artificial Sequence
  derived and/or modified sequence
MDGFYDQQVPFMVPGKSRSEECRGRPVIDRKRKFLDTDLAHDSEELFQDLSQLQEAWLAEAQVPDDEQFVPDFQSDNLVLHAPPPTKIKRELHSPSSELSSCSHEQALGANYGEKCLYNYCAYDRKPPSGFKPLTPPTTPLSPTHQNPLF

SEQ ID NO: 146375 - protein, 552 aa, Artificial Sequence
  derived and/or modified sequence
MSERRCPPEHREGVNDTGGSLFPQKLLNAETSQSGIRDAESTMDGFYDQQVPFMVPGKSRSEECRGRPVIDRKRKFLDTDLAHDSEELFQDLSQLQEAWLAEAQVPDDEQFVPDFQSDNLVLHAPPPTKIKRELHSPSSELSSCSHEQALGANYGEKCLYNYCAYDRKPPSGFKPLTPPTTPLSPTHQNPLFPPPQATLPTSGHAPAAGPVQGVGPAPAPHSLPEPGPQQQTFAVPRPPHQPLQMPKMMPENQYPSEQRFQRQLSEPCHPFPPQPGVPGDNRPSYHRQMSEPIVPAAPPPPQGFKQEYHDPLYEHGVPGMPGPPAHGFQSPMGIKQEPRDYCVDSEVPNCQSSYMRGGYFSSSHEGFSYEKDPRLYFDDTCVVPERLEGKVKQEPTMYREGPPYQRRGSLQLWQFLVTLLDDPANAHFIAWTGRGMEFKLIEPEEVARRWGIQKNRPAMNYDKLSRSLRYYYEKGIMQKVAGERYVYKFVCDPDALFSMAFPDNQRPFLKAESECHLSEEDTLPLTHFEDSPAYLLDMDRCSSLPYAEGFAY

SEQ ID NO: 146376 - DNA, 4102 bp, Artificial Sequence
  derived and/or modified sequence
agcctggttggcagctgcggcgcagagtccagccgctggtgcgcggagcggttcaccgtcttcggagcggttcggcccagcctttcgcccaggcgcccaggcccgctgcgcgcgtgcgtgagcgcgcctgcgccgccggggccgctgcaaggggaggagagaggccgcctcaggaggatcccttttcccccagaaattactcaatgctgaaacctctcaaagtggtattagagacgctgaaagcaccatggacgggttttatgatcagcaagtcccttttatggtcccagggaaatctcgatctgaggaatgcagagggcggcctgtgattgacagaaagaggaagtttttggacacagatctggctcacgattctgaagagctatttcaggatctcagtcaacttcaagaggcttggttagctgaagcacaagttcctgatgatgaacagtttgtcccagattttcagtctgataacctggtgcttcatgccccacctccaaccaagatcaaacgggagctgcacagcccctcctctgagctgtcgtcttgtagccatgagcaggctcttggtgctaactatggagaaaagtgcctctacaactattgtgcctatgataggaagcctccctctgggttcaagccattaacccctcctacaacccccctctcacccacccatcagaatcccctatttcccccacctcaggcaactctgcccacctcagggcatgcccctgcagctggcccagttcaaggtgtgggccccgcccccgccccccattcgcttccagagcctggaccacagcagcaaacatttgcggtcccccgaccaccacatcagcccctgcagatgccaaagatgatgcctgaaaaccagtatccatcagaacagagatttcagagacaactgtctgaaccctgccaccccttccctcctcagccaggagttcctggagataatcgccccagttaccatcggcaaatgtcagaacctattgtccctgcagctcccccgccccctcagggattcaaacaagaataccatgacccactctatgaacatggggtcccgggcatgccagggcccccagcacacgggttccagtcaccaatgggaatcaagcaggagcctcgggattactgcgtcgattcagaagtgcctaactgccagtcatcctacatgagagggggttatttctccagcagccatgaaggtttttcatatgaaaaagatccccgattatactttgacgacacttgtgttgtgcctgagagactggaaggcaaagtcaaacaggagcctaccatgtatcgagaggggcccccttaccagaggcgaggttcccttcagctgtggcagttcctggtcacccttcttgatgacccagccaatgcccacttcattgcctggacaggtcgaggcatggagttcaagctgatagaaccggaagaggttgctcggcgctggggcatccagaagaaccggccagccatgaactatgacaagctgagccgctctctccgctattactatgaaaagggcatcatgcagaaggtggctggagagcgatacgtctacaaatttgtctgtgacccagatgccctcttctccatggctttcccggataaccagcgtccgttcctgaaggcagagtccgagtgccacctcagcgaggaggacaccctgccgctgacccactttgaagacagccccgcttacctcctggacatggaccgctgcagcagcctcccctatgccgaaggctttgcttactaagtttctgagtggcggagtggccaaaccctagagctagcagttcccattcaggcaaacaagggcagtggttttgtttgtgtttttggttgttcctaaagcttgccctttgagtattatctggagaacccaagctgtctctggattggcacccttaaagacagatacattggctggggagtgggaacagggaggggcagaaaaccaccaaaaggccagtgcctcaactcttgattctgatgaggtttctgggaagagatcaaaatggagtctccttaccatggacaatacatgcaaagcaatatcttgttcaggttagtacccgcaaaacgggacatagtatgtgacaatctgcatcgatcatggactactaaatgcctttacatagaagggctctgatttgcacaatttgttgaaaaatcacaaacccatagaaaagtaagtaggctaagttggggaggctcaaaccattaagggttaaaaatacatcttaaacattggaaagctcttctagctgaatctgaaatattaccccttgtctagaaaaaggggggcagtcagaacagctgttccccactccgtggttctcaaaatcataaaccatggctactcttgggaaccacccggccatgtggtcgccaagtagagcaagccccctttctcttcccaatcacgtggctgagtgtggatgacttttattttaggagaagggcgattaacacttttgacagtattttgttttgccctgatttgggggattgttttgttttggtggttgttttggaaaaacagtttataaactgatttttgtagttttggtatttaaagcaaaaaaacgaaaaacaaaaaacaaaaacaaaccttttggtaactgtgcactgtgtcctttagccagggccgtgccaacttatgaagacactgcagcttgagaggggctttgctgaggcttccccttggccatgtgaaagcccgccttgttgcctgctttgtgctttctgcaccagacaacctgatggaacatttgcacctgagttgtacatttttgaagtgtgcagggcagcctggacacaagcttagattctctatgtatagttccccgtgttcactaacatgccctctctggaaagcatatgtatataacatgtgtcatgtcctttggaaacctggtcacctggtgaaaacccttgggattcttccctgggcatgactgatgacaatttccatttcatcagtttgttttgttttcctttttctttaaatcttggactttaaaccctacctgtgtgattcagtagggtttgagacttacgtgtgatactgacaggtaagcaacagtgctagcattctagattcctgcctttttttaaaaagaaattattctcattgctgtattatattggaaaagttttaaacaaccaagctaaagctatgtgaaagttgagctcaaagtagaggaaaagttactggtggtaccttgctgcctgctctgctggtagaattctgtgctccccgtgacacttagtacattaagaatgactacactgttcctcgtatgtgaaggaggcagtgctgactccgtgagtgtgagacacgtgctttgaactgcttttctattcatggagcactccatagtctcaaactgtcccccttatgaccaacagcacatttgtgaagaggttcgcagggataaggggtgcactttatagctatggaaacatgagattctcctctattggaagctaattagcccacaaaggtggtaaacctgtagattgggccttaattagcattgtactctaatcaaaggactctttctaaaccatatttatagctttcttaacctacacatagtctatacatagatgcatattttacccccagctggctagagatttatttgttgtaaatgctgtatagatttggttttcctttctttacttaccctggtttggattttttttttttttcttttgaatggatttatgctgtcttagcaatatgacaataatcctctgtagcttgagctacccctcccctgctgtaacttacgtgacctgtgctgtcactgggcataggacagcggcatcacggttgcattcccattggactcatgcacctcccggatggtttttgtttttttcgggggttctttggggtttgtttgtttgcttcttttccagagtgtggaaagtctacagtgcagaaaggcttgaacctgccagctgatttgaaatactttcccctgcgcagggccgtatgcatcctgccaagctgcgttatattctgtactgtgtacaataaagaagtttgcttttcgtttaccaa

SEQ ID NO: 146377 - DNA, 1533 bp, Artificial Sequence
  derived and/or modified sequence
atggatggtttttacgatcaacaagttccttttatggtgccaggtaagtcgaggtctgaagaatgtcgaggtcggcctgtcattgacaggaagcggaaattcctggacacggacttggcccacgacagtgaagaactctttcaagacttatcacagttacaggaggcctggcttgcagaggcgcaggtcccggacgatgagcagttcgttccagactttcagtcagataacctcgtcctgcacgcgcctccacccactaagatcaaacgcgaattgcactcgccctcaagcgagctttcaagctgctcacacgagcaggctctgggggcaaactatggtgagaagtgcctttacaactattgtgcatacgatcggaagcctcccagcggcttcaaaccccttacccccccaactacgcccctatccccaacacatcagaacccactgtttccgccaccacaggcaacactgcccacttccggccatgccccagccgcaggtccagtgcagggagtcgggcctgccccagcccctcacagcctgcccgaaccaggcccacaacagcagactttcgccgtacctaggccccctcatcagcccctgcagatgccaaaaatgatgccagaaaaccagtacccatcagaacaacggttccagagacagctctccgaaccttgccacccgttcccacctcagccaggcgtgcctggtgacaacagaccctcatatcatcgtcagatgtccgagcccatagtccccgcagcccctccccccccccaggggttcaaacaagaataccacgaccccctgtacgagcacggagttcccgggatgccagggccacctgcacatgggttccagtctccaatgggtatcaagcaggaaccccgggattactgcgtggacagtgaggtcccaaactgtcagtcctcctacatgcgcggtggttatttttccagcagccacgagggcttcagctacgagaaagaccctcggctatattttgatgacacttgcgttgtacccgaaagactagaggggaaagtgaagcaggagcctacaatgtacagggaaggacctccttaccagcgacgcggttcgctgcagctatggcagtttctggtcacactcctcgacgaccccgccaacgcacattttatcgcctggaccgggcgtggtatggagtttaaacttatcgagcctgaggaagtcgctagaagatgggggatccagaaaaatagacctgccatgaactacgataaactctccagatcactacgttactactatgaaaagggaattatgcaaaaggtcgccggggaacgatatgtgtataagtttgtatgcgacccagatgctctcttctctatggcttttcctgacaaccagcggcccttccttaaagcggagtcagagtgccacctgtccgaagaggacaccttgcccctgacccactttgaagactcccccgcctatttgctagacatggaccgttgtagctcgctgccctatgccgagggtttcgcatactag

SEQ ID NO: 146378 - DNA, 399 bp, Artificial Sequence
  derived and/or modified sequence
atggacggcttttatgatcagcaggtccctttcatggtgcccgggaagtcccgcagtgaagagtgcagaggtcgccctgttattgatagaaaacgtaaattcctcgacaccgacttagcccacgacagtgaggagctgttccaagatctgagtcagttgcaggaggcttggttagctgaagcccaggtaccggacgacgagcaatttgtgcctgacttccagagcgacaacttggttcttcatgcaccacccccaaccaaaattaagcgggagctgcatagccccagcagcgagcttagcagttgtagccatgagcaagcactcggggcaaactacggtgaaaagtgcctgtacaactattgcgcctatgatcgaaagcctccctcaggcttcaagtag

SEQ ID NO: 146379 - DNA, 423 bp, Artificial Sequence
  derived and/or modified sequence
atggacggcttctatgaccagcaagtgccctttatggtgcctggcaaaagcaggtcagaggagtgccgcggacgccctgtgattgatcgtaagagaaaattcctcgacacagatctggcccatgatagtgaggaactgtttcaagatctatctcagctccaggaagcctggctggcggaggcgcaggtcccggatgacgagcagtttgtaccagacttccagtctgataatctggtactgcacgccccaccgcccaccaagataaaacgggagctacacagtccgagttccgaattgtcatcatgctcccacgagcaggctctcggtgccaattacggggaaaaatgtctgtataactattgcgcatacgatagaaaaccgccatctggatttaagccactgacacctcccaccacgccctag

SEQ ID NO: 146380 - DNA, 1533 bp, Artificial Sequence
  derived and/or modified sequence
atggacggattttacgaccaacaggtacccttcatggtgccgggcaagagtcgaagcgaggagtgcagggggcggcccgtgatcgacagaaaaagaaagttccttgacaccgatctggcacacgatagtgaagagctctttcaagatcttagccagctgcaggaagcctggctagccgaagcccaggtgcccgatgacgagcaattcgtgcctgattttcagtctgacaatcttgtccttcacgccccaccccctacaaagatcaagcgcgaactccattcaccatcctccgagctcagctcctgtagccatgagcaagcgctcggggctaactacggtgaaaagtgtctgtataactattgtgcttatgacagaaaacccccaagtggattcaagcctttaacaccaccaacgacccccctttcccccacacatcagaaccctctgtttcctccaccgcaggccacactcccgacatcagggcacgcacctgcagcagggcctgtgcagggcgtcggaccggcacccgccccccactcgttaccggagcctgggccacagcagcaaacgttcgccgtgcctagacctccacaccaaccgcttcaaatgccaaaaatgatgcctgaaaaccagtatcccagcgagcagagattccaacgacaattatcagaaccatgccatccttttcccccccagccaggggtcccaggcgataaccggccctcctaccaccggcagatgtcagagccaatcgtgccagcagccccccccccccctcagggtttcaagcaggaatatcacgacccactctatgagcatggagtgcccggcatgccaggcccccctgcgcacggtttccagtccccaatgggtatcaaacaggaaccgcgagattattgtgtcgacagcgaagttcctaactgccagagtagttatatgcgcggggggtatttctcaagttctcacgaggggtttagttatgagaaggaccctagactgtactttgatgacacgtgtgttgtaccagagagactggagggcaaagttaagcaggaaccgacaatgtatagagaaggtccgccctaccagaggagaggcagcctgcagttgtggcagtttctagtgactctgcttgatgatcccgccaatgcccattttattgcctggactggacgcgggatggaattcaagctcatcgagccagaagaggttgcaagacgatggggaatccagaaaaaccgacctgcgatgaactacgacaagctgagccgttccctgagatattattatgagaagggcattatgcagaaggtcgctggtgagcgatacgtctataagtttgtttgcgacccagatgctcttttcagcatggcattccccgataatcaacgcccgttcttaaaggcggagtctgagtgccatctgtccgaagaggatacgcttccactgactcactttgaagattcccccgcctatttactcgatatggaccgatgctccagcctgccttacgcggagggatttgcctattag

SEQ ID NO: 146381 - DNA, 453 bp, Artificial Sequence
  derived and/or modified sequence
atggatggattctacgatcaacaggttccgttcatggtgcccggcaagagccgctcggaggagtgcagagggaggcccgtcatcgacagaaaacgcaagttcctggacacagacctagcccacgattccgaggaacttttccaagacctgtctcagctgcaggaggcttggctggccgaagcgcaggtgcccgacgacgagcaatttgttccagactttcagagcgataacctcgtgctgcacgctcccccccccacaaagattaagcgcgagctacattccccttcatcagagttgagtagctgctctcatgagcaggccctcggcgccaattatggagagaagtgtttgtacaactattgtgcttacgatagaaaaccccccagcgggttcaaaccgctcactcccccaacaacacctctctccccaactcaccagaacccgcttttctag

SEQ ID NO: 146382 - DNA, 1659 bp, Artificial Sequence
  derived and/or modified sequence
atgagcgagcgccgctgtccacctgaacatagggagggagtcaatgatacaggggggtccctcttccctcagaagctcctgaacgctgaaacgagtcagtcaggcattcgggacgcagagagtaccatggacgggttctacgatcaacaggtgccgttcatggtgcctgggaaaagcagatcagaggaatgcagggggcggcccgtgatagatcgtaagaggaagttcctagacactgacctggcccacgatagtgaggaactgttccaagacctcagccagctgcaggaagcatggctagcagaggcccaggtccctgatgacgaacagtttgtaccggactttcaaagtgataatctcgtactccatgcacctccccccactaaaattaaacgcgagctccatagtccttcctccgagctttctagctgctctcatgaacaggcccttggggcaaattatggagaaaagtgtctctacaattactgtgcctacgaccgcaagccaccatccgggttcaaaccacttaccccaccaacaacccccttatccccgacgcatcaaaacccactgtttcctcctcctcaggcaacactgccaacatcggggcatgcacccgccgccgggccagtgcagggtgtggggccagccccagcaccgcattccctccctgagccaggcccccagcagcagacatttgccgtcccccgccccccccatcaacccctgcaaatgccaaaaatgatgccagagaaccagtatccttcagagcagcggttccagcggcagctaagcgaaccatgccacccattcccgcctcagccgggcgtgcccggagataatcgaccctcctatcatcggcaaatgtccgagccgatcgttcccgcagcccccccgcccccgcaggggttcaaacaggagtatcatgacccactctatgagcatggggtccctggcatgcctggacctcccgcccatggcttccagtcgcctatgggcatcaaacaggaaccccgagactattgtgtcgactcagaggtgcccaattgccagtcaagttacatgaggggaggatacttcagtagcagccacgagggctttagctacgagaaggaccctaggctgtactttgatgatacatgtgttgtccctgaacgcctcgagggaaaggtcaagcaggagcctacaatgtatcgggaaggccctccataccagaggcgtggaagcctgcagctgtggcaattcctggtgactctgctggacgaccctgccaatgctcacttcattgcctggacgggtagaggcatggaattcaaactgatcgaaccagaggaggtcgcccgccgttgggggattcaaaaaaacagacctgccatgaactatgataagttgtctcgctcattacgttattactacgaaaagggaattatgcagaaggtggctggggaacgctacgtgtataaatttgtgtgcgaccctgacgctctcttctcaatggcctttcctgataaccagcgacctttcctcaaagccgagagcgagtgccatctctccgaggaagacaccctgcccttgacccactttgaagactcaccggcgtacttactggacatggatcgttgttcgagccttccatatgctgagggctttgcttactag

SEQ ID NO: 146383 - DNA, 1533 bp, Artificial Sequence
  derived and/or modified sequence
atggatggcttctatgaccagcaggtgcccttcatggtgcctgggaagagccgctcagaagaatgtcggggccggcctgtgattgacaggaagaggaagttcctggacacagacctggcccatgattctgaggagctgttccaggacctgagccagctgcaggaggcctggctggccgaggcccaggtgcctgatgatgagcagtttgtgcctgacttccagagcgacaacctggtgctgcacgcccccccacccaccaagatcaagcgggagctgcacagccccagcagcgagctgagcagctgcagccatgagcaggccctgggcgccaactacggggagaagtgcctgtacaactactgtgcctatgacaggaagcccccatctggcttcaagcccctgaccccacccaccacccccctgagccccacccaccagaaccccctcttccccccaccccaggccaccctgcccaccagcggccacgccccagctgctggccctgtgcagggcgtgggccctgccccagccccccacagcctgcctgagcccggcccccagcagcagacctttgctgtgccccggcccccccaccagcccctgcagatgcccaagatgatgcctgagaaccagtaccccagcgagcagcgcttccagaggcagctgtctgagccctgccaccccttccccccccagcccggggtgcctggggacaaccggcccagctaccaccggcagatgtctgagcccatcgtgcctgctgcccctcctccaccccagggcttcaagcaggagtaccatgaccccctgtatgaacatggagtgcccggcatgcctggccccccagcccacggcttccagagccccatgggcatcaagcaggagccccgggactactgtgtggacagcgaggtgcccaactgccagagcagctacatgagaggaggctacttcagcagcagccatgagggcttctcctatgagaaggacccccggctgtactttgatgacacctgtgtggtgcctgagcggctggagggcaaggtgaagcaggagcccaccatgtaccgggagggccccccctaccagaggcggggcagcctgcagctgtggcagttcctggtgaccctgctggatgatcctgccaatgcccacttcatcgcctggacaggccggggcatggagttcaagctgattgagcctgaggaggtggcccggcgctggggcatccagaagaacagacctgccatgaactatgacaagctgagccgcagcctgcgctactactatgagaagggcatcatgcagaaggtggccggggagagatatgtgtacaagtttgtgtgtgaccctgatgccctcttctccatggccttcccagacaaccagaggcccttcctgaaggccgagagcgagtgccacctgtctgaggaggacaccctgcccctgacccactttgaggacagccctgcctacctgctggacatggaccgctgcagcagcctgccctatgcagagggctttgcctactag

SEQ ID NO: 146384 - DNA, 399 bp, Artificial Sequence
  derived and/or modified sequence
atggatggcttctatgaccagcaggtgcccttcatggtgcctgggaagagccgctcagaagaatgtcggggccggcctgtgattgacaggaagaggaagttcctggacacagacctggcccatgattctgaggagctgttccaggacctgagccagctgcaggaggcctggctggccgaggcccaggtgcctgatgatgagcagtttgtgcctgacttccagagcgacaacctggtgctgcacgcccccccacccaccaagatcaagcgggagctgcacagccccagcagcgagctgagcagctgcagccatgagcaggccctgggcgccaactacggggagaagtgcctgtacaactactgtgcctatgacaggaagcccccatctggcttcaagtag

SEQ ID NO: 146385 - DNA, 423 bp, Artificial Sequence
  derived and/or modified sequence
atggatggcttctatgaccagcaggtgcccttcatggtgcctgggaagagccgctcagaagaatgtcggggccggcctgtgattgacaggaagaggaagttcctggacacagacctggcccatgattctgaggagctgttccaggacctgagccagctgcaggaggcctggctggccgaggcccaggtgcctgatgatgagcagtttgtgcctgacttccagagcgacaacctggtgctgcacgcccccccacccaccaagatcaagcgggagctgcacagccccagcagcgagctgagcagctgcagccatgagcaggccctgggcgccaactacggggagaagtgcctgtacaactactgtgcctatgacaggaagcccccatctggcttcaagcccctgaccccacccaccaccccctag

SEQ ID NO: 146386 - DNA, 453 bp, Artificial Sequence
  derived and/or modified sequence
atggatggcttctatgaccagcaggtgcccttcatggtgcctgggaagagccgctcagaagaatgtcggggccggcctgtgattgacaggaagaggaagttcctggacacagacctggcccatgattctgaggagctgttccaggacctgagccagctgcaggaggcctggctggccgaggcccaggtgcctgatgatgagcagtttgtgcctgacttccagagcgacaacctggtgctgcacgcccccccacccaccaagatcaagcgggagctgcacagccccagcagcgagctgagcagctgcagccatgagcaggccctgggcgccaactacggggagaagtgcctgtacaactactgtgcctatgacaggaagcccccatctggcttcaagcccctgaccccacccaccacccccctgagccccacccaccagaaccccctcttctag

SEQ ID NO: 146387 - DNA, 1659 bp, Artificial Sequence
  derived and/or modified sequence
atgtctgagcggcgctgccccccagagcaccgggagggcgtgaatgacacaggaggcagcctcttcccccagaagctgctgaatgctgagaccagccagagcggcatcagagatgctgagagcaccatggatggcttctatgaccagcaggtgcccttcatggtgcctgggaagagccgctcagaagaatgtcggggccggcctgtgattgacaggaagaggaagttcctggacacagacctggcccatgattctgaggagctgttccaggacctgagccagctgcaggaggcctggctggccgaggcccaggtgcctgatgatgagcagtttgtgcctgacttccagagcgacaacctggtgctgcacgcccccccacccaccaagatcaagcgggagctgcacagccccagcagcgagctgagcagctgcagccatgagcaggccctgggcgccaactacggggagaagtgcctgtacaactactgtgcctatgacaggaagcccccatctggcttcaagcccctgaccccacccaccacccccctgagccccacccaccagaaccccctcttccccccaccccaggccaccctgcccaccagcggccacgccccagctgctggccctgtgcagggcgtgggccctgccccagccccccacagcctgcctgagcccggcccccagcagcagacctttgctgtgccccggcccccccaccagcccctgcagatgcccaagatgatgcctgagaaccagtaccccagcgagcagcgcttccagaggcagctgtctgagccctgccaccccttccccccccagcccggggtgcctggggacaaccggcccagctaccaccggcagatgtctgagcccatcgtgcctgctgcccctcctccaccccagggcttcaagcaggagtaccatgaccccctgtatgaacatggagtgcccggcatgcctggccccccagcccacggcttccagagccccatgggcatcaagcaggagccccgggactactgtgtggacagcgaggtgcccaactgccagagcagctacatgagaggaggctacttcagcagcagccatgagggcttctcctatgagaaggacccccggctgtactttgatgacacctgtgtggtgcctgagcggctggagggcaaggtgaagcaggagcccaccatgtaccgggagggccccccctaccagaggcggggcagcctgcagctgtggcagttcctggtgaccctgctggatgatcctgccaatgcccacttcatcgcctggacaggccggggcatggagttcaagctgattgagcctgaggaggtggcccggcgctggggcatccagaagaacagacctgccatgaactatgacaagctgagccgcagcctgcgctactactatgagaagggcatcatgcagaaggtggccggggagagatatgtgtacaagtttgtgtgtgaccctgatgccctcttctccatggccttcccagacaaccagaggcccttcctgaaggccgagagcgagtgccacctgtctgaggaggacaccctgcccctgacccactttgaggacagccctgcctacctgctggacatggaccgctgcagcagcctgccctatgcagagggctttgcctactag

SEQ ID NO: 146388 - DNA, 1533 bp, Artificial Sequence
  derived and/or modified sequence
atggacggcttctacgaccagcaggtgcccttcatggtgcccggcaagagcagaagcgaagaatgtagaggacggcctgtcatcgatagaaagcggaaattccttgacacagacctcgctcatgatagcgaggaactgttccaggacctctctcagctgcaggaggcatggcttgctgaagcacaggtgcctgatgatgaacaatttgtgcccgatttccagtcagataacctggtccttcacgctcctccacctactaagattaaacgggaacttcacagtccgagctccgagctgagctcgtgtagccacgagcaggcacttggcgcaaactacggtgaaaaatgtctgtataactactgcgcctatgatcgcaaacctccttctgggttcaagcccttgactccccctacaacaccactctctccgacccaccagaatccactgtttcctcctccccaggctaccctccctacttccgggcatgcccctgccgccgggccagtgcaaggcgttggccctgctccggctccacactctcttcccgagccagggcctcaacaacagacgttcgccgtccctcgccctccgcaccaacctttacagatgcctaaaatgatgccagaaaaccaatacccctccgagcagagattccaaaggcagctgtcagagccatgtcaccccttccccccgcagccaggagtcccaggggataataggccaagttaccaccgccaaatgagcgagcctatcgtcccggccgccccccccccaccccaggggttcaaacaggaataccatgaccccctgtatgagcatggtgtgccaggaatgcctggcccacctgcccacgggttccagtctccaatgggtattaagcaggagccaagagactactgcgtggacagcgaggtccctaactgccagtcctcatatatgagaggaggttacttctcatccagtcacgaagggttctcctatgaaaaagatcccaggttatacttcgacgacacgtgtgtggtgcctgagagactagagggaaaagtgaaacaggaaccgaccatgtacagggaggggcctccttatcagcgacgtggatctctgcaactgtggcagtttctagtcacgctactcgacgaccctgccaacgcacactttattgcctggactggcagaggcatggaatttaagttgattgaacccgaggaagttgcccgccggtggggaattcagaagaaccggccggcaatgaactacgacaaactgtctcgctccctgaggtactactacgagaaaggcataatgcagaaggtcgccggtgagcggtacgtgtacaaatttgtgtgcgacccagatgccctgttctctatggcttttcctgacaaccaaagaccttttctaaaggccgaaagcgagtgtcatctgagtgaagaggacacgctgcccctcactcatttcgaggatagccccgcttatctcctggacatggacagatgttcttccctcccctatgctgagggcttcgcctactag

SEQ ID NO: 146389 - DNA, 399 bp, Artificial Sequence
  derived and/or modified sequence
atggacggcttctacgaccagcaggtgcccttcatggtgcccggcaaatcccgaagcgaggagtgccggggacggcctgtgattgaccgcaaacgtaagtttttggatactgacctggctcacgactctgaagaacttttccaggatctctctcagcttcaggaagcgtggttggccgaggcccaggtaccggacgatgagcagttcgtgcctgatttccagtccgataacttggtgttgcacgcacccccaccaacaaaaatcaagagggagctgcactcgccttcttctgagttgagcagttgttcgcatgaacaggcattgggcgccaactatggtgagaaatgcctttataattactgcgcttacgataggaagcccccgtccgggtttaagtag

SEQ ID NO: 146390 - DNA, 423 bp, Artificial Sequence
  derived and/or modified sequence
atggacggcttctacgaccagcaggtgcccttcatggtgcccggcaaatcccggtccgaggaatgcaggggacggcctgttatagacagaaaacgcaagttccttgatacagaccttgcacacgactctgaggaactgtttcaggatctgtctcaactgcaagaagcatggctggccgaagctcaagtccccgatgatgagcaatttgtccctgactttcagtccgacaatctggttctgcatgcacccccccccacaaaaattaagagagagcttcactcacctagctccgagctttctagctgctcccacgaacaggccctcggagccaattacggcgagaagtgcctgtacaactattgtgcttacgacaggaaaccaccaagcggattcaaacccctcactccaccgaccaccccatag

SEQ ID NO: 146391 - DNA, 1533 bp, Artificial Sequence
  derived and/or modified sequence
atggacggcttctacgaccagcaggtgcccttcatggtgcccggcaaatcccggtccgaagagtgtcgtggtagacccgtgatagataggaagagaaaattcctggataccgatctcgcccacgattctgaggagctgtttcaagatttgtcccagctgcaagaggcctggctggctgaggcacaagtgcccgacgacgagcagtttgtgccagacttccagtccgacaatctagtgctgcacgcccccccacctaccaagattaaacgcgaactgcattcaccaagcagcgagctgtccagctgtagccacgaacaggccctgggagctaattatggcgaaaagtgcttatataattattgcgcatatgaccggaagccaccttctggatttaaaccgcttactcctccgacgactccactctcacccacccatcagaacccccttttcccaccaccacaagcaaccctgccgacatccggccatgcccccgctgctgggccggtgcagggtgtggggcccgcgcctgctcctcactccctcccggaacctggcccacaacaacagacattcgcagtgcctagaccgcctcatcagccactccagatgcccaaaatgatgcctgagaaccagtaccctagtgaacaacgttttcagaggcagcttagtgagccttgccaccctttcccccctcagcctggggtgcctggcgataatcgaccttcttaccaccggcaaatgtcagaaccaatagtgcccgctgccccacctcccccgcagggctttaagcaggaataccacgatccgctctacgagcatggggtaccaggaatgcctggaccaccagcgcacggtttccaatctccaatggggatcaaacaggagcctcgggactactgcgtggatagcgaagttccaaactgccagagtagctacatgcgaggcggctactttagcagtagtcatgaagggttttcctatgagaaggatcccaggctatacttcgacgatacttgcgtggtaccagagaggttagagggaaaagtgaagcaagagcctaccatgtatcgggaaggccctccttatcagcgccgcggatcactgcagttatggcagtttctggtcactctcctggacgatccagcaaacgctcatttcatagcctggaccgggaggggaatggagtttaagttgatcgaacccgaggaagtggctaggcgctgggggatccagaaaaatcggccggcaatgaattacgataaattatctcgcagcctgaggtattactacgagaaaggtattatgcagaaggtggctggggaaaggtatgtgtataagtttgtgtgcgaccccgacgccctgttctcgatggccttcccagataatcagcgccctttcctaaaagccgaaagcgaatgccacctttccgaggaggacacactgcctttgacccacttcgaggacagtcccgcttacttactggatatggaccggtgttcaagcctcccatatgctgaggggtttgcatactag

SEQ ID NO: 146392 - DNA, 453 bp, Artificial Sequence
  derived and/or modified sequence
atggacggcttctacgaccagcaggtgcccttcatggtgcccggcaagagcaggtcggaggaatgcaggggccgtccagtgattgatagaaagcgaaaatttctcgacactgatctggcacacgatagtgaagaattgttccaggacctgagtcaacttcaggaagcctggttagcagaggctcaggttcccgacgacgagcagtttgtccccgactttcagtccgacaatttggtcctgcacgctccccctccaacgaagattaaaagagaactgcacagcccgagctcggagctatcaagctgctcccatgagcaggcgctaggcgcaaactatggggaaaagtgcttatataattactgcgcttatgataggaagccccctagcgggtttaagccattaacccccccaacaaccccgttaagccccacccaccagaaccccctcttttag

SEQ ID NO: 146393 - DNA, 1659 bp, Artificial Sequence
  derived and/or modified sequence
atgagcgagcggcggtgcccccccgagcaccgggagggcgtgaacgatacaggaggcagcctctttccccagaagctgctgaacgccgaaacatcccagtccggaatcagagatgcggagagtactatggacggtttttacgatcagcaagttccattcatggtccctgggaagtcccgctctgaagagtgccgaggacggccagttattgacaggaagcgtaaatttctcgacactgatctggcacacgatagcgaggagcttttccaggatctgtcccagttgcaggaagcttggctggctgaggctcaggtgcccgacgatgaacaatttgttcccgatttccagtccgataacctggtcctgcacgcgcctcccccaaccaagatcaaacgcgaactgcactcccccagctctgaattatcttcttgctctcacgagcaagcattgggcgcaaactacggagagaaatgtttatacaactactgtgcctatgatcggaaaccgccatccgggttcaagccactcacaccccctaccacccccctctctccaacacaccagaacccactctttccaccgccacaagccacgctgccaacctcaggccatgccccagctgcagggcccgtccagggtgtcggcccggccccagccccccactctctaccagaacccggccctcaacagcaaacgtttgctgtgccaaggcccccccatcagcccttacaaatgccaaaaatgatgccagagaatcaatacccgtccgaacagaggttccagcgacaacttagtgagccatgccaccctttcccacctcagccgggggttcccggagataacagaccttcctatcaccgtcaaatgtctgagcccatagtgcccgctgcacctccgccaccccagggcttcaaacaggaataccacgatcctttgtacgagcatggagtccccggaatgccaggacctccagcacatggatttcaaagccccatgggcatcaagcaggaaccaagagactattgtgtggacagtgaggttccaaactgtcagtcatcatatatgcggggtgggtacttctccagttctcacgaaggattctcctacgaaaaagaccccagattgtactttgacgacacgtgcgtggtgccagaaagactggaaggcaaggtcaaacaggagccaaccatgtatcgggagggccctccttatcagaggaggggctctttacaactttggcaatttctggtgacgctgctggacgatcctgccaatgcacacttcatagcctggacaggaagagggatggaattcaagctgatcgaacccgaagaggtcgcccggaggtgggggatacagaaaaaccgtcctgcaatgaactatgataagctgtctaggtcactgaggtactactatgaaaagggtatcatgcaaaaggtggcaggtgaacgctacgtctacaaattcgtgtgcgacccagatgctcttttctccatggcttttcccgataaccagcggccttttcttaaggctgagagtgaatgccatctctccgaagaggataccctgcctcttacccattttgaagattccccagcttacctgttggatatggatagatgctcttcactgccctacgcggagggttttgcttactag

SEQ ID NO: 146394 - DNA, 1533 bp, Artificial Sequence
  derived and/or modified sequence
atggatggattttacgaccaacaggtgccattcatggtcccaggaaaaagtcgctcagaagagtgcagagggcgtcctgtgatcgacaggaagcgtaagttcctcgacacagacctggctcacgacagtgaggagctctttcaggacctgagccagctgcaggaggcctggcttgcagaagcccaggtccccgacgatgagcaattcgttccggattttcagagtgacaacttagtgctccatgccccaccccctacaaagatcaaacgcgaacttcatagcccctcctccgagctgagtagctgctcccatgagcaggctctgggagccaattacggagaaaagtgcctctataactactgcgcttacgaccgtaagcccccatcaggatttaagcccctcacacccccaactacgcccttgtctccaacacatcagaacccattatttcctccgccacaagccacacttccaacctccggccacgcacccgctgctggccctgtgcaaggcgtcggaccagcccctgctcctcattcgttaccagagccgggtcctcagcaacagacgttcgccgtccctagaccaccacaccagccattgcagatgccgaaaatgatgcctgaaaaccagtatccttccgagcaacgcttccagaggcagcttagtgaaccatgccatccattcccaccgcagccgggtgttccaggtgataacaggccctcctaccatcgccaaatgtcagaacctatcgtgccagccgcaccacctccgcctcagggatttaagcaggaataccatgatcctttgtacgaacatggcgtgcccggaatgccagggcctcccgctcatggtttccagagccctatgggaattaagcaagaacctagagattactgcgtggactcagaagtgccaaactgtcagtcatcctacatgagggggggttacttttcgtccagccacgagggctttagttacgagaaggatccccgtctctacttcgatgatacgtgcgtcgttcctgaacgactggagggaaaagtgaagcaggaaccaactatgtatcgcgaaggtccaccctaccagcgcagggggtcccttcagctgtggcagttcttagtgactctgttggatgaccccgctaatgcgcattttatcgcctggactggacgtggtatggagtttaagttgatcgagccagaggaggtagccagacggtgggggatccagaaaaatagacccgctatgaattacgataagctgagtcgcagtctccggtactattatgaaaagggtatcatgcagaaggttgcaggggaaaggtacgtttacaaattcgtgtgcgaccccgatgcgctctttagcatggccttccccgacaaccagaggcccttcctgaaagctgaatctgaatgccacctgtcagaagaggatacgctgccccttacacattttgaggattcccccgcttacctgctcgatatggatcgctgctcctccctcccttatgccgaagggttcgcttactag

SEQ ID NO: 146395 - DNA, 399 bp, Artificial Sequence
  derived and/or modified sequence
atggacgggttctatgaccaacaggtgccatttatggtacctggcaagagccggagcgaagagtgtcgcggtaggcccgtgatcgataggaagcggaaatttctagacaccgacttagctcatgattctgaagaattgttccaggatctgtcacaattacaagaagcctggctcgcggaagcccaggtgccagatgatgaacagttcgtccccgatttccagtctgacaacctggtattacatgctccacccccaacaaaaatcaagcgcgagttgcacagtccatccagcgagctgtcctcttgctcacacgagcaggccttgggcgctaactacggcgaaaagtgcctgtacaactattgtgcctatgatcgcaagccaccaagtgggtttaagtag

SEQ ID NO: 146396 - DNA, 423 bp, Artificial Sequence
  derived and/or modified sequence
atggacggattttatgatcaacaggtgcctttcatggtacccggaaaatcacggtccgaagaatgcagagggagaccagtaatcgatcgtaaacgcaaatttttagacacggacctggcccacgactcggaagaactgttccaggaccttagtcagttgcaggaagcatggctggccgaagctcaggtgccagatgacgagcaatttgtccccgattttcaaagcgataatctggtgctccatgcccctccacccacaaagataaagagggaactgcacagtcccagcagtgaactgtcctcatgtagccacgagcaggctctaggcgctaattatggggagaagtgtctgtataactactgcgcctacgatcgcaagccccctagcggctttaaacctcttaccccacccactactccctag

SEQ ID NO: 146397 - DNA, 1533 bp, Artificial Sequence
  derived and/or modified sequence
atggatggattctacgaccagcaggttccatttatggttcccggaaaatcaagatccgaggagtgccgagggagacctgttatcgatagaaagagaaagttcctagacacagatctagcgcacgattccgaagagctttttcaggatctaagtcaactgcaagaggcctggcttgccgaagctcaggtgcccgacgacgaacaatttgtacctgactttcaatctgataaccttgtgcttcacgcccctccacctactaaaatcaaacgcgaactgcacagcccgagctcagagctcagttcctgtagccacgagcaggctctgggcgctaattacggagaaaagtgtctgtacaactattgtgcttatgaccgcaagcccccttcagggtttaagccgctcacccctccaacgactcctctctctcctacccatcagaaccccctgtttccacccccacaagctacccttccaacatccggacatgccccagccgcagggcctgtccagggggttggaccagcgccagcccctcactctcttcctgagcccggaccacagcagcagaccttcgcggtgccgcgacccccacatcagccacttcaaatgccaaagatgatgcctgagaatcagtatccatcggagcagagattccagagacagctcagcgaaccgtgccacccattccccccacagccaggggtccccggtgacaaccgtccatcatatcacaggcagatgagtgaacctatcgtgcctgcagctccgccacctcctcagggtttcaagcaagaatatcacgacccgctgtacgagcacggcgtcccgggaatgccaggcccacccgcacacgggttccaatcgcctatgggcattaagcaggagcctcgtgactattgtgtggattccgaggtaccgaactgtcagtcatcatatatgcggggaggctattttagttccagccacgagggtttctcgtatgaaaaagatcctcgtctctatttcgatgacacatgtgtggtgccagagcgactggaaggtaaggtgaagcaagaacctacaatgtaccgcgaaggacccccataccagcgtaggggcagtctccagctgtggcagttcctcgtcactcttctggacgacccggctaacgcacacttcattgcttggacgggccgaggtatggaattcaagctcattgaacctgaagaggttgcaaggaggtgggggatccagaaaaatcgcccagcaatgaattacgataagttaagcaggagcctgagatattattatgaaaagggtattatgcagaaggtagcaggggagcgatacgtgtataaatttgtttgcgaccctgacgcactgttctctatggcttttccggacaaccagcgccctttcctgaaagccgaatcagagtgccacctcagcgaagaggacactctgcctctcacacatttcgaagattccccagcctaccttcttgatatggaccggtgctccagcttgccttacgcagaaggattcgcctactag

SEQ ID NO: 146398 - DNA, 453 bp, Artificial Sequence
  derived and/or modified sequence
atggacggcttctacgatcagcaggtcccttttatggtgcctggtaagagtcgttcagaagagtgccgcggaaggcccgtgattgacaggaaacggaagttcttggacacagatcttgcccacgacagcgaggaattgtttcaggacctctcccagctccaggaagcctggctcgctgaagcccaggttcccgacgatgaacagttcgtcccagattttcaatcagataatctggtgcttcacgctcctccgcctaccaagattaaaagagaattacactcaccttccagcgaacttagctcctgttcacatgagcaggccctcggcgcaaactacggagaaaagtgtctctataactattgtgcctatgataggaaaccgcctagcgggttcaagcctctaacccctcctacaacccccctttcacccacccaccagaacccattgttttag

SEQ ID NO: 146399 - DNA, 1659 bp, Artificial Sequence
  derived and/or modified sequence
atgtcggagaggcggtgccctccagagcaccgggagggagttaatgataccggcggaagtctttttccccaaaaattgctaaacgcagaaactagtcagtccggcattagagacgccgaatctacaatggacggcttctatgatcagcaggtacctttcatggtccctgggaagtccaggagtgaggagtgtaggggcaggccagtaattgatcgaaagcgcaagttcctggatacagaccttgcccatgatagcgaagagctttttcaggatctgtcccaactgcaggaggcctggttagctgaagctcaagtgcccgatgacgaacagttcgtgcctgatttccagagtgataatttagttctgcacgcaccgcctccgactaagattaaacgcgagctgcattcccctagttctgaactctcgtcatgttctcatgaacaggcactaggggcaaactacggcgaaaagtgcttatacaactactgcgcctatgatcgtaaaccaccatccggcttcaaacctctgacccctccaaccactcctctgtctcctacacaccagaatcctctgttccccccaccccaagctaccctgcctacttccggccatgctcctgccgctgggcctgtgcagggggtgggcccagcacctgcacctcattcccttccagagccaggccctcagcagcagacattcgccgtgcctcgcccaccgcaccagcccctacaaatgcccaagatgatgcctgaaaatcagtacccgtctgagcagagattccaacggcaactctctgagccatgtcacccattcccacctcagcctggcgtgcctggtgataatcgtccctcttaccacaggcagatgtctgaacctattgtccctgcagccccacctccccctcaggggttcaaacaagagtaccatgacccattgtacgaacacggcgtccctggaatgcccggtcccccagctcacgggttccagagccctatgggaatcaaacaagaacctagagactattgcgtggacagcgaggtccccaactgtcagagctcttacatgaggggcggatacttttcctcctcacacgaaggcttttcctacgagaaggacccacggctttatttcgacgacacatgcgtggtcccagagagacttgaagggaaggtcaagcaggaaccaactatgtacagagagggaccaccataccaacgtcgagggtccttgcaactgtggcaatttttagtcacacttctggacgacccggcaaacgctcatttcatcgcctggacagggagggggatggagtttaaactcatcgagcctgaggaagtggccagaaggtggggtatccagaagaaccggcctgcaatgaactatgacaagctgtctcggtccctcaggtactactatgagaaaggcataatgcagaaagttgcaggtgaacgatacgtttacaaattcgtatgtgaccctgacgccctcttttctatggctttcccggataaccagagaccgtttctaaaagctgagtccgagtgtcatttgtccgaggaggataccctgcccctaacccactttgaagacagcccggcttacctgcttgacatggacagatgctcctccctaccgtacgctgagggtttcgcctactag

SEQ ID NO: 146400 - DNA, 1533 bp, Artificial Sequence
  derived and/or modified sequence
atggacggcttctacgaccagcaggtgcccttcatggtgcccggcaagagcagaagcgaggagtgcagaggcagacccgtgatcgacagaaagagaaagttcctggacaccgacctggcccacgacagcgaggagctgttccaggacctgagccagctgcaggaggcctggctggccgaggcccaggtgcccgacgacgagcagttcgtgcccgacttccagagcgacaacctggtgctgcacgcccccccccccaccaagatcaagagagagctgcacagccccagcagcgagctgagcagctgcagccacgagcaggccctgggcgccaactacggcgagaagtgcctgtacaactactgcgcctacgacagaaagccccccagcggcttcaagcccctgaccccccccaccacccccctgagccccacccaccagaaccccctgttcccccccccccaggccaccctgcccaccagcggccacgcccccgccgccggccccgtgcagggcgtgggccccgcccccgccccccacagcctgcccgagcccggcccccagcagcagaccttcgccgtgcccagacccccccaccagcccctgcagatgcccaagatgatgcccgagaaccagtaccccagcgagcagagattccagagacagctgagcgagccctgccaccccttccccccccagcccggcgtgcccggcgacaacagacccagctaccacagacagatgagcgagcccatcgtgcccgccgcccccccccccccccagggcttcaagcaggagtaccacgaccccctgtacgagcacggcgtgcccggcatgcccggcccccccgcccacggcttccagagccccatgggcatcaagcaggagcccagagactactgcgtggacagcgaggtgcccaactgccagagcagctacatgagaggcggctacttcagcagcagccacgagggcttcagctacgagaaggaccccagactgtacttcgacgacacctgcgtggtgcccgagagactggagggcaaggtgaagcaggagcccaccatgtacagagagggccccccctaccagagaagaggcagcctgcagctgtggcagttcctggtgaccctgctggacgaccccgccaacgcccacttcatcgcctggaccggcagaggcatggagttcaagctgatcgagcccgaggaggtggccagaagatggggcatccagaagaacagacccgccatgaactacgacaagctgagcagaagcctgagatactactacgagaagggcatcatgcagaaggtggccggcgagagatacgtgtacaagttcgtgtgcgaccccgacgccctgttcagcatggccttccccgacaaccagagacccttcctgaaggccgagagcgagtgccacctgagcgaggaggacaccctgcccctgacccacttcgaggacagccccgcctacctgctggacatggacagatgcagcagcctgccctacgccgagggcttcgcctactag

SEQ ID NO: 146401 - DNA, 399 bp, Artificial Sequence
  derived and/or modified sequence
atggacggcttctacgaccagcaggtgcccttcatggtgcccggcaagagcagaagcgaggagtgcagaggcagacccgtgatcgacagaaagagaaagttcctggacaccgacctggcccacgacagcgaggagctgttccaggacctgagccagctgcaggaggcctggctggccgaggcccaggtgcccgacgacgagcagttcgtgcccgacttccagagcgacaacctggtgctgcacgcccccccccccaccaagatcaagagagagctgcacagccccagcagcgagctgagcagctgcagccacgagcaggccctgggcgccaactacggcgagaagtgcctgtacaactactgcgcctacgacagaaagccccccagcggcttcaagtag

SEQ ID NO: 146402 - DNA, 423 bp, Artificial Sequence
  derived and/or modified sequence
atggacggcttctacgaccagcaggtgcccttcatggtgcccggcaagagcagaagcgaggagtgcagaggcagacccgtgatcgacagaaagagaaagttcctggacaccgacctggcccacgacagcgaggagctgttccaggacctgagccagctgcaggaggcctggctggccgaggcccaggtgcccgacgacgagcagttcgtgcccgacttccagagcgacaacctggtgctgcacgcccccccccccaccaagatcaagagagagctgcacagccccagcagcgagctgagcagctgcagccacgagcaggccctgggcgccaactacggcgagaagtgcctgtacaactactgcgcctacgacagaaagccccccagcggcttcaagcccctgaccccccccaccaccccctag

SEQ ID NO: 146403 - DNA, 453 bp, Artificial Sequence
  derived and/or modified sequence
atggacggcttctacgaccagcaggtgcccttcatggtgcccggcaagagcagaagcgaggagtgcagaggcagacccgtgatcgacagaaagagaaagttcctggacaccgacctggcccacgacagcgaggagctgttccaggacctgagccagctgcaggaggcctggctggccgaggcccaggtgcccgacgacgagcagttcgtgcccgacttccagagcgacaacctggtgctgcacgcccccccccccaccaagatcaagagagagctgcacagccccagcagcgagctgagcagctgcagccacgagcaggccctgggcgccaactacggcgagaagtgcctgtacaactactgcgcctacgacagaaagccccccagcggcttcaagcccctgaccccccccaccacccccctgagccccacccaccagaaccccctgttctag

SEQ ID NO: 146404 - DNA, 1659 bp, Artificial Sequence
  derived and/or modified sequence
atgagcgagagaagatgcccccccgagcacagagagggcgtgaacgacaccggcggcagcctgttcccccagaagctgctgaacgccgagaccagccagagcggcatcagagacgccgagagcaccatggacggcttctacgaccagcaggtgcccttcatggtgcccggcaagagcagaagcgaggagtgcagaggcagacccgtgatcgacagaaagagaaagttcctggacaccgacctggcccacgacagcgaggagctgttccaggacctgagccagctgcaggaggcctggctggccgaggcccaggtgcccgacgacgagcagttcgtgcccgacttccagagcgacaacctggtgctgcacgcccccccccccaccaagatcaagagagagctgcacagccccagcagcgagctgagcagctgcagccacgagcaggccctgggcgccaactacggcgagaagtgcctgtacaactactgcgcctacgacagaaagccccccagcggcttcaagcccctgaccccccccaccacccccctgagccccacccaccagaaccccctgttcccccccccccaggccaccctgcccaccagcggccacgcccccgccgccggccccgtgcagggcgtgggccccgcccccgccccccacagcctgcccgagcccggcccccagcagcagaccttcgccgtgcccagacccccccaccagcccctgcagatgcccaagatgatgcccgagaaccagtaccccagcgagcagagattccagagacagctgagcgagccctgccaccccttccccccccagcccggcgtgcccggcgacaacagacccagctaccacagacagatgagcgagcccatcgtgcccgccgcccccccccccccccagggcttcaagcaggagtaccacgaccccctgtacgagcacggcgtgcccggcatgcccggcccccccgcccacggcttccagagccccatgggcatcaagcaggagcccagagactactgcgtggacagcgaggtgcccaactgccagagcagctacatgagaggcggctacttcagcagcagccacgagggcttcagctacgagaaggaccccagactgtacttcgacgacacctgcgtggtgcccgagagactggagggcaaggtgaagcaggagcccaccatgtacagagagggccccccctaccagagaagaggcagcctgcagctgtggcagttcctggtgaccctgctggacgaccccgccaacgcccacttcatcgcctggaccggcagaggcatggagttcaagctgatcgagcccgaggaggtggccagaagatggggcatccagaagaacagacccgccatgaactacgacaagctgagcagaagcctgagatactactacgagaagggcatcatgcagaaggtggccggcgagagatacgtgtacaagttcgtgtgcgaccccgacgccctgttcagcatggccttccccgacaaccagagacccttcctgaaggccgagagcgagtgccacctgagcgaggaggacaccctgcccctgacccacttcgaggacagccccgcctacctgctggacatggacagatgcagcagcctgccctacgccgagggcttcgcctactag

SEQ ID NO: 146405 - DNA, 4111 bp, Artificial Sequence
  derived and/or modified sequence
agcctggttggcagctgcggcgcagagtccagccgctggtgcgcggagcggttcaccgtcttcggagcggttcggcccagcctttcgcccaggcgcccaggcccgctgcgcgcgtgcgtgagcgcgcctgcgccgccggggccgctgcaaggggaggagagaggccgcctcaggaggatcccttttcccccagaaattactcaatgctgaaacctctcaaagtggtattagagacgctgaaagcaccatggacgggttttatgatcagcaagtcccttttatggtcccagggaaatctcgatctgaggaatgcagagggcggcctgtgattgacagaaagaggaagtttttggacacagatctggctcacgattctgaagagctatttcaggatctcagtcaacttcaagaggcttggttagctgaagcacaagttcctgatgatgaacagtttgtcccagattttcagtctgataacctggtgcttcatgccccacctccaaccaagatcaaacgggagctgcacagcccctcctctgagctgtcgtcttgtagccatgagcaggctcttggtgctaactatggagaaaagtgcctctacaactattgtgcctatgataggaagcctccctctgggttcaagccattaacccctcctacaacccccctctcacccacccatcagaatcccctatttcccccacctcaggcaactctgcccacctcagggcatgcccctgcagctggcccagttcaaggtgtgggccccgcccccgccccccattcgcttccagagcctggaccacagcagcaaacatttgcggtcccccgaccaccacatcagcccctgcagatgccaaagatgatgcctgaaaaccagtatccatcagaacagagatttcagagacaactgtctgaaccctgccaccccttccctcctcagccaggagttcctggagataatcgccccagttaccatcggcaaatgtcagaacctattgtccctgcagctcccccgccccctcagggattcaaacaagaataccatgacccactctatgaacatggggtcccgggcatgccagggcccccagcacacgggttccagtcaccaatgggaatcaagcaggagcctcgggattactgcgtcgattcagaagtgcctaactgccagtcatcctacatgagagggggttatttctccagcagccatgaaggtttttcatatgaaaaagatccccgattatactttgacgacacttgtgttgtgcctgagagactggaaggcaaagtcaaacaggagcctaccatgtatcgagaggggcccccttaccagaggcgaggttcccttcagctgtggcagttcctggtcacccttcttgatgacccagccaatgcccacttcattgcctggacaggtcgaggcatggagttcaagctgatagaaccggaagaggttgctcggcgctggggcatccagaagaaccggccagccatgaactatgacaagctgagccgctctctccgctattactatgaaaagggcatcatgcagaaggtggctggagagcgatacgtctacaaatttgtctgtgacccagatgccctcttctccatggctttcccggataaccagcgtccgttcctgaaggcagagtccgagtgccacctcagcgaggaggacaccctgccgctgacccactttgaagacagccccgcttacctcctggacatggaccgctgcagcagcctcccctatgccgaaggctttgcttactaagtttctgagtggcggagtggccaaaccctagagctagcagttcccattcaggcaaacaagggcagtggttttgtttgtgtttttggttgttcctaaagcttgccctttgagtattatctggagaacccaagctgtctctggattggcacccttaaagacagatacattggctggggagtgggaacagggaggggcagaaaaccaccaaaaggccagtgcctcaactcttgattctgatgaggtttctgggaagagatcaaaatggagtctccttaccatggacaatacatgcaaagcaatatcttgttcaggttagtacccgcaaaacgggacatagtatgtgacaatctgcatcgatcatggactactaaatgcctttacatagaagggctctgatttgcacaatttgttgaaaaatcacaaacccatagaaaagtaagtaggctaagttggggaggctcaaaccattaagggttaaaaatacatcttaaacattggaaagctcttctagctgaatctgaaatattaccccttgtctagaaaaaggggggcagtcagaacagctgttccccactccgtggttctcaaaatcataaaccatggctactcttgggaaccacccggccatgtggtcgccaagtagagcaagccccctttctcttcccaatcacgtggctgagtgtggatgacttttattttaggagaagggcgattaacacttttgacagtattttgttttgccctgatttgggggattgttttgttttggtggttgttttggaaaaacagtttataaactgatttttgtagttttggtatttaaagcaaaaaaacgaaaaacaaaaaacaaaaacaaaccttttggtaactgtgcactgtgtcctttagccagggccgtgccaacttatgaagacactgcagcttgagaggggctttgctgaggcttccccttggccatgtgaaagcccgccttgttgcctgctttgtgctttctgcaccagacaacctgatggaacatttgcacctgagttgtacatttttgaagtgtgcagggcagcctggacacaagcttagattctctatgtatagttccccgtgttcactaacatgccctctctggaaagcatatgtatataacatgtgtcatgtcctttggaaacctggtcacctggtgaaaacccttgggattcttccctgggcatgactgatgacaatttccatttcatcagtttgttttgttttcctttttctttaaatcttggactttaaaccctacctgtgtgattcagtagggtttgagacttacgtgtgatactgacaggtaagcaacagtgctagcattctagattcctgcctttttttaaaaagaaattattctcattgctgtattatattggaaaagttttaaacaaccaagctaaagctatgtgaaagttgagctcaaagtagaggaaaagttactggtggtaccttgctgcctgctctgctggtagaattctgtgctccccgtgacacttagtacattaagaatgactacactgttcctcgtatgtgaaggaggcagtgctgactccgtgagtgtgagacacgtgctttgaactgcttttctattcatggagcactccatagtctcaaactgtcccccttatgaccaacagcacatttgtgaagaggttcgcagggataaggggtgcactttatagctatggaaacatgagattctcctctattggaagctaattagcccacaaaggtggtaaacctgtagattgggccttaattagcattgtactctaatcaaaggactctttctaaaccatatttatagctttcttaacctacacatagtctatacatagatgcatattttacccccagctggctagagatttatttgttgtaaatgctgtatagatttggttttcctttctttacttaccctggtttggattttttttttttttcttttgaatggatttatgctgtcttagcaatatgacaataatcctctgtagcttgagctacccctcccctgctgtaacttacgtgacctgtgctgtcactgggcataggacagcggcatcacggttgcattcccattggactcatgcacctcccggatggtttttgtttttttcgggggttctttggggtttgtttgtttgcttcttttccagagtgtggaaagtctacagtgcagaaaggcttgaacctgccagctgatttgaaatactttcccctgcgcagggccgtatgcatcctgccaagctgcgttatattctgtactgtgtacaataaagaagtttgcttttcgtttaccaagcacccgaa

SEQ ID NO: 146406 - DNA, 573 bp, Artificial Sequence
  derived and/or modified sequence
tttgcgggggcaggggggagatcggaaggggcgtccggccactggtccgacaggcccagccggctagagttcacgggctgattcagaatcttcaaagtcggggaggatcccttttcccccagaaattactcaatgctgaaacctctcaaagtggtattagagacgctgaaagcaccatggacgggttttatgatcagcaagtcccttttatggtcccagggaaatctcgatctgaggaatgcagagggcggcctgtgattgacagaaagaggaagtttttggacacagatctggctcacgattctgaagagctatttcaggatctcagtcaacttcaagaggcttggttagctgaagcacaagttcctgatgatgaacagtttgtcccagattttcagtctgataacctggtgcttcatgccccacctccaaccaagatcaaacgggagctgcacagcccctcctctgagctgtcgtcttgtagccatgagcaggctcttggtgctaactatggagaaaagtgcctctacaactattgtgcctatgataggaagcctccctctgggttcaagc

SEQ ID NO: 146407 - DNA, 554 bp, Artificial Sequence
  derived and/or modified sequence
gtgcgtgagcgcgcctgcgccgccggggccgctgcaaggggaggagagaggccgcctcaggaggatcccttttcccccagaaattactcaatgctgaaacctctcaaagtggtattagagacgctgaaagcaccatggacgggttttatgatcagcaagtcccttttatggtcccagggaaatctcgatctgaggaatgcagagggcggcctgtgattgacagaaagaggaagtttttggacacagatctggctcacgattctgaagagctatttcaggatctcagtcaacttcaagaggcttggttagctgaagcacaagttcctgatgatgaacagtttgtcccagattttcagtctgataacctggtgcttcatgccccacctccaaccaagatcaaacgggagctgcacagcccctcctctgagctgtcgtcttgtagccatgagcaggctcttggtgctaactatggagaaaagtgcctctacaactattgtgcctatgataggaagcctccctctgggttcaagccattaacccctcctacaaccccc

SEQ ID NO: 146408 - DNA, 2213 bp, Artificial Sequence
  derived and/or modified sequence
ggagcgcgagtgcgggggctcccgagtggatgggggatcgcggagttgcgaggctttcacagtctctggagattcgagagccccgaggggacttggaggctcgcgagaagagacgcttggcggagctccgcagttgggaggagggggcgggaagcagtttgaggggaatgtctgagaggcgctgccccccagagcaccgggagggggtaaatgacacaggaggatcccttttcccccagaaattactcaatgctgaaacctctcaaagtggtattagagacgctgaaagcaccatggacgggttttatgatcagcaagtcccttttatggtcccagggaaatctcgatctgaggaatgcagagggcggcctgtgattgacagaaagaggaagtttttggacacagatctggctcacgattctgaagagctatttcaggatctcagtcaacttcaagaggcttggttagctgaagcacaagttcctgatgatgaacagtttgtcccagattttcagtctgataacctggtgcttcatgccccacctccaaccaagatcaaacgggagctgcacagcccctcctctgagctgtcgtcttgtagccatgagcaggctcttggtgctaactatggagaaaagtgcctctacaactattgtgcctatgataggaagcctccctctgggttcaagccattaacccctcctacaacccccctctcacccacccatcagaatcccctatttcccccacctcaggcaactctgcccacctcagggcatgcccctgcagctggcccagttcaaggtgtgggccccgcccccgccccccattcgcttccagagcctggaccacagcagcaaacatttgcggtcccccgaccaccacatcagcccctgcagatgccaaagatgatgcctgaaaaccagtatccatcagaacagagatttcagagacaactgtctgaaccctgccaccccttccctcctcagccaggagttcctggagataatcgccccagttaccatcggcaaatgtcagaacctattgtccctgcagctcccccgccccctcagggattcaaacaagaataccatgacccactctatgaacatggggtcccgggcatgccagggcccccagcacacgggttccagtcaccaatgggaatcaagcaggagcctcgggattactgcgtcgattcagaagtgcctaactgccagtcatcctacatgagagggggttatttctccagcagccatgaaggtttttcatatgaaaaagatccccgattatactttgacgacacttgtgttgtgcctgagagactggaaggcaaagtcaaacaggagcctaccatgtatcgagaggggcccccttaccagaggcgaggttcccttcagctgtggcagttcctggtcacccttcttgatgacccagccaatgcccacttcattgcctggacaggtcgaggcatggagttcaagctgatagaaccggaagaggttgctcggcgctggggcatccagaagaaccggccagccatgaactatgacaagctgagccgctctctccgctattactatgaaaagggcatcatgcagaaggtggctggagagcgatacgtctacaaatttgtctgtgacccagatgccctcttctccatggctttcccggataaccagcgtccgttcctgaaggcagagtccgagtgccacctcagcgaggaggacaccctgccgctgacccactttgaagacagccccgcttacctcctggacatggaccgctgcagcagcctcccctatgccgaaggctttgcttactaagtttctgagtggcggagtggccaaaccctagagctagcagttcccattcaggcaaacaagggcagtggttttgtttgtgtttttggttgttcctaaagcttgccctttgagtattatctggagaacccaagctgtctctggattggcacccttaaagacagatacattggctggggagtgggaacagggaggggcagaaaaccaccaaaaggccagtgcctcaactcttgattctgatgaggtttctgggaagagatcaaaatggagtctccttaccatggacaatacatgcaaagcaatatcttgttcaggttagtacccgcaaaacgggacatagtatgtgacaatctgcatcgatcatggactactaaatgcctttacatagaa

SEQ ID NO: 146409 - DNA, 574 bp, Artificial Sequence
  derived and/or modified sequence
agcatccccggagagaagatagagccgccccacggccttcacaggagggggaggatcccttttcccccagaaattactcaatgctgaaacctctcaaagtggtattagagacgctgaaagcaccatggacgggttttatgatcagcaagtcccttttatggtcccagggaaatctcgatctgaggaatgcagagggcggcctgtgattgacagaaagaggaagtttttggacacagatctggctcacgattctgaagagctatttcaggatctcagtcaacttcaagaggcttggttagctgaagcacaagttcctgatgatgaacagtttgtcccagattttcagtctgataacctggtgcttcatgccccacctccaaccaagatcaaacgggagctgcacagcccctcctctgagctgtcgtcttgtagccatgagcaggctcttggtgctaactatggagaaaagtgcctctacaactattgtgcctatgataggaagcctccctctgggttcaagccattaacccctcctacaacccccctctcacccacccatcagaatcccctattt

SEQ ID NO: 146410 - DNA, 1859 bp, Artificial Sequence
  derived and/or modified sequence
agttgggaggagggggcgggaagcagtttgaggggaatgtctgagaggcgctgccccccagagcaccgggagggggtaaatgacacaggaggatcccttttcccccagaaattactcaatgctgaaacctctcaaagtggtattagagacgctgaaagcaccatggacgggttttatgatcagcaagtcccttttatggtcccagggaaatctcgatctgaggaatgcagagggcggcctgtgattgacagaaagaggaagtttttggacacagatctggctcacgattctgaagagctatttcaggatctcagtcaacttcaagaggcttggttagctgaagcacaagttcctgatgatgaacagtttgtcccagattttcagtctgataacctggtgcttcatgccccacctccaaccaagatcaaacgggagctgcacagcccctcctctgagctgtcgtcttgtagccatgagcaggctcttggtgctaactatggagaaaagtgcctctacaactattgtgcctatgataggaagcctccctctgggttcaagccattaacccctcctacaacccccctctcacccacccatcagaatcccctatttcccccacctcaggcaactctgcccacctcagggcatgcccctgcagctggcccagttcaaggtgtgggccccgcccccgccccccattcgcttccagagcctggaccacagcagcaaacatttgcggtcccccgaccaccacatcagcccctgcagatgccaaagatgatgcctgaaaaccagtatccatcagaacagagatttcagagacaactgtctgaaccctgccaccccttccctcctcagccaggagttcctggagataatcgccccagttaccatcggcaaatgtcagaacctattgtccctgcagctcccccgccccctcagggattcaaacaagaataccatgacccactctatgaacatggggtcccgggcatgccagggcccccagcacacgggttccagtcaccaatgggaatcaagcaggagcctcgggattactgcgtcgattcagaagtgcctaactgccagtcatcctacatgagagggggttatttctccagcagccatgaaggtttttcatatgaaaaagatccccgattatactttgacgacacttgtgttgtgcctgagagactggaaggcaaagtcaaacaggagcctaccatgtatcgagaggggcccccttaccagaggcgaggttcccttcagctgtggcagttcctggtcacccttcttgatgacccagccaatgcccacttcattgcctggacaggtcgaggcatggagttcaagctgatagaaccggaagaggttgctcggcgctggggcatccagaagaaccggccagccatgaactatgacaagctgagccgctctctccgctattactatgaaaagggcatcatgcagaaggtggctggagagcgatacgtctacaaatttgtctgtgacccagatgccctcttctccatggctttcccggataaccagcgtccgttcctgaaggcagagtccgagtgccacctcagcgaggaggacaccctgccgctgacccactttgaagacagccccgcttacctcctggacatggaccgctgcagcagcctcccctatgccgaaggctttgcttactaagtttctgagtggcggagtggccaaaccctagagctagcagttcccattcaggcaaacaagggcagtggttttgtttgtgtttttggttgttcctaaagcttgccctttgagtattatctggagaacccaagctgtctctggattggcacccttaaagacagata

SEQ ID NO: 146411 - protein, 2903 aa, Artificial Sequence
  derived and/or modified sequence
MRGRRGRPPKQPAAPAAERCAPAPPPPPPPPTSGPIGGLRSRHRGSSRGRWAAAQAEVAPKTRLSSPRGGSSSRRKPPPPPPAPPSTSAPGRGGRGGGGGRTGGGGGGGHLARTTAARRAVNKVVYDDHESEEEEEEEDMVSEEEEEEDGDAEETQDSEDDEEDEMEEDDDDSDYPEEMEDDDDDASYCTESSFRSHSTYSSTPGRRKPRVHRPRSPILEEKDIPPLEFPKSSEDLMVPNEHIMNVIAIYEVLRNFGTVLRLSPFRFEDFCAALVSQEQCTLMAEMHVVLLKAVLREEDTSNTTFGPADLKDSVNSTLYFIDGMTWPEVLRVYCESDKEYHHVLPYQEAEDYPYGPVENKIKVLQFLVDQFLTTNIAREELMSEGVIQYDDHCRVCHKLGDLLCCETCSAVYHLECVKPPLEEVPEDEWQCEVCVAHKVPGVTDCVAEIQKNKPYIRHEPIGYDRSRRKYWFLNRRLIIEEDTENENEKKIWYYSTKVQLAELIDCLDKDYWEAELCKILEEMREEIHRHMDITEDLTNKARGSNKSFLAAANEEILESIRAKKGDIDNVKSPEETEKDKNETENDSKDAEKNREEFEDQSLEKDSDDKTPDDDPEQGKSEEPTEVGDKGNSVSANLGDNTTNATSEETSPSEGRSPVGCLSETPDSSNMAEKKVASELPQDVPEEPNKTCESSNTSATTTSIQPNLENSNSSSELNSSQSESAKAADDPENGERESHTPVSIQEEIVGDFKSEKSNGELSESPGAGKGASGSTRIITRLRNPDSKLSQLKSQQVAAAAHEANKLFKEGKEVLVVNSQGEISRLSTKKEVIMKGNINNYFKLGQEGKYRVYHNQYSTNSFALNKHQHREDHDKRRHLAHKFCLTPAGEFKWNGSVHGSKVLTISTLRLTITQLENNIPSSFLHPNWASHRANWIKAVQMCSKPREFALALAILECAVKPVVMLPIWRESLGHTRLHRMTSIEREEKEKVKKKEKKQEEEETMQQATWVKYTFPVKHQVWKQKGEEYRVTGYGGWSWISKTHVYRFVPKLPGNTNVNYRKSLEGTKNNMDENMDESDKRKCSRSPKKIKIEPDSEKDEVKGSDAAKGADQNEMDISKITEKKDQDVKELLDSDSDKPCKEEPMEVDDDMKTESHVNCQESSQVDVVNVSEGFHLRTSYKKKTKSSKLDGLLERRIKQFTLEEKQRLEKIKLEGGIKGIGKTSTNSSKNLSESPVITKAKEGCQSDSMRQEQSPNANNDQPEDLIQGCSESDSSVLRMSDPSHTTNKLYPKDRVLDDVSIRSPETKCPKQNSIENDIEEKVSDLASRGQEPSKSKTKGNDFFIDDSKLASADDIGTLICKNKKPLIQEESDTIVSSSKSALHSSVPKSTNDRDATPLSRAMDFEGKLGCDSESNSTLENSSDTVSIQDSSEEDMIVQNSNESISEQFRTREQDVEVLEPLKCELVSGESTGNCEDRLPVKGTEANGKKPSQQKKLEERPVNKCSDQIKLKNTTDKKNNENRESEKKGQRTSTFQINGKDNKPKIYLKGECLKEISESRVVSGNVEPKVNNINKIIPENDIKSLTVKESAIRPFINGDVIMEDFNERNSSETKSHLLSSSDAEGNYRDSLETLPSTKESDSTQTTTPSASCPESNSVNQVEDMEIETSEVKKVTSSPITSEEESNLSNDFIDENGLPINKNENVNGESKRKTVITEVTTMTSTVATESKTVIKVEKGDKQTVVSSTENCAKSTVTTTTTTVTKLSTPSTGGSVDIISVKEQSKTVVTTTVTDSLTTTGGTLVTSMTVSKEYSTRDKVKLMKFSRPKKTRSGTALPSYRKFVTKSSKKSIFVLPNDDLKKLARKGGIREVPYFNYNAKPALDIWPYPSPRPTFGITWRYRLQTVKSLAGVSLMLRLLWASLRWDDMAAKAPPGGGTTRTETSETEITTTEIIKRRDVGPYGIRSEYCIRKIICPIGVPETPKETPTPQRKGLRSSALRPKRPETPKQTGPVIIETWVAEEELELWEIRAFAERVEKEKAQAVEQQAKKRLEQQKPTVIATSTTSPTSSTTSTISPAQKVMVAPISGSVTTGTKMVLTTKVGSPATVTFQQNKNFHQTFATWVKQGQSNSGVVQVQQKVLGIIPSSTGTSQQTFTSFQPRTATVTIRPNTSGSGGTTSNSQVITGPQIRPGMTVIRTPLQQSTLGKAIIRTPVMVQPGAPQQVMTQIIRGQPVSTAVSAPNTVSSTPGQKSLTSATSTSNIQSSASQPPRPQQGQVKLTMAQLTQLTQGHGGNQGLTVVIQGQGQTTGQLQLIPQGVTVLPGPGQQLMQAAMPNGTVQRFLFTPLATTATTASTTTTTVSTTAAGTGEQRQSKLSPQMQVHQDKTLPPAQSSSVGPAEAQPQTAQPSAQPQPQTQPQSPAQPEVQTQPEVQTQTTVSSHVPSEAQPTHAQSSKPQVAAQSQPQSNVQGQSPVRVQSPSQTRIRPSTPSQLSPGQQSQVQTTTSQPIPIQPHTSLQIPSQGQPQSQPQVVMKHNAVIEHLKQKKSMTPAEREENQRMIVCNQVMKYILDKIDKEEKQAAKKRKREESVEQKRSKQNATKLSALLFKHKEQLRAEILKKRALLDKDLQIEVQEELKRDLKIKKEKDLMQLAQATAVAAPCPPVTPAPPAPPAPPPSPPPPPAVQHTGLLSTPTLPAASQKRKREEEKDSSSKSKKKKMISTTSKETKKDTKLYCICKTPYDESKFYIGCDRCQNWYHGRCVGILQSEAELIDEYVCPQCQSTEDAMTVLTPLTEKDYEGLKRVLRSLQAHKMAWPFLEPVDPNDAPDYYGVIKEPMDLATMEERVQRRYYEKLTEFVADMTKIFDNCRYYNPSDSPFYQCAEVLESFFVQKLKGFKASRSHNNKLQSTAS

SEQ ID NO: 146412 - DNA, 8712 bp, Artificial Sequence
  derived and/or modified sequence
atgagaggcagaagaggcagaccccccaagcagcccgccgcccccgccgccgagagatgcgcccccgccccccccccccccccccccccccccaccagcggccccatcggcggcctgagaagcagacacagaggcagcagcagaggcagatgggccgccgcccaggccgaggtggcccccaagaccagactgagcagccccagaggcggcagcagcagcagaagaaagccccccccccccccccccgccccccccagcaccagcgcccccggcagaggcggcagaggcggcggcggcggcagaaccggcggcggcggcggcggcggccacctggccagaaccaccgccgccagaagagccgtgaacaaggtggtgtacgacgaccacgagagcgaggaggaggaggaggaggaggacatggtgagcgaggaggaggaggaggaggacggcgacgccgaggagacccaggacagcgaggacgacgaggaggacgagatggaggaggacgacgacgacagcgactaccccgaggagatggaggacgacgacgacgacgccagctactgcaccgagagcagcttcagaagccacagcacctacagcagcacccccggcagaagaaagcccagagtgcacagacccagaagccccatcctggaggagaaggacatcccccccctggagttccccaagagcagcgaggacctgatggtgcccaacgagcacatcatgaacgtgatcgccatctacgaggtgctgagaaacttcggcaccgtgctgagactgagccccttcagattcgaggacttctgcgccgccctggtgagccaggagcagtgcaccctgatggccgagatgcacgtggtgctgctgaaggccgtgctgagagaggaggacaccagcaacaccaccttcggccccgccgacctgaaggacagcgtgaacagcaccctgtacttcatcgacggcatgacctggcccgaggtgctgagagtgtactgcgagagcgacaaggagtaccaccacgtgctgccctaccaggaggccgaggactacccctacggccccgtggagaacaagatcaaggtgctgcagttcctggtggaccagttcctgaccaccaacatcgccagagaggagctgatgagcgagggcgtgatccagtacgacgaccactgcagagtgtgccacaagctgggcgacctgctgtgctgcgagacctgcagcgccgtgtaccacctggagtgcgtgaagccccccctggaggaggtgcccgaggacgagtggcagtgcgaggtgtgcgtggcccacaaggtgcccggcgtgaccgactgcgtggccgagatccagaagaacaagccctacatcagacacgagcccatcggctacgacagaagcagaagaaagtactggttcctgaacagaagactgatcatcgaggaggacaccgagaacgagaacgagaagaagatctggtactacagcaccaaggtgcagctggccgagctgatcgactgcctggacaaggactactgggaggccgagctgtgcaagatcctggaggagatgagagaggagatccacagacacatggacatcaccgaggacctgaccaacaaggccagaggcagcaacaagagcttcctggccgccgccaacgaggagatcctggagagcatcagagccaagaagggcgacatcgacaacgtgaagagccccgaggagaccgagaaggacaagaacgagaccgagaacgacagcaaggacgccgagaagaacagagaggagttcgaggaccagagcctggagaaggacagcgacgacaagacccccgacgacgaccccgagcagggcaagagcgaggagcccaccgaggtgggcgacaagggcaacagcgtgagcgccaacctgggcgacaacaccaccaacgccaccagcgaggagaccagccccagcgagggcagaagccccgtgggctgcctgagcgagacccccgacagcagcaacatggccgagaagaaggtggccagcgagctgccccaggacgtgcccgaggagcccaacaagacctgcgagagcagcaacaccagcgccaccaccaccagcatccagcccaacctggagaacagcaacagcagcagcgagctgaacagcagccagagcgagagcgccaaggccgccgacgaccccgagaacggcgagagagagagccacacccccgtgagcatccaggaggagatcgtgggcgacttcaagagcgagaagagcaacggcgagctgagcgagagccccggcgccggcaagggcgccagcggcagcaccagaatcatcaccagactgagaaaccccgacagcaagctgagccagctgaagagccagcaggtggccgccgccgcccacgaggccaacaagctgttcaaggagggcaaggaggtgctggtggtgaacagccagggcgagatcagcagactgagcaccaagaaggaggtgatcatgaagggcaacatcaacaactacttcaagctgggccaggagggcaagtacagagtgtaccacaaccagtacagcaccaacagcttcgccctgaacaagcaccagcacagagaggaccacgacaagagaagacacctggcccacaagttctgcctgacccccgccggcgagttcaagtggaacggcagcgtgcacggcagcaaggtgctgaccatcagcaccctgagactgaccatcacccagctggagaacaacatccccagcagcttcctgcaccccaactgggccagccacagagccaactggatcaaggccgtgcagatgtgcagcaagcccagagagttcgccctggccctggccatcctggagtgcgccgtgaagcccgtggtgatgctgcccatctggagagagagcctgggccacaccagactgcacagaatgaccagcatcgagagagaggagaaggagaaggtgaagaagaaggagaagaagcaggaggaggaggagaccatgcagcaggccacctgggtgaagtacaccttccccgtgaagcaccaggtgtggaagcagaagggcgaggagtacagagtgaccggctacggcggctggagctggatcagcaagacccacgtgtacagattcgtgcccaagctgcccggcaacaccaacgtgaactacagaaagagcctggagggcaccaagaacaacatggacgagaacatggacgagagcgacaagagaaagtgcagcagaagccccaagaagatcaagatcgagcccgacagcgagaaggacgaggtgaagggcagcgacgccgccaagggcgccgaccagaacgagatggacatcagcaagatcaccgagaagaaggaccaggacgtgaaggagctgctggacagcgacagcgacaagccctgcaaggaggagcccatggaggtggacgacgacatgaagaccgagagccacgtgaactgccaggagagcagccaggtggacgtggtgaacgtgagcgagggcttccacctgagaaccagctacaagaagaagaccaagagcagcaagctggacggcctgctggagagaagaatcaagcagttcaccctggaggagaagcagagactggagaagatcaagctggagggcggcatcaagggcatcggcaagaccagcaccaacagcagcaagaacctgagcgagagccccgtgatcaccaaggccaaggagggctgccagagcgacagcatgagacaggagcagagccccaacgccaacaacgaccagcccgaggacctgatccagggctgcagcgagagcgacagcagcgtgctgagaatgagcgaccccagccacaccaccaacaagctgtaccccaaggacagagtgctggacgacgtgagcatcagaagccccgagaccaagtgccccaagcagaacagcatcgagaacgacatcgaggagaaggtgagcgacctggccagcagaggccaggagcccagcaagagcaagaccaagggcaacgacttcttcatcgacgacagcaagctggccagcgccgacgacatcggcaccctgatctgcaagaacaagaagcccctgatccaggaggagagcgacaccatcgtgagcagcagcaagagcgccctgcacagcagcgtgcccaagagcaccaacgacagagacgccacccccctgagcagagccatggacttcgagggcaagctgggctgcgacagcgagagcaacagcaccctggagaacagcagcgacaccgtgagcatccaggacagcagcgaggaggacatgatcgtgcagaacagcaacgagagcatcagcgagcagttcagaaccagagagcaggacgtggaggtgctggagcccctgaagtgcgagctggtgagcggcgagagcaccggcaactgcgaggacagactgcccgtgaagggcaccgaggccaacggcaagaagcccagccagcagaagaagctggaggagagacccgtgaacaagtgcagcgaccagatcaagctgaagaacaccaccgacaagaagaacaacgagaacagagagagcgagaagaagggccagagaaccagcaccttccagatcaacggcaaggacaacaagcccaagatctacctgaagggcgagtgcctgaaggagatcagcgagagcagagtggtgagcggcaacgtggagcccaaggtgaacaacatcaacaagatcatccccgagaacgacatcaagagcctgaccgtgaaggagagcgccatcagacccttcatcaacggcgacgtgatcatggaggacttcaacgagagaaacagcagcgagaccaagagccacctgctgagcagcagcgacgccgagggcaactacagagacagcctggagaccctgcccagcaccaaggagagcgacagcacccagaccaccacccccagcgccagctgccccgagagcaacagcgtgaaccaggtggaggacatggagatcgagaccagcgaggtgaagaaggtgaccagcagccccatcaccagcgaggaggagagcaacctgagcaacgacttcatcgacgagaacggcctgcccatcaacaagaacgagaacgtgaacggcgagagcaagagaaagaccgtgatcaccgaggtgaccaccatgaccagcaccgtggccaccgagagcaagaccgtgatcaaggtggagaagggcgacaagcagaccgtggtgagcagcaccgagaactgcgccaagagcaccgtgaccaccaccaccaccaccgtgaccaagctgagcacccccagcaccggcggcagcgtggacatcatcagcgtgaaggagcagagcaagaccgtggtgaccaccaccgtgaccgacagcctgaccaccaccggcggcaccctggtgaccagcatgaccgtgagcaaggagtacagcaccagagacaaggtgaagctgatgaagttcagcagacccaagaagaccagaagcggcaccgccctgcccagctacagaaagttcgtgaccaagagcagcaagaagagcatcttcgtgctgcccaacgacgacctgaagaagctggccagaaagggcggcatcagagaggtgccctacttcaactacaacgccaagcccgccctggacatctggccctaccccagccccagacccaccttcggcatcacctggagatacagactgcagaccgtgaagagcctggccggcgtgagcctgatgctgagactgctgtgggccagcctgagatgggacgacatggccgccaaggccccccccggcggcggcaccaccagaaccgagaccagcgagaccgagatcaccaccaccgagatcatcaagagaagagacgtgggcccctacggcatcagaagcgagtactgcatcagaaagatcatctgccccatcggcgtgcccgagacccccaaggagacccccaccccccagagaaagggcctgagaagcagcgccctgagacccaagagacccgagacccccaagcagaccggccccgtgatcatcgagacctgggtggccgaggaggagctggagctgtgggagatcagagccttcgccgagagagtggagaaggagaaggcccaggccgtggagcagcaggccaagaagagactggagcagcagaagcccaccgtgatcgccaccagcaccaccagccccaccagcagcaccaccagcaccatcagccccgcccagaaggtgatggtggcccccatcagcggcagcgtgaccaccggcaccaagatggtgctgaccaccaaggtgggcagccccgccaccgtgaccttccagcagaacaagaacttccaccagaccttcgccacctgggtgaagcagggccagagcaacagcggcgtggtgcaggtgcagcagaaggtgctgggcatcatccccagcagcaccggcaccagccagcagaccttcaccagcttccagcccagaaccgccaccgtgaccatcagacccaacaccagcggcagcggcggcaccaccagcaacagccaggtgatcaccggcccccagatcagacccggcatgaccgtgatcagaacccccctgcagcagagcaccctgggcaaggccatcatcagaacccccgtgatggtgcagcccggcgccccccagcaggtgatgacccagatcatcagaggccagcccgtgagcaccgccgtgagcgcccccaacaccgtgagcagcacccccggccagaagagcctgaccagcgccaccagcaccagcaacatccagagcagcgccagccagccccccagaccccagcagggccaggtgaagctgaccatggcccagctgacccagctgacccagggccacggcggcaaccagggcctgaccgtggtgatccagggccagggccagaccaccggccagctgcagctgatcccccagggcgtgaccgtgctgcccggccccggccagcagctgatgcaggccgccatgcccaacggcaccgtgcagagattcctgttcacccccctggccaccaccgccaccaccgccagcaccaccaccaccaccgtgagcaccaccgccgccggcaccggcgagcagagacagagcaagctgagcccccagatgcaggtgcaccaggacaagaccctgccccccgcccagagcagcagcgtgggccccgccgaggcccagccccagaccgcccagcccagcgcccagccccagccccagacccagccccagagccccgcccagcccgaggtgcagacccagcccgaggtgcagacccagaccaccgtgagcagccacgtgcccagcgaggcccagcccacccacgcccagagcagcaagccccaggtggccgcccagagccagccccagagcaacgtgcagggccagagccccgtgagagtgcagagccccagccagaccagaatcagacccagcacccccagccagctgagccccggccagcagagccaggtgcagaccaccaccagccagcccatccccatccagccccacaccagcctgcagatccccagccagggccagccccagagccagccccaggtggtgatgaagcacaacgccgtgatcgagcacctgaagcagaagaagagcatgacccccgccgagagagaggagaaccagagaatgatcgtgtgcaaccaggtgatgaagtacatcctggacaagatcgacaaggaggagaagcaggccgccaagaagagaaagagagaggagagcgtggagcagaagagaagcaagcagaacgccaccaagctgagcgccctgctgttcaagcacaaggagcagctgagagccgagatcctgaagaagagagccctgctggacaaggacctgcagatcgaggtgcaggaggagctgaagagagacctgaagatcaagaaggagaaggacctgatgcagctggcccaggccaccgccgtggccgccccctgcccccccgtgacccccgccccccccgccccccccgcccccccccccagccccccccccccccccgccgtgcagcacaccggcctgctgagcacccccaccctgcccgccgccagccagaagagaaagagagaggaggagaaggacagcagcagcaagagcaagaagaagaagatgatcagcaccaccagcaaggagaccaagaaggacaccaagctgtactgcatctgcaagaccccctacgacgagagcaagttctacatcggctgcgacagatgccagaactggtaccacggcagatgcgtgggcatcctgcagagcgaggccgagctgatcgacgagtacgtgtgcccccagtgccagagcaccgaggacgccatgaccgtgctgacccccctgaccgagaaggactacgagggcctgaagagagtgctgagaagcctgcaggcccacaagatggcctggcccttcctggagcccgtggaccccaacgacgcccccgactactacggcgtgatcaaggagcccatggacctggccaccatggaggagagagtgcagagaagatactacgagaagctgaccgagttcgtggccgacatgaccaagatcttcgacaactgcagatactacaaccccagcgacagccccttctaccagtgcgccgaggtgctggagagcttcttcgtgcagaagctgaagggcttcaaggccagcagaagccacaacaacaagctgcagagcaccgccagctag

SEQ ID NO: 146413 - DNA, 9766 bp, Artificial Sequence
  derived and/or modified sequence
ggctgaaggcgatccggagtggggccccagcaattcggattgagccttctccctccacccgcttccgtcggccgggcccctcccgcccggccccgcgggcctccccacccggccccggcgctccccaccgccccccctgcgcccgcccctcccccttcgctttccttctccccccgcctcggctccgacatgaggggccggcggggcaggccgcccaagcagcccgcggctcccgctgcggagcgctgcgccccggccccgccgccaccgccgccgccgcccacgtccggacccatcggggggctccgctcgcggcaccgcggcagcagccggggcaggtgggccgccgcccaggctgaggtggcgcccaagacgcggctgagctcgcccagggggggcagcagtagccggaggaagccgccgccgccgccgccggccccccccagcaccagcgccccgggccggggggggcgaggaggcgggggcggcaggacggggggcgggggcggcggcggccacctggcccggaccaccgcggcccggagggccgtcaacaaagtggtgtacgatgaccacgagagcgaggaggaggaggaagaggaggacatggtctccgaggaggaggaggaggaggacggcgacgccgaggagacccaggattctgaggacgacgaggaggatgagatggaagaggacgacgatgactccgattatccggaggagatggaagacgacgacgacgacgccagttactgcacggaaagcagcttcaggagccatagtacctacagcagcactccaggtaggcgaaaaccaagagtacatcggcctcgttctcctatattggaagaaaaagacatcccgccccttgaatttcccaagtcctctgaggatttaatggtgcctaatgagcatataatgaatgtcattgccatttacgaggtactgcggaactttggcactgttttgagattatctccttttcgctttgaggacttttgtgcagctctggtgagccaagagcagtgcacactcatggcagagatgcatgttgtgcttttgaaagcagttctgcgtgaagaagacacttccaatactacctttggacctgctgatctgaaagatagcgttaattccacactgtatttcatagatgggatgacgtggccagaggtgctgcgggtgtactgtgagagtgataaggagtaccatcacgttcttccttaccaagaggcagaggactacccatatggaccagtagagaacaagatcaaagttctacagtttctagtcgatcagtttcttacaacaaatattgctcgagaggaattgatgtctgaaggggtgatacagtatgatgaccattgtagggtttgtcacaaacttggggatttgctttgctgtgagacatgttcagcagtataccatttggaatgtgtgaagccacctcttgaggaggtgccagaggacgagtggcagtgtgaagtctgtgtagcacacaaggtgcctggtgtgactgactgtgttgctgaaatccaaaaaaataaaccatatattcgacatgaacctattggatatgatagaagtcggaggaaatactggttcttgaaccgaagactcataatagaagaagatacagaaaatgaaaatgaaaagaaaatttggtattacagcacaaaggtccaacttgcagaattaattgactgtctagacaaagattattgggaagcagaactctgcaaaattctagaagaaatgcgtgaagaaatccaccgacacatggacataactgaagacctgaccaataaggctcggggcagtaacaaatcctttctggcggcagctaatgaagaaattttggaatccataagagccaaaaagggagacattgataatgttaaaagcccagaagaaacagaaaaagacaagaatgagactgagaatgactctaaagatgctgagaaaaacagagaagaatttgaagaccagtcccttgaaaaagacagtgacgacaaaacaccagatgatgaccctgagcaaggaaaatctgaggagccaacagaagttggggataaaggtaactctgtgtcagcaaatcttggcgacaacacaacaaatgcaacttcagaagagactagtccctctgaagggaggagccctgtggggtgtctctcagaaacccccgatagcagcaacatggcagagaagaaggtggcatctgagctcccccaggatgtgccagaagaacctaacaagacatgtgagagcagtaacactagtgctaccactacctccatccagcctaatctggaaaacagtaacagcagcagtgaactaaattcttcccagagtgaatctgctaaggcagctgatgatcctgaaaatggagaaagagaatctcatacacctgtctctattcaggaagagatagtaggtgatttcaaatcggagaagtccaacggggagctaagtgaatctcctggagctggaaaaggagcatctggctcaactcgaatcatcaccagattgcggaatccagatagcaaacttagtcagctgaagagccagcaggtggcagccgctgcacatgaagcaaataaattatttaaggagggcaaagaggtactggtagttaactctcaaggagaaatttcacggttgagcaccaaaaaggaagtgatcatgaaaggaaatatcaacaattattttaaattgggtcaagaagggaagtatcgcgtctaccacaatcaatactccaccaattcatttgctttgaataagcaccagcacagagaagaccatgataagagaaggcatcttgcacataagttctgtctgactccagcaggagagttcaaatggaacggttctgtccatgggtccaaagttcttaccatatctactctgagactgactatcacccaattagaaaacaacatcccttcatcctttcttcatcccaactgggcatcacatagggcaaattggatcaaggcagttcagatgtgtagcaaacccagagaatttgcattggctttagccattttggagtgtgcagttaaaccagttgtgatgctaccaatatggcgagaatctttaggacataccaggttacaccggatgacatcaattgaaagagaagaaaaggagaaagtcaaaaaaaaagagaagaaacaggaagaagaagaaacgatgcagcaagcgacatgggtaaaatacacatttccagttaagcatcaggtttggaaacaaaaaggtgaagagtacagagtgacaggatatggtggttggagctggattagtaaaactcatgtttataggtttgttcctaaattgccaggcaatactaatgtgaattacagaaagtcgttagaaggaaccaaaaataatatggatgaaaatatggatgagtcagataaaagaaaatgttcacgaagtccaaaaaaaataaaaatagagcctgattctgaaaaagatgaggtaaaaggttcagatgctgcaaaaggagcagaccaaaatgaaatggatatctcaaagattactgagaagaaggaccaagatgtgaaggagctcttagattctgacagtgataaaccctgcaaggaagaaccaatggaagtagacgatgacatgaaaacagagtcacatgtaaattgtcaggagagttctcaagtagatgtggtcaatgttagtgagggttttcatctaaggactagttacaaaaagaaaacaaaatcatccaaactagatggacttcttgaaaggagaattaaacagtttacactggaagaaaaacagcgactcgaaaaaatcaagttggagggtggaattaagggtataggaaagacttctacaaattcttcaaaaaatctctctgaatcaccagtaataacgaaagcaaaagaagggtgtcagagtgactcgatgagacaagaacagagcccaaatgcaaataatgatcaacctgaggacttgattcagggatgttcagaaagtgattcctcagttcttagaatgagtgatcctagtcataccacaaacaaactttatccaaaagatcgagtgttagatgatgtctccattcggagcccagaaacaaaatgtccgaaacaaaattccattgaaaatgacatagaagaaaaagtctctgaccttgccagtagaggccaggaacccagtaagagtaaaacaaaaggaaatgattttttcatcgatgactctaaactagccagtgcagatgatattggtactttgatctgtaagaacaaaaaaccgctcatacaggaggaaagtgacaccattgtttcttcttccaagagtgctttacattcatcagtgcctaaaagtaccaatgacagagatgccacacctctgtcaagagcaatggactttgaaggaaaactgggatgtgactctgaatctaatagcactttggaaaatagttctgataccgtgtctattcaggatagcagtgaagaagatatgattgttcagaatagcaatgaaagcatttctgaacagttcagaactcgagaacaagatgttgaagtcttggagccgttaaagtgtgagttggtttctggtgagtccactggaaactgtgaggacaggctgccggtcaaggggactgaagcaaatggtaaaaaaccaagtcagcagaagaaattagaggagagaccagttaataaatgtagtgatcaaataaagctaaaaaataccactgacaaaaagaataatgaaaatcgagagtctgaaaagaaaggacagagaacaagtacatttcaaataaatggaaaagataataaacccaaaatatatttgaaaggtgaatgcttgaaagaaatttctgagagtagagtagtaagtggtaatgttgaaccaaaggttaataatataaataaaataatccctgagaatgatattaaatcattgactgttaaagaatctgctataaggccattcattaatggtgatgtcatcatggaagattttaatgaaagaaacagctccgaaacaaaatcgcatttgctgagttcttcagatgctgaaggtaactaccgagatagccttgagaccctgccatcaaccaaagagtctgacagtacacagacgaccacaccctcagcatcttgtccagaaagcaattcagttaatcaggtagaagatatggaaatagaaacctcagaagttaagaaagttacttcatcacctattacttctgaagaggaatctaatctcagtaatgactttattgatgaaaatggtctgcccatcaacaaaaatgaaaatgtcaatggagaatctaaaagaaaaaccgtcatcacagaagtcaccacgatgacctccacagtggccacagaatcaaaaactgtgatcaaggtagaaaaaggcgataagcaaactgtggtttcttccacagaaaattgtgcaaaatccactgtcacaaccaccactacaacagtgaccaagctttccacaccctccacaggcggcagtgtggacatcatctctgtaaaggagcagagcaaaaccgtggtcaccacgacagtgacagactccctgaccaccacgggaggcacactggttacatctatgactgtgagcaaagagtattccacacgagacaaagtgaaactgatgaaattttcaagaccaaagaagactcgttcaggtacagctctgccatcctatagaaaatttgttaccaagagcagcaagaagagcatttttgttttgcctaatgatgacttaaaaaagttggcccgaaaaggaggaatccgagaggtcccttattttaattacaatgcaaaacctgctttggatatatggccatatccttctcctagaccgacctttggcatcacttggaggtatagacttcagacagtaaagtccttagctggagtgagcctgatgttacggttactgtgggcaagtttgagatgggatgatatggcggccaaggctcctccaggaggagggactacacggacagaaacatccgaaactgaaatcacaacaacagaaataattaagaggagagatgttggtccttatggcattcgatctgaatattgtatcaggaaaatcatttgtcccattggagttccagaaacaccaaaagaaacgcctacacctcagaggaaaggccttcgatcaagtgcactgcggccaaagagaccagaaacgcccaagcaaactggccctgttattattgaaacctgggtagcagaagaagaactggaattgtgggagatcagggcatttgctgagagagtggagaaagaaaaggcacaagcagttgagcaacaggctaagaaacgactggagcagcagaagccgacagtgattgcaacttccactacttccccaacaagcagtacaaccagcaccatctctccagcacagaaggttatggtggcccccataagtggctcagttacaactggaaccaaaatggtactaactactaaagttggatctccagctacagtaacattccaacaaaacaagaactttcatcaaacctttgctacatgggttaagcaaggccagtcaaattcaggcgttgttcaagtacagcagaaagtcctgggtatcattccatcaagtacaggtaccagtcagcaaacctttacttcattccagcccaggacagcaacagtcacaattaggcccaatacctcaggctctggaggaaccacaagcaattcacaagtaatcacagggcctcagattcgccctggtatgaccgtgattagaacaccactccaacagtcaacactaggaaaggcaattattcgaacacctgtgatggtacagccaggtgctcctcagcaagtgatgactcaaatcatcagggggcagcctgtctccactgcagtctccgcccctaacacggtttcctcaacacctgggcagaaaagcttaacttcagcaacgtccacttcaaatatacagtcttcagcctcacaaccccctcgcccccaacaaggacaagtgaagctcaccatggctcaacttactcagttaacacagggccacggtggcaatcaaggtttgacagtagtaattcaaggacaaggtcaaactactggacagttgcagttgatacctcaaggggtgactgtactcccaggcccaggccagcagctaatgcaagctgcaatgccaaatggtactgttcagcgattcctctttaccccattggcaacaacagccaccacagccagcaccaccaccaccactgtttccacgacagcagcaggtacaggtgaacaaaggcagagtaaactgtcaccccagatgcaggtacatcaagacaaaaccctgccaccagctcagtcatcaagtgtgggtccagcagaagcccagccacagactgctcagccttcagctcagccccagccccaaacccagccccagtccccagctcagcctgaagttcagactcagcctgaagttcagacccaaacaactgtttcatcccatgtcccttctgaagcacaacccacccacgcacagtcatccaagccccaagttgcagcacagtctcagcctcaaagtaatgtccaaggacagtctcctgttcgtgtccaaagtccatcacagactcgaatacgtccatcaactccatcccaactgtctcctggacaacaatcccaggttcagactacaacctcacaaccgattccaattcaaccacatacatctcttcagataccttcccaaggccagccacagtcacaaccccaggtggtgatgaagcataatgctgtaatagaacatttaaaacagaaaaagagcatgactccagctgaaagagaagagaatcaaagaatgattgtctgtaaccaggtgatgaagtatattttggataagatagataaagaagaaaaacaggcagcaaaaaaacggaagcgtgaagagagtgtggagcagaaacgtagcaagcagaatgccactaagctgtcagctctgctcttcaagcacaaagagcagctcagagccgagatcctgaagaagagagcactcctggacaaggatctgcaaattgaagtgcaggaagagctgaagagagacctgaaaattaagaaagaaaaagacctgatgcagttggctcaggccacagcagtagctgcaccctgccccccagtgacaccagctcctccagcccctccagcccctccaccttcacctccccctccacctgctgtgcaacacacaggccttctgtccacgcccaccttacctgctgcttcccagaagaggaagcgggaagaggaaaaagactccagctcaaagtccaagaaaaagaaaatgatctctactacctcaaaggaaactaagaaggacacaaagctttactgtatctgtaaaacgccttatgatgaatctaaattttatattggctgtgatcggtgtcagaattggtaccatgggcgctgcgttggcatcttgcaaagtgaggcagagctcattgatgagtatgtctgtccacagtgccagtcaacagaggatgccatgacagtgctcacgccactaacagagaaggattatgaggggttgaagagggtgctccgttccttacaggcccataagatggcctggcctttccttgaaccagtagaccctaatgatgcaccagattattatggtgttattaaggaacctatggaccttgccaccatggaagaaagagtacaaagacgatattatgaaaagctgacggaatttgtggcagatatgaccaaaatttttgataactgtcgttactacaatccaagtgactccccattttaccagtgtgcagaagttctcgaatcattctttgtacagaaattgaaaggcttcaaagctagcaggtctcataacaacaaactgcagtctacagcttcttaaagttcagcgtgttaacctaacataaaacacagcaagaatctggttgtctgaactattttaaattaaggagccagatgtttttagtcaggctatcctgacaagacttgacctaaacttcgtttttattggtcataacagtccaattatattcttggccaattttgtccaacggacaagaaaaaagcaaagtcaacgacaccattatcttgtcaagatcagatggttttactattgtggcagaagcgagaaaactttgtttattgaaaaaaaaagaaaaagaaagcaagaaaaaaagatactatggggtcaagtgtaactccatggaaatgccacgtctgctcttcagtgaagaagctggtttagagtctcacagaaaacttttgactgtatttatttattgttgcaaaaaagacgcttttttattgctgccctcatttgtcagctaattattttttcttataaaatccagccccggttacatataatcatctgtatcttatcatgattcctgtaggtaaaagtacaagacgacctctagatgtcttttctttctatgaaaggagctgctatgtacacatgtgcacacacacacaactgggaatcaacaatgagtttattgttcatggtagattaaaattaagcttgcataaaggttgggctaagtggtcctggactacagactctgttgccttgaatataacagtacaatttgtcaattactctgcaccaggctaaaatgagtaaaatctatttgaaggtatcttgtttgtaaacatttgtcagattctaatttttttcttttgtattaaaattcaactatggatgtatatgaaacaaaataaatggagataatttttctcccaca

SEQ ID NO: 146414 - DNA, 2469 bp, Artificial Sequence
  derived and/or modified sequence
atggccgccgagggcgaccccgagtggggccccaccccccccagcaccagcgccaccaccgccgccagaagagccgtgaacaaggtggtgtacgacgaccacgagagcgaggaggaggaggaggaggaggacatggtgagcgaggaggaggaggaggaggacggcgacgccgaggagacccaggacagcgaggacgacgaggaggacgagatggaggaggacgacgacgacagcgactaccccgaggagatggaggacgacgacgacgacgccagctactgcaccgagagcagcttcagaagccacagcacctacagcagcacccccggcagaagaaagcccagagtgcacagacccagaagccccatcctggaggagaaggacatcccccccctggagttccccaagagcagcgaggacctgatggtgcccaacgagcacatcatgaacgtgatcgccatctacgaggtgctgagaaacttcggcaccgtgctgagactgagccccttcagattcgaggacttctgcgccgccctggtgagccaggagcagtgcaccctgatggccgagatgcacgtggtgctgctgaaggccgtgctgagagaggaggacaccagcaacaccaccttcggccccgccgacctgaaggacagcgtgaacagcaccctgtacttcatcgacggcatgacctggcccgaggtgctgagagtgtactgcgagagcgacaaggagtaccaccacgtgctgccctaccaggaggccgaggactacccctacggccccgtggagaacaagatcaaggtgctgcagttcctggtggaccagttcctgaccaccaacatcgccagagaggagctgatgagcgagggcgtgatccagtacgacgaccactgcagagtgtgccacaagctgggcgacctgctgtgctgcgagacctgcagcgccgtgtaccacctggagtgcgtgaagccccccctggaggaggtgcccgaggacgagtggcagtgcgaggtgtgcgtggcccacaaggtgcccggcgtgaccgactgcgtggccgagatccagaagaacaagccctacatcagacacgagcccatcggctacgacagaagcagaagaaagtactggttcctgaacagaagactgatcatcgaggaggacaccgagaacgagaacgagaagaagatctggtactacagcaccaaggtgcagctggccgagctgatcgactgcctggacaaggactactgggaggccgagctgtgcaagatcctggaggagatgagagaggagatccacagacacatggacatcaccgaggacctgaccaacaaggccagaggcagcaacaagagcttcctggccgccgccaacgaggagatcctggagagcatcagagccaagaagggcgacatcgacaacgtgaagagccccgaggagaccgagaaggacaagaacgagaccgagaacgacagcaaggacgccgagaagaacagagaggagttcgaggaccagagcctggagaaggacagcgacgacaagacccccgacgacgaccccgagcagggcaagagcgaggagcccaccgaggtgggcgacaagggcaacagcgtgagcgccaacctgggcgacaacaccaccaacgccaccagcgaggagaccagccccagcgagggcagaagccccgtgggctgcctgagcgagacccccgacagcagcaacatggccgagaagaaggtggccagcgagctgccccaggacgtgcccgaggagcccaacaagacctgcgagagcagcaacaccagcgccaccaccaccagcatccagcccaacctggagaacagcaacagcagcagcgagctgaacagcagccagagcgagagcgccaaggccgccgacgaccccgagaacggcgagagagagagccacacccccgtgagcatccaggaggagatcgtgggcgacttcaagagcgagaagagcaacggcgagctgagcgagagccccggcgccggcaagggcgccagcggcagcaccagaatcatcaccagactgagaaaccccgacagcaagctgagccagctgaagagccagcaggtggccgccgccgcccacgaggccaacaagctgttcaaggagggcaaggaggtgctggtggtgaacagccagggcgagatcagcagactgagcaccaagaaggaggtgatcatgaagggcaacatcaacaactacttcaagctgggccaggagggcaagtacagagtgtaccacaaccagtacagcaccaacagcttcgccctgaacaagcaccagcacagagaggaccacgacaagagaagacacctggcccacaagttctgcctgacccccgccggcgagttcaagtggaacggcagcgtgcacggcagcaaggtgctgaccatcagcaccctgagactgaccatcacccagtacggcgagaacctgtag

SEQ ID NO: 146415 - DNA, 8712 bp, Artificial Sequence
  derived and/or modified sequence
atgcggggacgcaggggccgtccccccaagcagcctgccgccccagccgccgaaaggtgcgcgcccgccccccctcctcctcctccacctcctacatcgggccctattggtggactgcggagcagacatagagggtcttcacgcggaagatgggccgcggctcaggcagaagtggcccctaagacccggttgtccagcccaagaggtgggtcctcgtccagaagaaagcctcccccaccacctcctgctcctccttccacctcggctccggggcgtggcgggcgaggcggaggcggtggaaggacgggaggaggcggaggtggggggcacctcgctcgaacgacggctgctcgtcgcgccgtgaataaagtcgtgtatgacgatcacgagtctgaggaggaggaggaagaggaggacatggtctccgaggaagaagaagaggaggatggtgatgctgaggagacacaggatagtgaagatgacgaggaagacgagatggaggaagatgacgacgattctgattaccctgaggaaatggaagacgatgatgacgatgcctcctattgcaccgagtcaagctttcgctcacattcgacttattcttccactccaggcaggaggaagccacgagtgcacagacccaggtctccgattctggaagaaaaggacattccccctcttgagttcccaaagagcagcgaagacctgatggtgcctaacgagcatattatgaatgtaatagccatctacgaggtgttacgaaattttggcactgtgttgaggctgtcaccattccgttttgaggatttttgcgcggccctggtctcccaagaacagtgcactctgatggcagaaatgcacgtggtgctgttaaaggcggtccttagggaagaggacactagcaatactacctttggccccgcagatctgaaggattccgtgaatagcacactctacttcatcgatggcatgacctggcctgaggtgctcagagtatattgtgagagcgataaggaataccatcacgtgctcccgtaccaggaagcagaagattacccgtatgggcctgtcgagaataagataaaggtgttgcaattccttgttgaccagttcctgacgaccaacattgcaagagaagagctgatgtcagagggcgtcattcagtatgacgatcattgtagagtctgccataagctcggagacctgctgtgttgcgagacctgttcagcggtgtaccatttggagtgcgttaaacccccgctcgaggaagtgcctgaggacgagtggcagtgcgaagtctgtgtcgctcacaaagtgcccggagtcacagattgcgtcgctgagatccagaaaaacaagccatatatcagacatgagccaatcggttatgaccgcagtagacgcaagtattggtttctgaaccggaggctgatcatcgaggaggatacagagaatgagaacgaaaagaagatatggtactactcgacaaaggttcagctggccgagctcatcgattgtctagataaggactattgggaggctgagttgtgtaaaatacttgaagagatgcgtgaggagatccatcgccatatggatataacagaggacctcactaataaggccaggggctcaaataagagctttcttgccgccgcgaatgaggaaatcctggaatccatacgcgcaaagaagggagatattgataacgtgaagtcacctgaggaaaccgagaaggacaagaatgagacagaaaatgacagcaaggacgctgagaagaacagggaagagttcgaggatcagagtctagagaaagactctgatgataagacccctgatgacgacccagaacaagggaaaagcgaggagcccacagaagtgggggacaaaggaaattctgtcagtgccaacctgggagacaacactactaacgcaacaagcgaggagacgtcgccgtcagaggggagaagtcccgtcggttgtctgtctgagacgccagacagcagcaacatggctgagaagaaggttgcttccgagctgccacaagatgtgcccgaggaacccaacaagacctgcgagagctccaacacatcagctactaccacgagcattcaacctaacttggaaaatagcaatagttcctctgaattaaactcaagccagagtgaaagcgcaaaggccgccgatgaccccgaaaatggcgaaagggaatcgcacactccagtaagtattcaggaggagatcgtgggagacttcaagtctgagaaatcaaacggagaacttagtgaatctccgggagcgggtaaaggggccagcgggagcacacggatcatcacaagattgcgcaaccctgactcgaaactttctcagttgaagtcccagcaggttgcagcagcggctcatgaggctaataaattattcaaagaaggcaaggaggtgctggtagttaattcccagggcgagataagcaggctttctacgaaaaaagaagtcatcatgaaggggaacatcaataactacttcaaactcgggcaggaggggaagtaccgcgtgtatcacaatcagtattccaccaatagtttcgctctgaataaacatcaacatagggaagaccacgacaagcggcggcacctggctcacaagttttgcctgactcccgccggagagtttaagtggaacggttctgtccacggcagcaaagttcttacaattagtacacttcgtttgacaatcacgcagctcgaaaacaatatacctagctcttttctgcatccgaattgggcttctcatagagctaactggattaaggcggtacaaatgtgtagcaaaccgcgtgaatttgccctggcactcgccatactcgaatgcgctgtcaaacccgttgtgatgcttcccatctggagggaaagcctcggacacacacgactccaccggatgacaagtatcgagagagaggagaaggagaaggtgaagaagaaggagaaaaagcaagaggaggaggagactatgcaacaagccacctgggtaaagtacacatttcctgtaaagcatcaagtgtggaagcagaagggcgaagaatatagggtcaccggctatggcggctggtcctggattagcaaaacacacgtctatcggtttgttccaaagctcccgggtaacactaatgtcaattaccggaaaagcctggaaggcaccaagaacaatatggacgagaatatggatgagtccgataaacgcaagtgcagtcgtagtcccaaaaagatcaagatagagccagatagtgaaaaggacgaagttaagggaagtgacgctgccaagggagcagatcagaacgaaatggatatctccaaaatcacagagaagaaagaccaagacgtgaaagagctgcttgactcagactcggacaaaccttgcaaggaggaaccaatggaagttgacgacgacatgaagactgaatcccatgttaactgtcaggagtccagccaggtcgacgtggttaatgtctctgaagggttccatttgcgaaccagttataagaaaaagacgaaaagttccaaactggatggactccttgaaagacgaattaaacaatttaccctcgaggaaaaacagagactcgagaagataaagcttgagggtggcattaaaggcataggaaagacgagtacgaattccagcaagaatttaagcgaatccccagttattacgaaagctaaagaaggttgtcagtcggacagcatgcgccaggaacagtcgccgaatgccaacaacgatcagccggaagatctgatccagggatgtagcgaatctgactccagcgtcctgcgcatgagcgacccgtcccacaccactaataaactctaccccaaggatcgagtcctcgatgatgtgtctattaggagtcccgagaccaagtgccccaagcagaactccatcgaaaatgatatcgaggagaaggtctcagatctagcaagcaggggccaggagccctcaaaaagcaagactaagggaaacgacttttttatcgacgatagcaagttagcctcggctgatgatatcggcactcttatctgcaaaaataagaaaccgctgatccaggaggagagcgataccattgtctcctcctctaagtctgctctgcatagtagtgtgccaaagtctaccaacgacagagacgctactcctctgtcccgcgccatggactttgaagggaaactggggtgtgacagcgagagcaactccacactggaaaactcttcggacacagtgagtatccaagactcctcggaggaagacatgattgttcaaaattcgaatgagtctatttcggaacagttccgcacccgagagcaggatgtggaggtcctcgagccattgaaatgcgagttggtgtcaggggagtccactggtaattgcgaggaccggctgcctgtcaagggaactgaggccaacggaaaaaagcccagccagcagaagaagctggaggagcgtcctgtcaataaatgttcggatcagattaaactcaagaacacaacagataagaagaataatgaaaaccgggagagtgagaaaaagggccagcggacatctaccttccagattaatggcaaagacaataaacccaaaatctatctgaagggggagtgtctcaaagagatttccgagtcaagggtggtgtcggggaacgtggagcctaaagttaacaacattaataaaattatcccagaaaacgatatcaaatccctgactgtcaaggagtctgcaattcgccccttcatcaatggcgacgttattatggaagacttcaacgaacggaacagcagtgagacaaaatctcatctgctcagctcaagtgatgccgaaggaaactatcgagactctttggagacactgcctagtactaaagagagtgattccacccaaaccacaactccgagcgctagctgccctgaaagcaacagcgttaaccaggtggaagacatggagatcgagacgagtgaggttaagaaagtgactagctctcccataacatcagaagaggagtcaaacttgtcaaacgactttatcgacgagaatggattgcccataaataagaatgagaacgtcaatggtgaatccaagcggaagacagtcattactgaggtgacaacaatgacctcaactgtcgctactgagtcgaagacagttattaaggtggaaaaaggagacaagcaaacagttgtgtcctcaacagagaattgcgccaagtctactgtgactaccacgaccacaactgttacaaaactcagtactccaagcactgggggatccgtcgacatcatatcggttaaagaacagtcaaaaaccgtagtgacaactaccgtgacagactcgctcaccaccacaggaggcaccttagtaacaagtatgactgtaagtaaggagtacagcacccgggacaaagtgaagcttatgaagttctccagacccaagaaaactcggagcggcacagcactgccttcatatagaaaattcgtaacgaagagttctaaaaaatcgattttcgttctgcccaatgatgatctgaagaagttggcccggaagggcggaattcgagaggtaccctatttcaactataacgcgaagcccgcacttgatatatggccatacccaagtcctaggcctacattcggaattacgtggaggtatcgcttacagaccgtaaagagcttggcaggggtttccctgatgttacgtctgttgtgggcgagcctgagatgggacgatatggcagcgaaagctcctcccggaggcggcactacccggacagaaaccagcgagactgaaattaccactaccgaaatcatcaagagacgggacgtcggtccatacggaattagatccgaatactgcatacgcaagatcatctgccccatcggcgtccccgaaaccccaaaagagacacccacgcctcagagaaagggacttcgcagctctgccctgcggcctaagaggcccgagacacccaaacaaaccgggcccgtgatcattgagacttgggtcgcagaagaagaactggaattgtgggagatacgcgcatttgccgagagggtggagaaggagaaagctcaggccgtcgaacagcaggccaagaagagattagagcaacagaagccgaccgtcatcgctacatctaccacatctcctacatccagcaccacatctacgatatccccagcgcagaaagtgatggttgcaccgatctccgggtcagtcactaccggcaccaaaatggttctgacaacgaaggtgggatctccggccaccgtgacctttcagcaaaacaaaaactttcatcagacctttgctacttgggtgaagcaggggcaaagtaattccggcgtagtccaggtgcagcagaaagtgctgggcatcatacccagcagtactgggacttcccagcagacatttacatcatttcaaccgcgtaccgctactgttaccatacggcctaatactagcggctccggcggcacgaccagcaactcacaagttatcactggtccgcagattagacctgggatgaccgtgatccggacacctctccagcagagcaccctgggtaaggcaatcataagaactcccgtgatggtgcagcctggggccccccagcaagtgatgactcaaataattcggggccagccagtttccacggccgtgtccgcccctaataccgtttcctccacacccggtcaaaagtccctgaccagcgcgactagtacctctaatatccagtcctcagcatcgcagccaccaagaccgcaacagggtcaagtaaagttgacaatggcccagctgacccaactgacgcagggacatgggggaaatcagggtctgacggtggtgatacaaggccaggggcagactaccggccaactacagctgatcccacagggagtcacggtgctcccaggccccggtcaacagctgatgcaggccgcaatgccaaacgggaccgtgcagcgattcttgttcacccccctcgcaacgaccgcaaccaccgcgagcaccacgaccacaaccgtcagtactaccgctgctggaaccggagagcagcgccagtcaaaattgagcccacagatgcaggtccaccaggacaagaccttaccacccgcccagagtagcagcgtcgggccagcagaggcccaaccacaaacagcccagccaagcgctcagccgcagccccaaacacagcctcaatcccccgctcagcctgaggtgcaaactcaaccggaagttcagactcaaaccactgtctctagccatgtgccgtctgaggcccagccaacacatgcgcagtcatccaagcctcaggttgccgcccagtcgcagccccaatccaacgttcaaggccagtcgcccgttcgcgtccagagcccatctcaaacgcgcatacggcccagcactccaagtcagctttctcctgggcagcagtcacaggtacagaccacaacttcccagcccatccctattcagccccacactagcctacagatcccgtcgcaggggcagccccagtctcagccgcaggtcgtaatgaagcataatgctgtgattgaacatctgaaacagaaaaagtccatgactcctgcggagcgcgaagagaaccagcgtatgattgtttgtaaccaagtcatgaagtacattctcgataagattgataaagaggagaaacaggctgccaagaagcggaagagggaggagtcagtcgagcagaaaagatccaaacaaaacgccacaaaactgagtgcattgctgtttaagcacaaagagcagctcagagccgagatattaaagaaaagggccctcctggataaggacctgcagatagaagtacaggaggaactgaagcgcgacttaaaaattaagaaagaaaaagacctaatgcagcttgctcaggctaccgcagtcgcagcaccatgtccacccgtcacgcctgcaccccccgccccaccagcaccacccccatctcctccaccacctccggccgtgcagcacacaggcctgttgtcaacacctacactgccagcagcctcccagaaaaggaaacgggaagaggagaaggattcctcatctaagagtaaaaagaagaaaatgatttcaacaacttctaaggagactaaaaaagatacaaaattgtattgcatctgcaaaaccccctatgacgagtctaagttctacattggctgtgatagatgtcagaattggtatcatgggaggtgcgttggcatcttgcaaagcgaagccgagttgattgacgagtatgtgtgcccacagtgtcagtccaccgaggacgccatgaccgttctgactccactcactgaaaaggactacgaggggctgaagcgggtgctgcggtctttacaggcccataagatggcatggccatttctcgagcccgtggaccctaatgacgcacccgactattatggcgtaataaaagaaccaatggacctcgctaccatggaggagcgggtgcagagaaggtactacgaaaagctgaccgaattcgttgcggacatgactaagatcttcgataactgtcgctactacaatccatctgattccccattctatcaatgcgctgaggtgttggaatcttttttcgtgcagaagcttaaaggatttaaggcgtctcggtcccataataataagctacagtcgactgcttcctag

SEQ ID NO: 146416 - DNA, 2469 bp, Artificial Sequence
  derived and/or modified sequence
atggccgccgagggagatccagagtgggggcccactccaccgtccacatccgccacgactgcggctcgccgagctgtcaacaaggttgtgtacgacgatcacgaatccgaggaggaggaggaagaagaggacatggtctctgaggaggaagaggaagaagatggcgacgcggaggaaactcaggactccgaagacgatgaggaggatgagatggaagaggatgacgacgactcagactatccagaagagatggaggatgatgatgatgacgcttcttattgcacagagtccagcttcaggtcccatagtacatacagctccacccctggccgcaggaaacctcgagtccaccgacctcgatcaccaatcctggaggaaaaggacattccgccccttgaatttcccaagtcgagtgaggatctcatggttcctaacgagcatatcatgaatgtgatcgcgatatatgaagttttgaggaatttcggcactgtgctcaggctttcgccctttagatttgaagacttctgtgcagccctggtttctcaggagcagtgcactctgatggcagagatgcatgtagtcttgctcaaggccgtgctgcgggaagaagacacttctaatactacatttggccctgcagacttaaaggatagcgtcaattccactctctacttcattgacggcatgacctggcccgaggtgctaagggtgtactgtgaaagtgacaaagagtatcatcatgtcctgccataccaggaggccgaggattatccttacggacctgtcgaaaataagattaaagtcctgcaattcctcgtggaccagttcttgacaaccaatatcgctcgggaggaacttatgtccgagggggtcatccagtatgatgaccattgtcgagtgtgccacaagttaggagatctgctgtgttgtgaaacttgttctgcggtgtatcatctggaatgtgtaaaaccgcccttagaggaggtccctgaggatgaatggcagtgcgaggtctgtgtcgctcacaaggttcctggagtgacagactgtgtcgctgaaattcagaaaaataagccttatatcaggcatgaacctattggatacgatcgtagtagacggaaatactggtttctcaatagaagactaatcatcgaggaagacaccgagaacgaaaacgagaagaagatatggtactactccacgaaagttcagttggcggagttgatagactgcctggacaaggactattgggaagctgagctgtgcaagatcttggaggagatgagggaagagattcaccgacacatggatatcacggaggacctaacaaacaaggcaaggggctctaataaatcttttctggccgctgccaatgaagaaatactcgagagtatccgcgccaaaaagggtgacatagacaatgtcaagagtccggaagagactgaaaaggacaagaatgagactgaaaatgacagcaaagacgccgagaagaatcgggaagagttcgaggaccagagtctcgaaaaagatagcgacgacaagacgcccgacgacgatcctgaacagggcaaaagtgaggagccaactgaagtaggcgacaaaggtaactctgtgagtgccaatctaggggacaacacaacaaacgctaccagcgaagaaacctccccctctgaggggcgctccccagtgggatgtctttctgagactccagactctagtaatatggcagaaaaaaaggtagcttctgagctgccccaggacgtgcctgaggagccaaacaagacctgcgagtcatcgaacacaagtgccacgacgacatcaattcaacccaatctggaaaatagtaacagttcctccgaacttaatagcagccaatccgaatccgcaaaagcggccgatgatcccgagaacggtgaaagggaatctcacactccagtttccatccaggaagagatagttggggacttcaaaagcgagaagagtaatggcgagctaagcgagtctcctggcgcgggaaagggagcctctggtagtacccgtattatcacccgccttagaaaccctgattccaaactgtcacagttaaaatcacaacaggtggctgccgcagctcacgaggccaacaaactgttcaaagagggaaaggaggtccttgtcgttaattcacaaggcgagatcagccgcctgagcacgaagaaagaggtcatcatgaaaggaaacatcaacaactacttcaagctggggcaggagggtaagtatcgagtgtaccataatcagtactctactaatagcttcgccctgaataaacaccagcatcgagaggaccatgacaaacggaggcatctggcacataagttttgcctgaccccggctggagagtttaagtggaacggctccgtacatggctctaaagtgttaaccatttccaccttaaggcttacaataacacagtatggggagaatctttag

SEQ ID NO: 146417 - DNA, 8712 bp, Artificial Sequence
  derived and/or modified sequence
atgaggggccggcggggccggccccccaagcagcctgctgccccagctgctgagcgctgtgccccagcccctcctcctcctcctcctccacccaccagcggccccatcggcggcctgcggagccgccaccggggcagcagccggggccgctgggccgccgcccaggccgaggtggcccccaagacccggctgagcagcccccggggcggcagcagcagcaggaggaagcccccacctcctcctccagccccacccagcaccagcgcccctggccggggcggccggggcggcggcggcggccgcactggaggcggcggcggcggcggccacctggcccggaccacagctgcccggcgggctgtgaacaaggtggtgtatgatgaccatgaaagtgaggaggaggaggaggaggaggacatggtgtctgaggaggaggaggaggaggatggagatgctgaggagacccaggacagtgaagatgatgaagaagatgagatggaggaggatgatgatgacagcgactacccagaggagatggaggatgatgatgatgatgccagctactgcacagagagcagcttccgcagccacagcacctacagcagcaccccaggccgcaggaagccccgggtgcaccggcccaggagccccatcctggaggagaaggacatcccccccctggagttccccaagagcagcgaggacctgatggtgcccaatgagcacatcatgaatgtgattgccatctatgaggtgctgaggaactttggcaccgtgctgcggctgagccccttccgctttgaggacttctgtgccgccctggtgtcccaggagcagtgcaccctgatggccgagatgcacgtggtgctgctgaaggctgtgctgcgggaggaggacaccagcaacaccacctttggacctgctgacctgaaggacagcgtgaacagcaccctgtacttcattgatggcatgacctggccagaggtgctgcgggtgtactgtgagagtgacaaggagtaccaccacgtgctgccctaccaggaggccgaggactacccctacggccctgtggagaacaagatcaaggtgctgcagttcctggtggaccagttcctgaccaccaacatcgcccgggaggagctgatgtctgaaggagtcatccagtatgatgaccactgccgggtgtgccacaagctgggggacctgctgtgctgtgagacctgcagcgctgtgtaccacctggagtgtgtgaagccacccctggaggaggtgcctgaagatgagtggcagtgtgaggtgtgtgtggcccacaaggtgcctggggtgacagactgtgtggccgagatccagaagaacaagccctacatcagacatgagcccatcggctatgacaggagcaggaggaagtactggttcctgaacagaagactcatcatcgaggaggacacagaaaatgaaaatgagaagaagatctggtactacagcaccaaggtgcagctggccgagctgattgactgcctggacaaggactactgggaggccgagctgtgcaagatcctggaggagatgagggaggagatccaccgccacatggacatcacagaggacctgaccaacaaggcccggggcagcaacaagagcttcctggccgccgccaatgaggagatcctggagagcatccgggccaagaagggggacatcgacaacgtgaagagccctgaggagacagagaaggacaagaatgaaacagaaaatgacagcaaggatgctgagaagaaccgggaggagtttgaggaccagagcctggagaaggacagtgatgacaagaccccagatgatgatcctgagcagggcaagtctgaggagcccacagaggtgggggacaagggcaacagcgtgtctgccaacctgggggacaacaccaccaatgccaccagcgaggagaccagccccagcgagggccgcagccctgtgggctgcctgtctgagaccccagacagcagcaacatggccgagaagaaggtggccagcgagctgccccaggatgtgcctgaggagcccaacaagacctgtgagagcagcaacaccagcgccaccaccaccagcatccagcccaacctggagaacagcaacagcagcagcgagctgaacagcagccagagcgagagcgccaaggctgctgatgatcctgaaaatggagagcgggagagccacacccctgtgtccatccaggaggagatcgtgggggacttcaagtctgagaagagcaatggagagctgtctgagagccctggggccggcaagggggccagcggcagcacccgcatcatcacccggctgagaaatccagacagcaagctgagccagctgaagagccagcaggtggccgccgccgcccacgaggccaacaagctgttcaaggagggcaaggaggtgctggtggtgaacagccagggcgagatcagccggctgagcaccaagaaggaggtgatcatgaagggcaacatcaacaactacttcaagctgggccaggagggcaagtacagagtgtaccacaaccagtacagcaccaacagctttgccctgaacaagcaccagcacagagaagatcatgacaagaggaggcacctggcccacaagttctgcctgaccccagctggggagttcaagtggaatggatctgtgcacggcagcaaggtgctgaccatcagcaccctgcggctgaccatcacccagctggagaacaacatccccagcagcttcctgcaccccaactgggccagccaccgggccaactggatcaaggctgtgcagatgtgcagcaagccccgggagtttgccctggccctggccatcctggagtgtgctgtgaagcctgtggtgatgctgcccatctggagggagagcctgggccacacccggctgcacaggatgaccagcattgagcgggaggagaaggagaaggtgaagaagaaggagaagaagcaggaggaggaggagaccatgcagcaggccacctgggtgaagtacaccttccctgtgaagcaccaggtgtggaagcagaagggggaggagtacagagtgacaggctatggaggctggagctggatcagcaagacccacgtgtacagatttgtgcccaagctgcccggcaacaccaacgtgaactacaggaagagcctggagggcaccaagaacaacatggatgagaacatggatgaaagtgacaagaggaagtgcagccgcagccccaagaagatcaagattgaaccagattctgagaaggatgaggtgaagggcagtgatgctgccaagggagctgaccagaatgagatggacatcagcaagatcacagagaagaaggaccaggatgtgaaggagctgctggacagcgacagcgacaagccctgcaaggaggagcccatggaggtggatgatgacatgaagacagagagccacgtgaactgccaggagagcagccaggtggatgtggtgaatgtgtctgagggcttccacctgcggaccagctacaagaagaagaccaagagcagcaagctggatggcctgctggagcggcgcatcaagcagttcaccctggaggagaagcagaggctggagaagatcaagctggagggcggcatcaagggcatcggcaagaccagcaccaacagcagcaagaacctgtctgagagccctgtgatcaccaaggccaaggagggctgccagagcgacagcatgaggcaggagcagagccccaatgccaacaatgaccagcctgaggacctgatccagggctgcagcgagagtgacagctctgtgctgaggatgtctgaccccagccacaccaccaacaagctgtaccccaaggacagagtgctggatgatgtgtccatccgcagccctgagaccaagtgccccaagcagaacagcattgaaaatgacatcgaggagaaggtgtctgacctggccagccggggccaggagcccagcaagagcaagaccaagggaaatgacttcttcattgatgacagcaagctggccagcgcagatgacatcggcaccctcatctgcaagaacaagaagcccctcatccaggaggagagtgacaccatcgtgagcagcagcaagagcgccctgcacagctctgtgcccaagagcaccaatgacagagatgccacccccctgagccgggccatggactttgagggcaagctgggctgtgacagcgagagcaacagcaccctggagaacagcagtgacacagtgtccatccaggacagcagcgaggaggacatgattgtgcagaacagcaatgaaagcatcagcgagcagttccgcacccgggagcaggatgtggaggtgctggagcccctgaagtgtgagctggtgtctggagagagcacaggcaactgtgaggaccggctgcctgtgaagggcacagaggccaacgggaagaagcccagccagcagaagaagctggaggagaggcctgtgaacaagtgcagcgaccagatcaagctgaagaacaccacagacaagaagaacaatgaaaatcgggagagcgagaagaagggccagaggaccagcaccttccagatcaacgggaaggacaacaagcccaagatctacctgaagggagaatgtctgaaggagatcagcgagagccgggtggtgtctggaaatgtggagcccaaggtgaacaacatcaacaagatcatcccagaaaatgacatcaagagcctgactgtgaaggagagcgccatccggcccttcatcaatggagatgtgatcatggaggacttcaatgaaagaaacagcagcgagaccaagagccacctgctgagcagcagtgatgctgagggcaactacagagacagcctggagaccctgcccagcaccaaggagagtgacagcacccagaccaccaccccatctgccagctgcccagagagcaacagcgtgaaccaggtggaggacatggagattgagaccagcgaggtgaagaaggtgaccagcagccccatcaccagcgaggaggagagcaacctgagcaatgacttcattgatgaaaatggcctgcccatcaacaagaatgaaaatgtgaatggagagagcaagaggaagacagtcatcacagaggtgaccaccatgaccagcacagtggccacagagagcaagacagtcatcaaggtggagaagggggacaagcagacagtggtgagcagcacagagaactgtgccaagagcacagtgaccaccaccaccaccaccgtgaccaagctgagcacccccagcactggaggctctgtggacatcatctctgtgaaggagcagagcaagacagtggtgaccaccaccgtgacagacagcctgaccaccaccggcggcaccctggtgacctccatgacagtgtccaaggagtacagcacccgggacaaggtgaagctgatgaagttcagccggcccaagaagaccaggtctggaacagccctgcccagctacaggaagtttgtgaccaagagcagcaagaagagcatctttgtgctgcccaatgatgacctgaagaagctggccaggaagggcggcatccgggaggtgccctacttcaactacaatgccaagccagccctggacatctggccctaccccagcccccggcccaccttcggcatcacctggagataccgcctgcagacagtgaagagcctggccggcgtgtccctgatgctgcggctgctgtgggccagcctgcgctgggatgacatggccgccaaggcccctcctgggggcggcaccaccaggacagagaccagcgagacagagatcaccaccacagagatcatcaagagaagagatgtgggcccctacggcatccgctctgagtactgcatcaggaagatcatctgccccatcggcgtgcctgagacccccaaggagacccccaccccccagaggaagggcctgcggagcagcgccctgcggcccaagaggcctgagacccccaagcagacaggccctgtgatcatcgagacctgggtggccgaggaggagctggagctgtgggagatccgggcctttgctgagcgggtggagaaggagaaggcccaggccgtggagcagcaggccaagaagaggctggagcagcagaagcccaccgtcatcgccaccagcaccaccagccccaccagcagcaccaccagcaccatcagccctgcccagaaggtgatggtggcccccatcagcggctctgtgaccaccggcaccaagatggtgctgaccaccaaggtgggcagccctgccaccgtgaccttccagcagaacaagaacttccaccagacctttgccacctgggtgaagcagggccagagcaacagcggcgtggtgcaggtgcagcagaaggtgctgggcatcatccccagcagcacaggcaccagccagcagaccttcaccagcttccagcccaggacagccaccgtgaccatccggcccaacaccagcggcagcggcggcaccaccagcaacagccaggtgatcaccggcccccagatccggcccggcatgaccgtcatccgcacccccctgcagcagagcaccctgggcaaggccatcatccgcacccctgtgatggtgcagcccggggccccccagcaggtgatgacccagatcatccggggccagcctgtgtccacagctgtgtctgcccccaacacagtgagcagcaccccaggccagaagagcctgaccagcgccaccagcaccagcaacatccagagcagcgccagccagcccccccggccccagcagggccaggtgaagctgaccatggcccagctgacccagctgacccagggccatggaggcaaccagggcctgactgtggtgatccagggccagggccagaccaccggccagctgcagctgatcccccagggcgtgacagtgctgcccggccctggccagcagctgatgcaggccgccatgcccaatggaacagtgcagcgcttcctgttcacccccctggccaccacagccaccacagccagcaccaccaccaccaccgtgtccaccacagctgctggcactggagagcagaggcagagcaagctgagcccccagatgcaggtgcaccaggacaagaccctgcccccagcccagagcagctctgtgggccctgctgaggcccagccccagacagcccagcccagcgcccagccccagccccagacccagccccagagccctgcccagcctgaggtgcagacccagcctgaggtgcagacccagaccaccgtgagcagccacgtgcccagcgaggcccagcccacccacgcccagagcagcaagccccaggtggccgcccagagccagccccagagcaatgtgcagggccagagccctgtgcgggtgcagagccccagccagacccgcatccggcccagcacccccagccagctgagccctggccagcagagccaggtgcagaccaccaccagccagcccatccccatccagccccacaccagcctgcagatccccagccagggccagccccagagccagccccaggtggtgatgaagcacaatgctgtgattgagcacctgaagcagaagaagtccatgaccccagctgagcgggaggagaaccagaggatgattgtgtgcaaccaggtgatgaagtacatcctggacaagattgacaaggaggagaagcaggccgccaagaagaggaagcgggaggagagcgtggagcagaagaggagcaagcagaatgccaccaagctgagcgccctgctcttcaagcacaaggagcagctgcgggcagagatcctgaagaagagggccctgctggacaaggacctgcagatcgaggtgcaggaggagctgaagagggacctgaagatcaagaaggagaaggacctgatgcagctggcccaggccacagctgtggccgccccctgcccccctgtgaccccagcccccccagcccccccagcccccccacccagccccccacctcctcctgctgtgcagcacacaggcctgctgagcacccccaccctgcctgctgccagccagaagaggaagcgggaggaggagaaggacagcagcagcaagagcaagaagaagaagatgatcagcaccaccagcaaggagaccaagaaggacaccaagctgtactgcatctgcaagaccccctatgatgagagcaagttctacatcggctgtgaccgctgccagaactggtaccacggccgctgtgtgggcatcctgcagagcgaggccgagctgattgatgaatatgtgtgcccccagtgccagagcacagaagatgccatgacagtgctgacccccctgacagagaaggactatgagggcctgaagagggtgctgcggagcctgcaggcccacaagatggcctggcccttcctggagcctgtggaccccaatgatgccccagactactacggcgtcatcaaggagcccatggacctggccaccatggaggagcgggtgcagaggcgctactatgagaagctgacagaatttgtggccgacatgaccaagatctttgacaactgccgctactacaaccccagcgacagccccttctaccagtgtgccgaggtgctggagagcttctttgtgcagaagctgaagggcttcaaggccagccgcagccacaacaacaagctgcagagcacagccagctag

SEQ ID NO: 146418 - DNA, 2469 bp, Artificial Sequence
  derived and/or modified sequence
atggctgctgagggggaccctgagtggggccccaccccacccagcaccagcgccaccacagctgccaggagagctgtgaacaaggtggtgtatgatgaccacgagagcgaggaggaggaggaggaggaggacatggtgtctgaggaggaggaggaggaggatggagatgctgaggagacccaggacagtgaagatgatgaggaggatgagatggaggaggatgatgatgacagcgactacccagaggagatggaggatgatgatgatgatgccagctactgcacagagagcagcttccgcagccacagcacctacagcagcaccccaggaagaaggaagccccgggtgcaccggcccaggagccccatcctggaggagaaggacatcccccccctggagttccccaagagcagcgaggacctgatggtgcccaatgagcacatcatgaatgtcatcgccatctatgaggtgctgaggaactttggaacagtgctgcggctgagccccttccgctttgaggacttctgtgccgccctggtgtcccaggagcagtgcaccctgatggccgagatgcacgtggtgctgctgaaggctgtgctgcgggaggaggacaccagcaacaccaccttcggccctgctgacctgaaggacagcgtgaacagcaccctgtacttcattgatggcatgacctggccagaggtgctgcgggtgtactgtgagagtgacaaggagtaccaccacgtgctgccctaccaggaggccgaggactacccctacggccctgtggagaacaagatcaaggtgctgcagttcctggtggaccagttcctgaccaccaacatcgcccgggaggagctgatgtctgagggcgtcatccagtatgatgaccactgccgggtgtgccacaagctgggggacctgctgtgctgtgagacctgcagcgctgtgtaccacctggagtgtgtgaagccacccctggaggaggtgcctgaagatgagtggcagtgtgaggtgtgtgtggcccacaaggtgcctggggtgacagactgtgtggccgagatccagaagaacaagccctacatcagacatgagcccatcggctatgacaggagcaggaggaagtactggttcctgaacagaagactcatcatcgaggaggacacagaaaatgaaaatgagaagaagatctggtactacagcaccaaggtgcagctggccgagctgattgactgcctggacaaggactactgggaggccgagctgtgcaagatcctggaggagatgagggaggagatccaccgccacatggacatcacagaggacctgaccaacaaggcccggggcagcaacaagagcttcctggccgccgccaatgaggagatcctggagagcatccgggccaagaagggggacatcgacaacgtgaagagccctgaggagacagagaaggacaagaatgaaacagaaaatgacagcaaggatgctgagaagaaccgggaggagtttgaggaccagagcctggagaaggacagtgatgacaagaccccagatgatgatcctgagcagggcaagtctgaggagcccacagaggtgggggacaagggcaacagcgtgtctgccaacctgggggacaacaccaccaatgccaccagcgaggagaccagccccagcgagggccgcagccctgtgggctgcctgtctgagaccccagacagcagcaacatggccgagaagaaggtggccagcgagctgccccaggatgtgcctgaggagcccaacaagacctgtgagagcagcaacaccagcgccaccaccaccagcatccagcccaacctggagaacagcaacagcagcagcgagctgaacagcagccagagcgagagcgccaaggccgcagatgatcctgaaaatggagagcgggagagccacacccctgtgtccatccaggaggagatcgtgggggacttcaagtctgagaagagcaatggagagctgtctgagagccctggagctggaaaaggagccagcggcagcacccgcatcatcacccggctgaggaacccagacagcaagctgagccagctgaagagccagcaggtggccgctgctgcccacgaggccaacaagctgttcaaggagggcaaggaggtgctggtggtgaacagccagggcgagatcagccggctgagcaccaagaaggaggtgatcatgaagggcaacatcaacaactacttcaagctgggccaggagggcaagtacagagtgtaccacaaccagtacagcaccaacagctttgccctgaacaagcaccagcaccgggaggaccatgacaagagaagacacctggcccacaagttctgcctgaccccagctggggagttcaagtggaatggatctgtgcacggcagcaaggtgctgaccatcagcaccctgcggctgaccatcacccagtacggggagaacctgtag

SEQ ID NO: 146419 - DNA, 8712 bp, Artificial Sequence
  derived and/or modified sequence
atgcggggccggcggggccggccccccaagcagcccgccgcccccgccgcagagaggtgcgccccagctccacctccgcccccgcctccccctactagtgggcctatcgggggcctgaggagtcggcacagaggctctagcagggggcgttgggccgcagcccaggccgaggtagcaccaaagactaggttgagtagccctaggggcggcagcagctctaggcggaagccccctccaccaccacctgctccgccgtcaacaagtgccccgggtcgcggtgggagaggcggtggcggcggccgaacaggcggcgggggaggtggagggcacctggcgcgaactaccgccgctcgtagagccgtgaataaagtagtgtacgatgatcacgaatctgaggaggaagaagaggaagaagatatggtctctgaggaagaagaggaagaggatggggacgcggaagagacccaggatagcgaggatgacgaagaagatgaaatggaggaagatgacgacgattctgattacccggaggagatggaagacgatgatgacgatgccagttactgcaccgaaagttcctttagaagccactcaacctacagctctaccccagggcgccgaaagcctagagtgcaccgcccacggagccccatattagaagaaaaggatattccgcccttggagttcccaaagagctctgaggacctgatggtgcccaatgaacatatcatgaatgtgatcgccatttacgaggttctcaggaactttgggaccgttctgcgacttagcccttttaggttcgaggacttctgcgcagctctcgttagccaggagcagtgcacactaatggccgaaatgcacgtagtcctccttaaagcagtattaagagaagaggatacatccaacaccacgtttggccccgcggacctgaaggactcagttaattccaccttgtactttatcgatgggatgacttggccggaggtcttacgggtatactgcgaatccgacaaggaataccatcatgtgctcccttatcaggaagcagaggactacccatatgggcctgtcgaaaacaagatcaaagtgctccagttcctcgtggatcagtttctgactacaaacatcgctagggaggagctgatgtcagaaggggtgattcagtatgatgatcattgtagagtgtgccacaagttaggggacttgctgtgctgtgagacctgtagcgccgtttaccacctcgagtgcgtaaagcctcctctggaggaagtccctgaagacgagtggcagtgcgaggtgtgcgtggctcataaagtgcccggggtgacagactgtgtggccgagattcaaaagaataaaccttatatccggcatgaacctattggttacgaccgtagtagacggaagtattggttcttaaatcgaagattaatcattgaagaagacactgaaaacgaaaatgagaaaaaaatatggtattattccacaaaagtgcaactggctgaactcatcgactgcctggacaaggattactgggaagctgagctctgtaagatactggaagaaatgcgcgaggagattcaccgccatatggacatcaccgaggatctgaccaataaggcacggggcagcaataagagctttctggcagccgcgaacgaggagatcctcgaatcgattcgagccaaaaaaggggatatcgataatgtgaaaagccccgaagagaccgaaaaggataagaacgagacggaaaacgacagcaaagacgctgaaaagaatcgcgaagaatttgaagaccagagcttggagaaggactcagatgataagactccagatgacgacccagagcagggcaagagcgaggagccgacggaagttggcgataagggaaatagtgtgtctgcaaatctgggggacaacaccacaaacgcaactagtgaggagacatcccctagtgaaggccgatcaccggtcggctgcttgtccgaaacccctgactcctcaaacatggcggagaagaaagttgcctccgaacttcctcaggacgttccagaggaacctaacaagacatgtgaatcttccaatacatccgccacaaccacatctatccaaccaaacttggagaatagcaactcttcttctgagctaaactcatcacagagcgagagcgccaaggccgccgacgacccagaaaacggtgagcgggagtctcacactccagtcagcatccaggaggagatcgtaggtgatttcaagtctgaaaagagcaacggcgagctgtctgagtccccaggcgcaggcaagggggcctcaggctcaactcggattattactagattacgtaaccccgacagcaaactatcccagctcaaatcccagcaggtggcagctgccgctcatgaggccaataagctgtttaaagaaggtaaagaagtgctcgtagtgaatagccaaggcgagatatcacggctgtcaaccaagaaagaggtaatcatgaagggaaacattaacaattacttcaaactgggccaggaggggaagtacagggtataccacaatcagtacagtaccaactctttcgccttaaataagcaccaacaccgggaggatcacgacaagcggaggcatctggcccacaagttttgccttacccctgccggtgaatttaaatggaacggaagcgtgcacggctccaaggtcctaaccatctccacgctgcggcttaccatcactcagttggaaaacaacatcccttcctctttcctgcatccgaactgggctagtcacagagcaaactggattaaagctgttcaaatgtgctccaagccacgggaattcgccctcgccctggccattctggagtgtgctgtcaaaccagttgtaatgctgccaatttggagggagtcactcggccatactcggcttcaccggatgacatctattgaacgcgaggagaaggagaaagttaagaaaaaagagaagaaacaggaggaagaggagacgatgcagcaagcaacttgggtaaaatacactttcccagtgaagcaccaggtgtggaaacagaaaggcgaggaatatagggtcacaggctacggtgggtggtcatggattagtaaaacgcacgtgtacaggttcgttcctaagttgcctggtaacactaatgtcaattaccgcaagtccttggagggaacgaagaacaatatggatgagaatatggatgaatccgataagcgcaaatgttcgcgctcccccaagaaaataaagatcgaacccgattccgaaaaagacgaggtgaagggcagcgatgcggccaaaggcgcagaccaaaacgagatggatattagtaagattaccgaaaaaaaagaccaggatgtgaaagaacttctcgacagtgacagcgacaagccttgcaaagaagaacccatggaggtggacgatgacatgaaaaccgaaagccacgtaaactgccaggaatcctcccaggttgatgtagtgaatgtgtctgagggttttcatcttaggacttcatacaagaagaaaacaaagtcgtccaagctagacggcctgttggagaggcgcataaaacagttcaccctggaggagaagcagcggcttgagaaaataaagctggagggtggaattaagggcatcggcaaaacttcaaccaacagcagcaaaaacctgtcagaatcgcccgtgatcacaaaggccaaggaaggatgccagtctgactcaatgcgccaggagcagagccccaatgcaaacaatgaccaacccgaagatctgattcagggatgtagcgagagtgatagctctgtcctgcggatgtcagaccctagccacacgacgaataagttgtaccccaaggacagggtactggatgacgtgagcattagatctccagagacgaagtgccccaaacagaatagtatcgagaacgatattgaggagaaagtatctgacttagcttcacggggacaagaacctagcaagtcaaagactaaaggtaatgattttttcattgacgattccaagttagcttcagctgacgatattggtacactgatatgtaagaataagaaaccgcttattcaagaagaatccgatacaatagtttcctcctccaaaagcgcactgcatagctctgtgcccaaatcaaccaacgatagagatgcaacccccctatcacgagccatggattttgaggggaaacttgggtgtgactccgagtccaacagcactctggaaaacagctctgacaccgtgtccattcaggattcatcggaggaggatatgatagtgcagaattccaacgagagcatctcagaacagttcagaactcgggagcaggatgttgaagtcctagagccactcaagtgtgagctagtgtcaggggaatcaacggggaactgtgaggatcgcctgcccgttaagggtaccgaggctaatggaaagaagcccagccaacagaaaaaattggaagaaagacccgtaaacaaatgcagcgatcaaattaaactaaagaacactacagataagaagaacaatgagaatagggagagtgaaaaaaaaggacaaagaacatccaccttccagatcaatggaaaggacaacaagccgaagatctatctaaagggcgagtgcctgaaggagatctccgagtccagagttgtcagtggtaacgtcgaacctaaagtcaacaatatcaataaaatcatccctgaaaacgatatcaagtcattgactgtgaaggagtcggccatccgtccttttatcaatggtgacgtgatcatggaggactttaatgagagaaattctagtgaaacaaagagtcacctactgtcctccagtgacgctgagggtaactaccgggactccctcgaaaccctgccttctactaaggaatctgattcaactcagacaactactccgagtgcatcttgcccggagagtaactcggtgaatcaggtggaagacatggaaatcgagacctcggaggttaagaaggtaaccagtagtccgattaccagcgaagaggagagcaacctgtccaatgattttattgacgaaaatgggctaccaatcaacaagaatgagaatgtgaacggcgagtcgaagagaaaaaccgtgatcacagaagttaccacaatgacctcaactgtggctaccgagtcaaaaaccgtaatcaaagtcgaaaagggggataagcagaccgttgtgtcttctacagagaattgcgcaaaaagcacagtgactacaactactaccacagtcacaaagttgtctaccccaagtaccggggggagtgtggacatcatctccgttaaagaacaatcgaagactgtggtgacaaccaccgtaactgatagtctgacaactaccggtgggactttggtaacttctatgactgtgagtaaggaatacagcactagggataaagtcaaactgatgaaattcagtcgacccaagaagactcgcagcggaacagccctccctagctataggaagtttgtgactaagagtagtaaaaagagcattttcgtgctgcctaatgacgacctaaagaaactcgcacgcaaaggtgggataagggaggtgccctacttcaattacaatgcaaagcccgccctggacatctggccctacccttcacccaggcccacattcggcattacttggcggtaccgtctgcagacagtcaagagtcttgccggtgttagccttatgctgaggctgctttgggcatcacttaggtgggacgacatggccgccaaggcgcctcccggcggcggcacaactagaaccgagacgagcgaaaccgagataacaactactgagattataaagaggcgcgacgtagggccctacggcattcgatcagagtattgtataaggaagataatctgtccaattggggtcccagagacaccgaaagagacacccacccctcagagaaagggactccggtcaagcgccctccgtcccaaacgcccagagaccccaaagcagactggtcctgtgatcattgagacctgggtggctgaggaggagctcgaactgtgggaaattcgcgctttcgcagagcgtgtggaaaaagagaaggctcaggccgttgaacagcaagccaagaaacgtcttgagcagcagaagccaacagtgatcgcaacttcaacaacaagccccacaagcagtactacaagcactatcagtccagctcaaaaagtcatggtggcgcccatatcgggcagcgtgaccactgggaccaagatggtgcttactacaaaggtgggcagcccagctacagtcacctttcaacagaacaagaactttcaccagacattcgccacttgggtgaagcagggacagtccaattctggagtagtacaggttcagcagaaggtgctggggattatcccaagttccaccggcacctctcaacagacctttacttccttccagcctcgcacagctacagtgacgatccgccctaatacctctggctctgggggcacaacctccaactcccaggtcataactgggccacaaataagaccagggatgaccgtaattagaaccccacttcagcagtccaccctgggcaaagccatcattcggacccccgtcatggtgcaaccgggcgcgcctcagcaggttatgacccagattattaggggacagcccgtgtcaacggcagtctctgctccaaatacagtaagctcaacccccggccagaagagtctcaccagcgcgacttctacatctaacatccagtcttctgcatcacagccgcctcgtccccaacaggggcaagtgaaacttaccatggcccagctgacccaactgactcagggtcatggcggaaatcagggcttaaccgtggtaatccagggacagggccagactacaggtcaactgcagctgataccccaaggggtgacagtgttaccgggaccgggccagcaattgatgcaagcggctatgcccaacggcacggtgcagcgctttttgtttacccctctcgccaccaccgcaacgacagccagcaccacaacaaccacggtctctacgaccgcagccgggactggcgaacaaagacagagcaagcttagccctcagatgcaggttcaccaggataaaacccttccaccagcccaatcttcctcagtcggccctgctgaggcccagcctcagaccgcacagccctctgcgcagccacaacctcagactcagccacagtcccctgcacaaccggaagttcagactcagcccgaagtccaaacccagaccacagtctcctcccacgttccctccgaagctcagcctacacacgcgcagtccagcaaacctcaagtcgccgcgcagtcccaacctcagtcgaatgtgcagggacagagccccgtgagagtgcaatcaccctctcagacccgcattagaccatctaccccatctcaactgagcccagggcagcaaagccaggtgcaaacgaccacctctcagccaattcctatccaaccccacacctcgcttcagatcccaagccagggccagcctcagtcccagcctcaggtagttatgaagcacaacgccgttatcgagcacctgaagcagaaaaaatctatgacccccgccgaaagggaagaaaaccagaggatgatcgtctgcaaccaggttatgaaatacattctggataaaatcgacaaagaggagaaacaagctgctaaaaaacggaagagggaggaaagcgtcgaacagaaacgatccaaacaaaatgcaacaaagctctctgccctgctctttaagcacaaagagcagctgagggcggagattctcaagaaacgcgcgctgctggataaggaccttcaaatcgaagtgcaggaagaactgaagcgtgacctgaaaatcaaaaaagagaaagacctcatgcagctggcccaggcaacagcggtagctgccccatgtcctcccgtaacacctgccccacctgcccccccggcgccacccccaagcccaccgcccccaccagctgtccagcataccggactcctgagcacccccacattaccagcagcaagtcagaagcgcaagcgggaggaggaaaaagatagcagctccaaaagcaagaagaaaaaaatgatctcaacaacgtccaaagagacaaagaaggatacaaagctgtactgtatctgtaaaaccccctacgacgagtcaaagttctatatcggctgcgatcgctgtcagaattggtaccacggtagatgtgtgggtatactccagtcagaggcagagctaatcgatgaatacgtttgtcctcagtgtcagagcacagaggatgcaatgaccgtattaacccctctgactgagaaggactacgagggcctgaagcgcgtactacggtccctgcaggcccataaaatggcctggccattcctcgaaccagttgaccccaacgatgcacccgattattacggggtcattaaggaacctatggacttggcaacaatggaggagagagtacaacgaagatactacgagaaattgacagagttcgttgccgacatgactaaaatcttcgataactgcaggtattataacccttccgattccccattctaccaatgtgctgaagtgctggagagtttcttcgttcagaaactgaagggttttaaagccagccgtagtcacaataacaagctgcaatcgactgcgtcctag

SEQ ID NO: 146420 - DNA, 2469 bp, Artificial Sequence
  derived and/or modified sequence
atggccgccgagggcgaccccgagtggggccccaccccccccagcacatcggccacaactgcagcaaggcgggcagtaaataaagttgtctacgatgatcacgagagcgaggaagaggaggaggaggaggacatggtcagcgaggaagaggaagaagaagatggtgacgcggaggagacccaggattcggaggacgacgaagaggatgagatggaagaggatgatgatgactccgactatccagaagagatggaggacgatgacgatgacgcctcctattgtacagagtcttcatttcgcagccatagcacgtatagttccacaccgggaaggcggaagcccagagtgcacaggccccgaagtccaatcctggaagagaaggacattccacccttggagtttccaaagtccagtgaggaccttatggttccgaatgagcacataatgaacgtgatcgccatttacgaggtcctgagaaatttcggaacggtgctgagactctcgccatttaggttcgaggacttctgcgcggcactcgttagtcaggagcaatgcaccttaatggccgagatgcacgtcgtcctgttaaaagccgtgctccgtgaagaagatacatccaacaccacttttgggcccgccgatctgaaggacagcgtgaacagcactttgtattttatcgacgggatgacatggcccgaagtgttgcgggtctattgtgagagtgacaaggagtatcatcacgttttgccttaccaagaggccgaagactacccctacggtccggttgagaacaagataaaggttctccagttcctcgtcgaccagttcctcacaaccaatattgccagggaggaactcatgtccgagggagtaattcagtacgatgatcactgcagggtgtgccataaattgggcgacctactttgttgcgagacctgctccgcggtgtaccacctggaatgcgtgaagccacccctggaagaggtacctgaagacgaatggcaatgtgaggtatgcgtcgcccacaaagttccaggggtaaccgactgcgtggccgaaatacagaaaaataagccatacatccgtcatgagcctatcggctatgaccgaagcagacgtaaatactggtttctaaacaggcggctgataattgaagaggacaccgagaacgagaacgaaaaaaagatctggtactactcaacaaaggtgcagttggctgagctcatagattgtctcgacaaagactattgggaagcagagttgtgcaagattttggaggagatgagagaggagatccacagacacatggatatcacagaagaccttaccaataaggcacgagggagcaataagtcatttctggccgccgccaacgaggagatcttggagtccatacgcgcaaaaaagggcgatatcgataatgtaaagagccctgaggagactgaaaaggataaaaacgaaactgagaacgatagcaaggatgctgaaaagaacagagaggagtttgaggatcagagtctggaaaaggactccgatgataagacccccgatgatgatcctgaacagggcaagtctgaagaaccgacagaggtgggcgataagggtaattcagtttcggctaatcttggagacaacactacgaacgcaacctcagaggaaacctcaccctcagagggacggagccccgtaggatgtctcagtgagacaccagacagctctaacatggctgaaaaaaaagtggcttctgagctgccccaggatgtgcctgaggagcctaacaaaacgtgcgaatcgagtaatacctcagcaacaaccacttccatccagcctaatttggaaaattccaattcttccagcgagttaaatagcagtcagtccgagagcgccaaagctgccgacgacccagaaaatggggaaagggagtcccacaccccagtgtctattcaagaagagattgtcggcgactttaagagcgagaagtcaaacggcgaattgtctgaatcccctggcgccggtaagggcgcctcaggatccacgagaatcataacacgccttaggaatccggactccaagctctcgcagctgaagtctcagcaggttgctgccgccgcccatgaagcaaacaaactttttaaggaaggaaaagaagttctggtcgtgaacagccagggtgagataagtcggctgtctacgaagaaggaagttattatgaaaggcaacatcaataattactttaaattgggccaggaagggaaatacagggtttaccacaaccagtattcgactaacagctttgccttaaataagcaccaacaccgtgaggaccacgacaaaaggaggcatttagctcacaagttctgcttaacaccggctggggagttcaagtggaatgggtcggtacacggcagcaaggtgctcaccatctctacccttcgtcttactattacacagtacggggagaatttatag

SEQ ID NO: 146421 - DNA, 8711 bp, Artificial Sequence
  derived and/or modified sequence
atgcgcggtcgacgaggcagacctcccaagcagccagccgctcccgctgctgaaagatgtgcacctgcacctccaccaccaccgccaccgccaacctctggacctatcggtggcctaaggtcccggcacaggggctcaagtagaggaaggtgggcagcagcccaggccgaggtggcccctaagacacgattatcaagtccccgaggcggttctagcagccggcgtaagccacctcccccaccccctgctccaccttctacatctgccccaggaagaggcggacgtggcggaggcggtggacgtacggggggtggcggtgggggtggacatctagcaagaactaccgctgccagaagggccgttaacaaggttgtgtacgatgatcatgagtccgaggaagaagaggaggaagaggacatggtgtccgaagaagaagaggaagaagacggagatgccgaagagactcaggattcggaggacgatgaggaagatgaaatggaagaggacgatgacgattctgactaccccgaggagatggaggacgacgacgacgacgcatcctattgcaccgaatccagctttcgatctcattccacttactcgagcacccccggaagaagaaaaccaagggtacatcgacccagatcccccatactggaggagaaggatataccccctcttgagttcccgaaatccagcgaagatctgatggtcccgaacgagcacattatgaacgtgattgccatttatgaagtgctgcgcaacttcggaactgtactgcgcctgtccccattcaggttcgaagacttttgcgctgcgctcgtttcccaggaacagtgcacgttaatggcagaaatgcatgttgtgttgctaaaggccgtcctgcgcgaagaggatacatccaacaccacgtttggtcctgcagatctaaaggatagcgtgaactccaccctgtattttattgacgggatgacttggccggaggtattaagagtgtactgtgagagcgacaaggagtaccaccacgtactgccctaccaggaggctgaggactacccttacggacccgttgagaataaaattaaagtactgcagttcctcgtggaccagttcctgactactaacattgcaagagaggagctgatgagtgaaggggttatccagtatgatgatcattgtagagtctgtcataagctgggcgatctgctatgctgcgagacatgtagcgccgtctaccacctggagtgcgtcaaaccgcctctggaagaagtccccgaggatgagtggcagtgcgaagtttgtgtcgcccacaaggtgcctggagtgaccgactgtgtggccgagatacagaaaaataaaccctacatcagacatgaacccatcggttatgacagaagtcggaggaagtattggtttctgaacagacgcctgatcatagaggaggatacagagaacgagaacgaaaagaaaatctggtattactctactaaagttcagcttgctgaactgattgactgcctggataaagactattgggaagccgagctatgcaagatactggaggagatgcgggaggaaattcacaggcatatggacattacagaagacttgacgaataaagctcgagggagtaacaagtcatttctggctgctgcaaatgaggaaatattagagagcattcgcgctaagaagggggacattgataacgtcaagtctcctgaagaaaccgaaaaagataagaacgaaaccgagaacgatagcaaggacgccgagaaaaacagagaagaattcgaggatcagtccctggaaaaggactcagacgacaagacacctgatgatgatcctgagcagggtaagtccgaggagccaaccgaagtcggggacaaggggaattcagtgtcagcaaacctgggggataacacaacaaacgcaacctctgaggagacttcaccatccgagggaaggtccccagtgggctgcctgagcgagacccctgattcatcaaatatggctgagaaaaaagtcgctagtgagctgccccaggatgtgccggaggagcccaataagacctgcgaatctagcaatacaagtgcaactacaactagcatacagcccaacctcgaaaattcaaacagcagctctgagctgaactccagccaaagcgaaagtgctaaggctgctgacgatccagaaaacggggaacgcgagtcacacacacccgttagcatccaggaggaaattgtcggagactttaagagcgagaagtcaaatggagagctgtccgagtccccgggtgctgggaagggtgcctccgggtctaccaggattatcacccggctgcgcaacccagactccaagctgtcccagttaaagagccagcaggttgccgctgccgcacatgaggccaataagctgttcaaagagggaaaagaagtgctggtggtgaactctcagggcgaaataagtaggttgtcaaccaagaaggaggtaattatgaaggggaacataaataattactttaaactgggccaggaagggaagtacagggtgtatcacaaccaatactccacaaattcattcgcactgaacaaacaccagcaccgggaagaccacgacaaacgacgccatctggcccacaagttctgcctgaccccggctggcgaattcaagtggaacggatcagttcatggatcgaaagtgctgacaatctccactctccgactcaccataacccagctggagaacaatatcccttcatctttcctccatcccaactgggcatctcatcgcgctaactggataaaggcagtacagatgtgctccaagccaagagagtttgcattggccctggctatactggagtgcgccgttaaacccgtggtaatgctccccatctggcgggagtctctgggacacactagactccatcgtatgacctcaattgagcgggaagaaaaggaaaaagttaagaaaaaggagaaaaaacaggaggaggaggagactatgcagcaggcgacctgggtgaagtataccttcccagtcaaacatcaggtgtggaaacagaaaggcgaggagtacagggtcactggctacggcggttggtcctggatcagcaaaacacatgtctacagattcgtgcctaagctccccggtaacacaaatgtaaactatcgcaagtctctggaaggaactaagaacaatatggacgaaaacatggatgagtccgacaaacgaaaatgctccagaagcccgaagaagatcaagatcgaacctgattccgaaaaggatgaggttaaggggtcagatgcagcgaagggggctgaccaaaacgaaatggacatcagtaagattacagagaagaaggaccaagacgtaaaggaactgctcgactctgactccgacaagccctgtaaggaagagccgatggaagttgacgatgacatgaaaacagagagccacgtgaactgccaggagtccagccaggtggatgtggttaacgtgtccgagggtttccacctgcggaccagttataagaagaaaaccaagtcgtcaaagctggatgggctcctggaaaggaggatcaaacagttcaccctcgaggagaaacagcgactcgaaaaaattaagttggaggggggaatcaaaggtataggaaaaactagcaccaacagttccaaaaatctttcagagtcgcctgtgatcacaaaggccaaagagggttgccagtctgatagcatgcgtcaagagcagtcccctaacgccaacaatgatcaacccgaggatctgattcagggttgtagcgagtcggactcatccgtgctacggatgtcagacccaagtcacaccacaaacaagctctacccaaaagatagagtgcttgacgatgtgtccatccgctcaccggaaactaaatgccctaaacagaatagtattgaaaatgatatagaggagaaagtctcagacttagcgtcgcgcggtcaagagccttcaaagtcaaagaccaagggcaatgatttttttattgatgattcaaagctcgcaagtgctgatgatattggtactttgatttgcaaaaacaagaaacccctgatacaggaggaatccgatacgatcgtgtcatcctccaagagcgccctgcattcatctgtgcccaagtccacaaatgaccgggacgctactcctctttcccgggcaatggactttgaaggcaagttaggctgtgatagcgaatcaaacagcaccctcgagaacagcagcgacactgtctctatccaagactcctctgaggaggatatgatagttcagaacagtaatgaaagcatctcagagcagttccgtacgcgcgagcaggacgtggaggtgctggaaccacttaagtgtgagctggtgtctggtgaatctacagggaactgtgaggatcgcctgcctgtgaaaggcaccgaggccaacgggaaaaagccgtctcagcaaaaaaaactagaggaaaggccagtgaacaagtgcagtgatcaaatcaagctaaaaaacactaccgacaaaaagaacaatgagaaccgagagagtgagaagaagggacagcggacttctacattccagataaacgggaaagataataaaccaaaaatctatttaaagggtgagtgcctaaaggaaatcagcgagtcccgcgtcgtttccggcaatgtggaaccgaaggttaataacattaataaaatcattcctgaaaacgacattaaaagcctaaccgtaaaggagagcgctattcgaccattcatcaacggtgacgtcatcatggaagatttcaacgaacggaatagctccgagactaaatcacatttgctgtccagctcagatgccgaggggaattacagagatagcctcgagaccctaccatccacaaaggagtctgattcaactcagactaccacaccatcagccagttgtccggagtccaatagcgtgaaccaggtagaagatatggagattgagaccagcgaagtgaaaaaagtgacatcttcccccatcacctccgaagaagagtctaacttaagcaacgacttcatagacgagaacgggctcccgattaacaaaaatgagaacgttaacggtgagtccaaaaggaaaaccgttattaccgaagttacaaccatgacttctactgtggccactgaaagtaagaccgttattaaggtggagaagggtgataaacaaactgtggtgagttctacggaaaattgcgcgaaatccacagtgaccaccacaaccactacagtaaccaagctttcaacaccctcaactgggggttctgtcgatatcatttcagtgaaggagcagtccaaaactgtggttacaacaaccgtcacagatagcctgactaccacaggcggtacgctggtcacttccatgactgtcagtaaggagtacagcaccagagacaaggtgaaattgatgaaattctcacgaccaaaaaaaacacggtctggcactgccttgccgagctacaggaagtttgtcaccaaatcctctaagaagagtatattcgtgctcccaaacgacgatttgaagaagctggccagaaaaggcggtatccgggaagtcccctatttcaattacaacgcaaagccagctctcgacatttggccttatccctccccacggcctaccttcggaattacctggaggtatcgcttgcagaccgtaaagtctctggccggagtctctctgatgctgcgcctcttgtgggcctccctgagatgggatgatatggcggctaaggcacctccagggggaggtactacgaggacagaaaccagcgaaacagagattacgaccactgaaataataaaacgcagggacgtgggcccatacggaattcggagtgaatactgtattcggaaaattatctgtcccataggcgtaccagaaacccctaaagagacgcccacacctcagcggaagggcctgcgcagctcagccttgagacctaaacgcccagagacgccgaagcaaaccggccctgtaatcatagaaacgtgggtggccgaggaggagctcgaattgtgggaaataagagccttcgccgagcgcgtagagaaggaaaaagcccaggcagtggaacaacaggccaaaaagcgccttgagcagcagaagccaacagtgatcgccacatctaccacttcccccacaagtagcaccacatccacaatctccccagctcagaaggtaatggtcgcgccaatttctggctcagtaactactgggacaaagatggtacttacaacaaaggtgggcagtccagccaccgtgaccttccagcaaaataagaacttccaccagacttttgctacttgggttaaacagggccagtctaattcgggagttgtgcaggtccaacagaaggtgcttggtattataccgagctctaccggcacctcccagcaaaccttcacttcctttcagcccagaacagccactgtgaccataagaccgaataccagcgggagcggcggaaccacaagtaacagtcaagtgatcaccggaccgcagatacgcccagggatgaccgtgattaggaccccgctccagcagagtactcttgggaaagccatcatcaggactcccgtgatggtgcagccgggtgcaccccaacaggtcatgacccagatcatacggggtcagcctgtatcgacagccgtgtctgcaccaaacacggtgagctctacccctggccagaagtccttaacatccgcgacaagcacaagtaatattcaaagctcagccagtcagcctcccagaccccaacaaggacaggttaaactcaccatggctcagttgacccagctgacacaggggcacggagggaaccagggcttgacagtggtcattcagggtcagggtcagaccaccggccagctgcagcttatacctcagggcgtgacggtgttacctggccctggccagcagttgatgcaggccgcaatgccaaacggaaccgtacagaggttcttgttcaccccccttgcgaccacagcaacaactgccagtactacaacaacgacggtttccacaactgccgctggcactggagaacaacgtcagagcaaactgtctccgcagatgcaggttcaccaggataagactctgcccccagcacaaagctctagtgttggcccagccgaagcacagccacagactgcccagccttccgcacaaccacagcctcagacacagccccagtcgcccgctcagccagaagtgcagactcaacctgaagtgcagacacagacaaccgtgtcctcccatgttccatccgaagcccagcccacccacgcccagtcttctaagccacaggtcgcagcccagagtcagccacagtctaatgttcagggacagtccccagtgcgggttcagagcccaagtcagactcggatccgaccatcaactccatcacagttaagccccggacagcagtcacaagtgcaaactactaccagccagccaatcccgatccagccccataccagcctgcagatccctagccagggccagccccagtcacagcctcaggtggtgatgaaacacaatgcggtgattgagcatttaaagcagaaaaaatctatgaccccagcagaaagggaagagaatcagcgcatgattgtatgcaaccaggtgatgaaatacattctggacaagatagacaaagaggagaaacaggcagcaaagaaacgtaagagggaggaaagcgtggagcagaagagatctaagcagaacgccacaaaactctccgccctgttgttcaagcacaaagaacagctgagagctgagatccttaagaaacgggcactcctggacaaggaccttcaaattgaggtgcaagaagaacttaaaagagatttgaaaattaagaaggaaaaggatttaatgcagcttgcccaggctacagctgttgccgcaccttgtcccccagtcaccccagctccccctgctccgcctgccccacctccaagcccccctcctccccctgcagtccagcacacaggattgcttagcacgcctaccctgccagctgcatcacagaaaagaaagagggaggaggagaaagactcctcatccaagtctaagaaaaagaagatgatcagcaccaccagtaaggagacaaagaaggacacaaaactgtactgtatctgtaagacaccatacgacgagtctaagttctatatcggctgcgaccgatgccagaactggtaccacgggaggtgtgtaggcatccttcaaagcgaggccgagttaattgatgaatacgtgtgcccacaatgccaatccactgaggatgctatgacggtcctgactcccctgaccgagaaggattacgaaggactgaagcgggtattacgctccctgcaggcacataagatggcatggcccttcctcgaaccagttgatccaaacgatgcacccgattattacggagtgatcaaagagcctatggaccttgccacaatggaggaaagagtgcagaggcggtattacgaaaaattaacagagtttgtggcggatatgacaaagatcttcgacaactgccgctattataatccgtcagacagcccgttctatcagtgtgcggaggtgcttgaaagtttctttgtccagaagctgaagggatttaaggcctcacgctcccacaataacaaattgcagagcacagcctcata

SEQ ID NO: 146422 - DNA, 10861 bp, Artificial Sequence
  derived and/or modified sequence
cgccccccctgcgcccgcccctcccccttcgctttccttctccccccgcctcggctccgacatgaggggccggcggggcaggccgcccaagcagcccgcggctcccgctgcggagcgctgcgccccggccccgccgccaccgccgccgccgcccacgtccggacccatcggggggctccgctcgcggcaccgcggcagcagccggggcaggtgggccgccgcccaggctgaggtggcgcccaagacgcggctgagctcgcccagggggggcagcagtagccggaggaagccgccgccgccgccgccggccccccccagcaccagcgccccgggccggggggggcgaggaggcgggggcggcaggacggggggcgggggcggcggcggccacctggcccggaccaccgcggcccggagggccgtcaacaaagtggtgtacgatgaccacgagagcgaggaggaggaggaagaggaggacatggtctccgaggaggaggaggaggaggacggcgacgccgaggagacccaggattctgaggacgacgaggaggatgagatggaagaggacgacgatgactccgattatccggaggagatggaagacgacgacgacgacgccagttactgcacggaaagcagcttcaggagccatagtacctacagcagcactccaggtaggcgaaaaccaagagtacatcggcctcgttctcctatattggaagaaaaagacatcccgccccttgaatttcccaagtcctctgaggatttaatggtgcctaatgagcatataatgaatgtcattgccatttacgaggtactgcggaactttggcactgttttgagattatctccttttcgctttgaggacttttgtgcagctctggtgagccaagagcagtgcacactcatggcagagatgcatgttgtgcttttgaaagcagttctgcgtgaagaagacacttccaatactacctttggacctgctgatctgaaagatagcgttaattccacactgtatttcatagatgggatgacgtggccagaggtgctgcgggtgtactgtgagagtgataaggagtaccatcacgttcttccttaccaagaggcagaggactacccatatggaccagtagagaacaagatcaaagttctacagtttctagtcgatcagtttcttacaacaaatattgctcgagaggaattgatgtctgaaggggtgatacagtatgatgaccattgtagggtttgtcacaaacttggggatttgctttgctgtgagacatgttcagcagtataccatttggaatgtgtgaagccacctcttgaggaggtgccagaggacgagtggcagtgtgaagtctgtgtagcacacaaggtgcctggtgtgactgactgtgttgctgaaatccaaaaaaataaaccatatattcgacatgaacctattggatatgatagaagtcggaggaaatactggttcttgaaccgaagactcataatagaagaagatacagaaaatgaaaatgaaaagaaaatttggtattacagcacaaaggtccaacttgcagaattaattgactgtctagacaaagattattgggaagcagaactctgcaaaattctagaagaaatgcgtgaagaaatccaccgacacatggacataactgaagacctgaccaataaggctcggggcagtaacaaatcctttctggcggcagctaatgaagaaattttggaatccataagagccaaaaagggagacattgataatgttaaaagcccagaagaaacagaaaaagacaagaatgagactgagaatgactctaaagatgctgagaaaaacagagaagaatttgaagaccagtcccttgaaaaagacagtgacgacaaaacaccagatgatgaccctgagcaaggaaaatctgaggagccaacagaagttggggataaaggtaactctgtgtcagcaaatcttggcgacaacacaacaaatgcaacttcagaagagactagtccctctgaagggaggagccctgtggggtgtctctcagaaacccccgatagcagcaacatggcagagaagaaggtggcatctgagctcccccaggatgtgccagaagaacctaacaagacatgtgagagcagtaacactagtgctaccactacctccatccagcctaatctggaaaacagtaacagcagcagtgaactaaattcttcccagagtgaatctgctaaggcagctgatgatcctgaaaatggagaaagagaatctcatacacctgtctctattcaggaagagatagtaggtgatttcaaatcggagaagtccaacggggagctaagtgaatctcctggagctggaaaaggagcatctggctcaactcgaatcatcaccagattgcggaatccagatagcaaacttagtcagctgaagagccagcaggtggcagccgctgcacatgaagcaaataaattatttaaggagggcaaagaggtactggtagttaactctcaaggagaaatttcacggttgagcaccaaaaaggaagtgatcatgaaaggaaatatcaacaattattttaaattgggtcaagaagggaagtatcgcgtctaccacaatcaatactccaccaattcatttgctttgaataagcaccagcacagagaagaccatgataagagaaggcatcttgcacataagttctgtctgactccagcaggagagttcaaatggaacggttctgtccatgggtccaaagttcttaccatatctactctgagactgactatcacccaattagaaaacaacatcccttcatcctttcttcatcccaactgggcatcacatagggcaaattggatcaaggcagttcagatgtgtagcaaacccagagaatttgcattggctttagccattttggagtgtgcagttaaaccagttgtgatgctaccaatatggcgagaatctttaggacataccaggttacaccggatgacatcaattgaaagagaagaaaaggagaaagtcaaaaaaaaagagaagaaacaggaagaagaagaaacgatgcagcaagcgacatgggtaaaatacacatttccagttaagcatcaggtttggaaacaaaaaggtgaagagtacagagtgacaggatatggtggttggagctggattagtaaaactcatgtttataggtttgttcctaaattgccaggcaatactaatgtgaattacagaaagtcgttagaaggaaccaaaaataatatggatgaaaatatggatgagtcagataaaagaaaatgttcacgaagtccaaaaaaaataaaaatagagcctgattctgaaaaagatgaggtaaaaggttcagatgctgcaaaaggagcagaccaaaatgaaatggatatctcaaagattactgagaagaaggaccaagatgtgaaggagctcttagattctgacagtgataaaccctgcaaggaagaaccaatggaagtagacgatgacatgaaaacagagtcacatgtaaattgtcaggagagttctcaagtagatgtggtcaatgttagtgagggttttcatctaaggactagttacaaaaagaaaacaaaatcatccaaactagatggacttcttgaaaggagaattaaacagtttacactggaagaaaaacagcgactcgaaaaaatcaagttggagggtggaattaagggtataggaaagacttctacaaattcttcaaaaaatctctctgaatcaccagtaataacgaaagcaaaagaagggtgtcagagtgactcgatgagacaagaacagagcccaaatgcaaataatgatcaacctgaggacttgattcagggatgttcagaaagtgattcctcagttcttagaatgagtgatcctagtcataccacaaacaaactttatccaaaagatcgagtgttagatgatgtctccattcggagcccagaaacaaaatgtccgaaacaaaattccattgaaaatgacatagaagaaaaagtctctgaccttgccagtagaggccaggaacccagtaagagtaaaacaaaaggaaatgattttttcatcgatgactctaaactagccagtgcagatgatattggtactttgatctgtaagaacaaaaaaccgctcatacaggaggaaagtgacaccattgtttcttcttccaagagtgctttacattcatcagtgcctaaaagtaccaatgacagagatgccacacctctgtcaagagcaatggactttgaaggaaaactgggatgtgactctgaatctaatagcactttggaaaatagttctgataccgtgtctattcaggatagcagtgaagaagatatgattgttcagaatagcaatgaaagcatttctgaacagttcagaactcgagaacaagatgttgaagtcttggagccgttaaagtgtgagttggtttctggtgagtccactggaaactgtgaggacaggctgccggtcaaggggactgaagcaaatggtaaaaaaccaagtcagcagaagaaattagaggagagaccagttaataaatgtagtgatcaaataaagctaaaaaataccactgacaaaaagaataatgaaaatcgagagtctgaaaagaaaggacagagaacaagtacatttcaaataaatggaaaagataataaacccaaaatatatttgaaaggtgaatgcttgaaagaaatttctgagagtagagtagtaagtggtaatgttgaaccaaaggttaataatataaataaaataatccctgagaatgatattaaatcattgactgttaaagaatctgctataaggccattcattaatggtgatgtcatcatggaagattttaatgaaagaaacagctccgaaacaaaatcgcatttgctgagttcttcagatgctgaaggtaactaccgagatagccttgagaccctgccatcaaccaaagagtctgacagtacacagacgaccacaccctcagcatcttgtccagaaagcaattcagttaatcaggtagaagatatggaaatagaaacctcagaagttaagaaagttacttcatcacctattacttctgaagaggaatctaatctcagtaatgactttattgatgaaaatggtctgcccatcaacaaaaatgaaaatgtcaatggagaatctaaaagaaaaaccgtcatcacagaagtcaccacgatgacctccacagtggccacagaatcaaaaactgtgatcaaggtagaaaaaggcgataagcaaactgtggtttcttccacagaaaattgtgcaaaatccactgtcacaaccaccactacaacagtgaccaagctttccacaccctccacaggcggcagtgtggacatcatctctgtaaaggagcagagcaaaaccgtggtcaccacgacagtgacagactccctgaccaccacgggaggcacactggttacatctatgactgtgagcaaagagtattccacacgagacaaagtgaaactgatgaaattttcaagaccaaagaagactcgttcaggtacagctctgccatcctatagaaaatttgttaccaagagcagcaagaagagcatttttgttttgcctaatgatgacttaaaaaagttggcccgaaaaggaggaatccgagaggtcccttattttaattacaatgcaaaacctgctttggatatatggccatatccttctcctagaccgacctttggcatcacttggaggtatagacttcagacagtaaagtccttagctggagtgagcctgatgttacggttactgtgggcaagtttgagatgggatgatatggcggccaaggctcctccaggaggagggactacacggacagaaacatccgaaactgaaatcacaacaacagaaataattaagaggagagatgttggtccttatggcattcgatctgaatattgtatcaggaaaatcatttgtcccattggagttccagaaacaccaaaagaaacgcctacacctcagaggaaaggccttcgatcaagtgcactgcggccaaagagaccagaaacgcccaagcaaactggccctgttattattgaaacctgggtagcagaagaagaactggaattgtgggagatcagggcatttgctgagagagtggagaaagaaaaggcacaagcagttgagcaacaggctaagaaacgactggagcagcagaagccgacagtgattgcaacttccactacttccccaacaagcagtacaaccagcaccatctctccagcacagaaggttatggtggcccccataagtggctcagttacaactggaaccaaaatggtactaactactaaagttggatctccagctacagtaacattccaacaaaacaagaactttcatcaaacctttgctacatgggttaagcaaggccagtcaaattcaggcgttgttcaagtacagcagaaagtcctgggtatcattccatcaagtacaggtaccagtcagcaaacctttacttcattccagcccaggacagcaacagtcacaattaggcccaatacctcaggctctggaggaaccacaagcaattcacaagtaatcacagggcctcagattcgccctggtatgaccgtgattagaacaccactccaacagtcaacactaggaaaggcaattattcgaacacctgtgatggtacagccaggtgctcctcagcaagtgatgactcaaatcatcagggggcagcctgtctccactgcagtctccgcccctaacacggtttcctcaacacctgggcagaaaagcttaacttcagcaacgtccacttcaaatatacagtcttcagcctcacaaccccctcgcccccaacaaggacaagtgaagctcaccatggctcaacttactcagttaacacagggccacggtggcaatcaaggtttgacagtagtaattcaaggacaaggtcaaactactggacagttgcagttgatacctcaaggggtgactgtactcccaggcccaggccagcagctaatgcaagctgcaatgccaaatggtactgttcagcgattcctctttaccccattggcaacaacagccaccacagccagcaccaccaccaccactgtttccacgacagcagcaggtacaggtgaacaaaggcagagtaaactgtcaccccagatgcaggtacatcaagacaaaaccctgccaccagctcagtcatcaagtgtgggtccagcagaagcccagccacagactgctcagccttcagctcagccccagccccaaacccagccccagtccccagctcagcctgaagttcagactcagcctgaagttcagacccaaacaactgtttcatcccatgtcccttctgaagcacaacccacccacgcacagtcatccaagccccaagttgcagcagtctcagcctcaaagtaatgtccaaggacagtctcctgttcgtgtccaaagtccatcacagactcgaatacgtccatcaactccatcccaactgtctcctggacaacaatcccaggttcagactacaacctcacaaccgattccaattcaaccacatacatctcttcagataccttcccaaggccagccacagtcacaaccccaggtggtgatgaagcataatgctgtaatagaacatttaaaacagaaaaagagcatgactccagctgaaagagaagagaatcaaagaatgattgtctgtaaccaggtgatgaagtatattttggataagatagataaagaagaaaaacaggcagcaaaaaaacggaagcgtgaagagagtgtggagcagaaacgtagcaagcagaatgccactaagctgtcagctctgctcttcaagcacaaagagcagctcagagccgagatcctgaagaagagagcactcctggacaaggatctgcaaattgaagtgcaggaagagctgaagagagacctgaaaattaagaaagaaaaagacctgatgcagttggctcaggccacagcagtagctgcaccctgccccccagtgacaccagctcctccagcccctccagcccctccaccttcacctccccctccacctgctgtgcaacacacaggccttctgtccacgcccaccttacctgctgcttcccagaagaggaagcgggaagaggaaaaagactccagctcaaagtccaagaaaaagaaaatgatctctactacctcaaaggaaactaagaaggacacaaagctttactgtatctgtaaaacgccttatgatgaatctaaattttatattggctgtgatcggtgtcagaattggtaccatgggcgctgcgttggcatcttgcaaagtgaggcagagctcattgatgagtatgtctgtccacagtgccagtcaacagaggatgccatgacagtgctcacgccactaacagagaaggattatgaggggttgaagagggtgctccgttccttacaggcccataagatggcctggcctttccttgaaccagtagaccctaatgatgcaccagattattatggtgttattaaggaacctatggaccttgccaccatggaagaaagagtacaaagacgatattatgaaaagctgacggaatttgtggcagatatgaccaaaatttttgataactgtcgttactacaatccaagtgactccccattttaccagtgtgcagaagttctcgaatcattctttgtacagaaattgaaaggcttcaaagctagcaggtctcataacaacaaactgcagtctacagcttcttaaagttcagcgtgttaacctaacataaaacacagcaagaatctggttgtctgaactattttaaattaaggagccagatgtttttagtcaggctatcctgacaagacttgacctaaacttcgtttttattggtcataacagtccaattatattcttggccaattttgtccaacggacaagaaaaaagcaaagtcaacgacaccattatcttgtcaagatcagatggttttactattgtggcagaagcgagaaaactttgtttattgaaaaaaaaagaaaaagaaagcaagaaaaaaagatactatggggtcaagtgtaactccatggaaatgccacgtctgctcttcagtgaagaagctggtttagagtctcacagaaaacttttgactgtatttatttattgttgcaaaaaagacgcttttttattgctgccctcatttgtcagctaattattttttcttataaaatccagccccggttacatataatcatctgtatcttatcatgattcctgtaggtaaaagtacaagacgacctctagatgtcttttctttctatgaaaggagctgctatgtacacatgtgcacacacacacaactgggaatcaacaatgagtttattgttcatggtagattaaaattaagcttgcataaaggttgggctaagtggtcctggactacagactctgttgccttgaatataacagtacaatttgtcaattactctgcaccaggctaaaatgagtaaaatctatttgaaggtatcttgtttgtaaacatttgtcagattctaatttttttcttttgtattaaaattcaactatggatgtatatgaaacaaaataaatggagataatttttctcccacagacagaggtgtctttgaatgtgcgctaatgattatctgtaagcctttgtggggagggaggcctgcaaggtcatgaaaggcagaagagtctaattgtgcctggatttctccaggacagcagtggcccctcgttttatcattcccagtccattgtcatcacgtcagagaaaaatcttcaggggtgctaatcctgttgcatcagttgatcatactaacgagaacggtaatgcgacaagatacacattgccttcatctgtacattctgtgataccaggcaaattaccaattacacacagctacttatattttatgaagggcattttttagatgacctcatcctctgtgttatttgttgattgggtttgttttctgtttgttggtttgtttgtttcttccacgtaaggaaaagtagtgtaaacagtagcgagaaaatggaaaccacagaggaagatgtattttgcatgtttttcctttcagtgttcttacacgttgtatcactgcattgtggtaatagcttctataaaatctgccatagttggattatgcagctttgcaaaaatttttactagattttgcactaactcatattagctttgtcctaccaacttctggaatttatctaattattgtttttcaaagtttctttccttttaatgtttccctgctatgcaaaacctttcccagacctcagtttcttaaaagaaagatgttgctacagttcccgattctttcttattacaggctcaggtgtacaggttattctgggttaattttatctaatgaagcccattcctttttgtacataaagatgtcacttaaacttatgcttacaaactaaagactaatcgctcaatatgaaaacatgaaaaaatttttgcttaaagtattaagatggaagtagttaaatatgggttattttgtccttttacttttttaaaaaatgttacatattgtatgcactgtgctgatgcaagaattctacattttaatgagttataaaattattctgcatctcatcacgtcacagtatttctgtactatttattcatatatataaatatatatgggcttaatcatttaaaatttgttgcagcaagaactttcctacctgtaggcaatagattgctatgtttttaacaaattgtggcaaattctaaacagcaattcttttgtacgtaataggacatttcatcctagaaaaataaagtaatgtttttgacattgga

SEQ ID NO: 146423 - DNA, 2469 bp, Artificial Sequence
  derived and/or modified sequence
atggccgcagaaggggaccccgagtggggccctacacctccaagtacatctgcaactacggcggcacgccgagctgtcaacaaggtggtttacgatgatcatgaaagcgaggaggaggaggaggaggaggatatggtcagcgaagaggaagaggaagaggacggcgacgctgaggagacacaggacagcgaggacgacgaggaggacgaaatggaggaggatgatgacgatagcgactaccctgaggagatggaagacgacgacgacgatgcctcatattgcaccgagtcaagcttccggtctcattccacctactcctcaacacctgggaggagaaaaccgagggttcacaggccccgtagcccaattctagaggaaaaggacatccctccactagagttccccaagtcctcagaggacctgatggtcccgaatgagcacattatgaacgtcatcgctatctacgaagtgctgcgcaatttcggaaccgtactgaggttaagcccgttcagattcgaggacttttgtgctgccctggtgagccaagaacagtgtaccctgatggctgaaatgcatgtggtgttgctgaaagctgtactgcgtgaggaggacacctccaataccactttcggtcctgccgacttgaaggacagtgtgaatagtacactatactttatcgatgggatgacttggcctgaagtgctcagagtctattgcgagtctgataaggaatatcatcacgtgctgccataccaagaagcagaagactacccctatggtcccgtcgagaacaaaattaaggtgcttcagttcctagtagaccagttcttgactactaatattgcccgagaggagctcatgtcagagggcgtgattcagtacgacgatcattgtagagtgtgccacaagctaggagatttactgtgttgtgagacttgctctgcggtctaccatctcgagtgtgttaaacctcccctggaagaggtgcccgaggacgagtggcaatgtgaggtttgtgttgcacacaaggtccccggagtcacggactgcgtggcagagatacagaaaaataagccatatatcaggcatgaaccgattggatacgatagaagtaggagaaaatactggttcctcaataggcgactgattatcgaggaagatacagagaacgaaaacgaaaaaaaaatatggtactacagcactaaagtgcagttggccgaactcattgattgcctcgataaagattattgggaagctgagctttgtaagatcctggaagagatgcgagaagagatccatcggcacatggatattactgaagatttgaccaacaaagccagaggcagcaataagtcttttctcgccgcagcgaacgaggaaatcctggaatctatcagagcaaagaaaggagacatcgacaatgttaaaagccccgaggagaccgaaaaagataagaatgaaactgagaatgattcgaaggacgccgagaagaacagggaggagtttgaagaccaatcactcgagaaagattcagatgataaaaccccagatgacgaccctgaacagggcaagagtgaagagcccactgaggtgggcgacaaaggtaattcggtttcagcaaatctaggcgacaacaccaccaacgcaacttccgaggagacctctccgagcgaaggcagaagccccgttggctgcttatccgagacccccgattcttctaacatggcagaaaagaaagttgcttccgagctgcctcaggacgtccccgaagaacccaataaaacctgtgagtcttccaatacatctgctaccaccacaagcatccagccaaatttagagaatagcaattcaagttccgagttaaactcttcacagtctgaatctgctaaggccgcagatgaccccgagaacggtgaacgagagagccatactccggtatcaatccaagaggagattgtgggcgacttcaagtctgagaagtctaacggggaactttctgagagtccaggagctggcaaaggcgcttctggtagtaccaggatcataacccgtctccgaaaccctgactccaaactgagccagctcaagtcccaacaggttgctgccgctgcacacgaggctaacaaactgttcaaagaaggtaaggaagtgcttgttgtgaatagtcagggggaaatcagtaggctttcaaccaagaaggaggtgattatgaagggaaatataaacaactacttcaagctcggacaggaggggaaatatcgtgtctaccataaccagtattccaccaactcattcgctctcaataagcatcagcatagagaggatcatgataagcgacgccatctggcccataagttctgcttgacgccagcaggggaattcaaatggaacggttccgtgcacggatcaaaggtgttgaccataagcactttaaggctcaccattacccagtatggcgagaacttatag

SEQ ID NO: 146424 - DNA, 2512 bp, Artificial Sequence
  derived and/or modified sequence
aagaaacaagatggcggctgaaggcgatccggagtggggccccaccccccccagcaccagcgccaccaccgcggcccggagggccgtcaacaaagtggtgtacgatgaccacgagagcgaggaggaggaggaagaggaggacatggtctccgaggaggaggaggaggaggacggcgacgccgaggagacccaggattctgaggacgacgaggaggatgagatggaagaggacgacgatgactccgattatccggaggagatggaagacgacgacgacgacgccagttactgcacggaaagcagcttcaggagccatagtacctacagcagcactccaggtaggcgaaaaccaagagtacatcggcctcgttctcctatattggaagaaaaagacatcccgccccttgaatttcccaagtcctctgaggatttaatggtgcctaatgagcatataatgaatgtcattgccatttacgaggtactgcggaactttggcactgttttgagattatctccttttcgctttgaggacttttgtgcagctctggtgagccaagagcagtgcacactcatggcagagatgcatgttgtgcttttgaaagcagttctgcgtgaagaagacacttccaatactacctttggacctgctgatctgaaagatagcgttaattccacactgtatttcatagatgggatgacgtggccagaggtgctgcgggtgtactgtgagagtgataaggagtaccatcacgttcttccttaccaagaggcagaggactacccatatggaccagtagagaacaagatcaaagttctacagtttctagtcgatcagtttcttacaacaaatattgctcgagaggaattgatgtctgaaggggtgatacagtatgatgaccattgtagggtttgtcacaaacttggggatttgctttgctgtgagacatgttcagcagtataccatttggaatgtgtgaagccacctcttgaggaggtgccagaggacgagtggcagtgtgaagtctgtgtagcacacaaggtgcctggtgtgactgactgtgttgctgaaatccaaaaaaataaaccatatattcgacatgaacctattggatatgatagaagtcggaggaaatactggttcttgaaccgaagactcataatagaagaagatacagaaaatgaaaatgaaaagaaaatttggtattacagcacaaaggtccaacttgcagaattaattgactgtctagacaaagattattgggaagcagaactctgcaaaattctagaagaaatgcgtgaagaaatccaccgacacatggacataactgaagacctgaccaataaggctcggggcagtaacaaatcctttctggcggcagctaatgaagaaattttggaatccataagagccaaaaagggagacattgataatgttaaaagcccagaagaaacagaaaaagacaagaatgagactgagaatgactctaaagatgctgagaaaaacagagaagaatttgaagaccagtcccttgaaaaagacagtgacgacaaaacaccagatgatgaccctgagcaaggaaaatctgaggagccaacagaagttggggataaaggtaactctgtgtcagcaaatcttggcgacaacacaacaaatgcaacttcagaagagactagtccctctgaagggaggagccctgtggggtgtctctcagaaacccccgatagcagcaacatggcagagaagaaggtggcatctgagctcccccaggatgtgccagaagaacctaacaagacatgtgagagcagtaacactagtgctaccactacctccatccagcctaatctggaaaacagtaacagcagcagtgaactaaattcttcccagagtgaatctgctaaggcagctgatgatcctgaaaatggagaaagagaatctcatacacctgtctctattcaggaagagatagtaggtgatttcaaatcggagaagtccaacggggagctaagtgaatctcctggagctggaaaaggagcatctggctcaactcgaatcatcaccagattgcggaatccagatagcaaacttagtcagctgaagagccagcaggtggcagccgctgcacatgaagcaaataaattatttaaggagggcaaagaggtactggtagttaactctcaaggagaaatttcacggttgagcaccaaaaaggaagtgatcatgaaaggaaatatcaacaattattttaaattgggtcaagaagggaagtatcgcgtctaccacaatcaatactccaccaattcatttgctttgaataagcaccagcacagagaagaccatgataagagaaggcatcttgcacataagttctgtctgactccagcaggagagttcaaatggaacggttctgtccatgggtccaaagttcttaccatatctactctgagactgactatcacccaatatggcgagaatctttaggacataccaggttacaccggatgacatcaattg

SEQ ID NO: 146425 - protein, 760 aa, Artificial Sequence
  derived and/or modified sequence
MKTWVKIVFGVATSAVLALLVMCIVLRPSRVHNSEENTMRALTLKDILNGTFSYKTFFPNWISGQEYLHQSADNNIVLYNIETGQSYTILSNRTMKSVNASNYGLSPDRQFVYLESDYSKLWRYSYTATYYIYDLSNGEFVRGNELPRPIQYLCWSPVGSKLAYVYQNNIYLKQRPGDPPFQITFNGRENKIFNGIPDWVYEEEMLATKYALWWSPNGKFLAYAEFNDTDIPVIAYSYYGDEQYPRTINIPYPKAGAKNPVVRIFIIDTTYPAYVGPQEVPVPAMIASSDYYFSWLTWVTDERVCLQWLKRVQNVSVLSICDFREDWQTWDCPKTQEHIEESRTGWAGGFFVSTPVFSYDAISYYKIFSDKDGYKHIHYIKDTVENAIQITSGKWEAINIFRVTQDSLFYSSNEFEEYPGRRNIYRISIGSYPPSKKCVTCHLRKERCQYYTASFSDYAKYYALVCYGPGIPISTLHDGRTDQEIKILEENKELENALKNIQLPKEEIKKLEVDEITLWYKMILPPQFDRSKKYPLLIQVYGGPCSQSVRSVFAVNWISYLASKEGMVIALVDGRGTAFQGDKLLYAVYRKLGVYEVEDQITAVRKFIEMGFIDEKRIAIWGWSYGGYVSSLALASGTGLFKCGIAVAPVSSWEYYASVYTERFMGLPTKDDNLEHYKNSTVMARAEYFRNVDYLLIHGTADDNVHFQNSAQIAKALVNAQVDFQAMWYSDQNHGLSGLSTNHLYTHMTHFLKQCFSLSD

SEQ ID NO: 146426 - DNA, 2283 bp, Artificial Sequence
  derived and/or modified sequence
atgaagacctgggtgaagatcgtgttcggcgtggccaccagcgccgtgctggccctgctggtgatgtgcatcgtgctgagacccagcagagtgcacaacagcgaggagaacaccatgagagccctgaccctgaaggacatcctgaacggcaccttcagctacaagaccttcttccccaactggatcagcggccaggagtacctgcaccagagcgccgacaacaacatcgtgctgtacaacatcgagaccggccagagctacaccatcctgagcaacagaaccatgaagagcgtgaacgccagcaactacggcctgagccccgacagacagttcgtgtacctggagagcgactacagcaagctgtggagatacagctacaccgccacctactacatctacgacctgagcaacggcgagttcgtgagaggcaacgagctgcccagacccatccagtacctgtgctggagccccgtgggcagcaagctggcctacgtgtaccagaacaacatctacctgaagcagagacccggcgacccccccttccagatcaccttcaacggcagagagaacaagatcttcaacggcatccccgactgggtgtacgaggaggagatgctggccaccaagtacgccctgtggtggagccccaacggcaagttcctggcctacgccgagttcaacgacaccgacatccccgtgatcgcctacagctactacggcgacgagcagtaccccagaaccatcaacatcccctaccccaaggccggcgccaagaaccccgtggtgagaatcttcatcatcgacaccacctaccccgcctacgtgggcccccaggaggtgcccgtgcccgccatgatcgccagcagcgactactacttcagctggctgacctgggtgaccgacgagagagtgtgcctgcagtggctgaagagagtgcagaacgtgagcgtgctgagcatctgcgacttcagagaggactggcagacctgggactgccccaagacccaggagcacatcgaggagagcagaaccggctgggccggcggcttcttcgtgagcacccccgtgttcagctacgacgccatcagctactacaagatcttcagcgacaaggacggctacaagcacatccactacatcaaggacaccgtggagaacgccatccagatcaccagcggcaagtgggaggccatcaacatcttcagagtgacccaggacagcctgttctacagcagcaacgagttcgaggagtaccccggcagaagaaacatctacagaatcagcatcggcagctacccccccagcaagaagtgcgtgacctgccacctgagaaaggagagatgccagtactacaccgccagcttcagcgactacgccaagtactacgccctggtgtgctacggccccggcatccccatcagcaccctgcacgacggcagaaccgaccaggagatcaagatcctggaggagaacaaggagctggagaacgccctgaagaacatccagctgcccaaggaggagatcaagaagctggaggtggacgagatcaccctgtggtacaagatgatcctgcccccccagttcgacagaagcaagaagtaccccctgctgatccaggtgtacggcggcccctgcagccagagcgtgagaagcgtgttcgccgtgaactggatcagctacctggccagcaaggagggcatggtgatcgccctggtggacggcagaggcaccgccttccagggcgacaagctgctgtacgccgtgtacagaaagctgggcgtgtacgaggtggaggaccagatcaccgccgtgagaaagttcatcgagatgggcttcatcgacgagaagagaatcgccatctggggctggagctacggcggctacgtgagcagcctggccctggccagcggcaccggcctgttcaagtgcggcatcgccgtggcccccgtgagcagctgggagtactacgccagcgtgtacaccgagagattcatgggcctgcccaccaaggacgacaacctggagcactacaagaacagcaccgtgatggccagagccgagtacttcagaaacgtggactacctgctgatccacggcaccgccgacgacaacgtgcacttccagaacagcgcccagatcgccaaggccctggtgaacgcccaggtggacttccaggccatgtggtacagcgaccagaaccacggcctgagcggcctgagcaccaaccacctgtacacccacatgacccacttcctgaagcagtgcttcagcctgagcgactag

SEQ ID NO: 146427 - DNA, 2283 bp, Artificial Sequence
  derived and/or modified sequence
atgaagacatgggtcaagatcgtgtttggcgtggcaacaagcgcggttctggcgcttctcgtgatgtgcatcgtgctgcgtccctcccgggtgcacaattcagaagaaaacaccatgcgtgctttgacattaaaggatattctgaatgggactttcagctacaaaaccttttttcctaactggatctccggacaggaatatctacaccagtctgctgacaataatatcgttctgtataatatagagactggtcagagctacactatactctcaaacaggacaatgaagtctgttaatgcctctaattacgggctcagtccagatagacaattcgtgtacttagaatccgactacagtaaattgtggagatatagctatacggccacttattacatctatgatctgagtaacggcgaatttgttcgcgggaatgagttgccgcgtccaatacagtatctgtgttggtctcctgttggttcaaaactcgcctacgtataccagaacaacatctatctcaaacagcgcccaggcgacccccccttccagattaccttcaatggacgcgagaataaaatttttaacgggattcctgactgggtgtacgaggaagaaatgctcgctactaagtatgcgctgtggtggagccccaacgggaagtttctcgcatacgctgagttcaatgacacagacatcccagtgattgcatactcctattacggcgacgaacagtaccctcggaccattaacataccctatccgaaggctggggcgaagaaccccgtggtgcggatctttatcattgataccacctaccccgcctacgtgggtcctcaggaagtgccggtgccagcgatgatcgcatcgtctgattattacttcagctggttgacatgggtcacggacgaaagagtgtgcttacagtggttgaagagagttcagaatgtatccgtgctttccatctgcgacttcagggaagactggcagacatgggattgcccaaaaacccaggagcacattgaagagtcgaggacaggctgggcaggcggattctttgtttccacgcccgtgttttcgtacgacgccatcagctactataagatattcagcgacaaagatgggtacaagcacattcattacattaaagacacagtggagaatgcaattcagattacgtctgggaagtgggaggctattaacatcttcagggtcactcaagattcactcttctatagttccaatgagttcgaggagtatcccggtcgccgcaacatttataggatctcaataggaagttatcccccgagcaagaagtgtgtcacatgtcacctaaggaaggaacggtgtcagtattacacagcttcgttctcagactacgccaagtattacgccctggtgtgttacggccccggaattcccatatcgactctgcatgacgggaggaccgaccaggagatcaaaattttggaagagaacaaggagctcgaaaacgcactgaagaatattcagctgcccaaggaagagatcaaaaagcttgaagttgacgaaatcacactttggtacaagatgatcttacctccccagttcgaccggagcaaaaagtatccacttctgatccaagtgtatgggggcccatgttctcagagtgtgcgatcagtgttcgccgtgaattggatcagttacttggcgtctaaggaaggaatggtcattgctcttgtcgatggccgtggaacagcatttcagggcgataagctcctttatgcagtttacaggaaattaggggtttacgaagttgaggaccagattacggcagtgagaaaatttatcgagatgggtttcatcgatgagaagagaatagccatatggggatggtcttacggtgggtacgttagttctctcgcccttgcgtctggcactggactgttcaagtgtggcattgccgtggcccccgtcagctcctgggaatactatgccagtgtgtatacagaacgcttcatgggcctgcccaccaaggacgacaatctggaacattataaaaattcgaccgtaatggcacgcgccgaatatttcagaaacgtagactacctacttatccacggcaccgctgacgacaatgtacactttcagaactccgctcaaatcgccaaggccctggtcaacgcacaggttgactttcaagcgatgtggtacagtgatcaaaaccacggactgagcggcctcagtactaatcacctttacacgcacatgacgcactttttgaaacagtgttttagcctaagcgattag

SEQ ID NO: 146428 - DNA, 2780 bp, Artificial Sequence
  derived and/or modified sequence
aagaacgcccccaaaatctgtttctaattttacagaaatcttttgaaacttggcacggtattcaaaagtccgtggaaagaaaaaaaccttgtcctggcttcagcttccaactacaaagacagacttggtccttttcaacggttttcacagatccagtgacccacgctctgaagacagaattagctaactttcaaaaacatctggaaaaatgaagacttgggtaaaaatcgtatttggagttgccacctctgctgtgcttgccttattggtgatgtgcattgtcttacgcccttcaagagttcataactctgaagaaaatacaatgagagcactcacactgaaggatattttaaatggaacattttcttataaaacattttttccaaactggatttcaggacaagaatatcttcatcaatctgcagataacaatatagtactttataatattgaaacaggacaatcatataccattttgagtaatagaaccatgaaaagtgtgaatgcttcaaattacggcttatcacctgatcggcaatttgtatatctagaaagtgattattcaaagctttggagatactcttacacagcaacatattacatctatgaccttagcaatggagaatttgtaagaggaaatgagcttcctcgtccaattcagtatttatgctggtcgcctgttgggagtaaattagcatatgtctatcaaaacaatatctatttgaaacaaagaccaggagatccaccttttcaaataacatttaatggaagagaaaataaaatatttaatggaatcccagactgggtttatgaagaggaaatgcttgctacaaaatatgctctctggtggtctcctaatggaaaatttttggcatatgcggaatttaatgatacggatataccagttattgcctattcctattatggcgatgaacaatatcctagaacaataaatattccatacccaaaggctggagctaagaatcccgttgttcggatatttattatcgataccacttaccctgcgtatgtaggtccccaggaagtgcctgttccagcaatgatagcctcaagtgattattatttcagttggctcacgtgggttactgatgaacgagtatgtttgcagtggctaaaaagagtccagaatgtttcggtcctgtctatatgtgacttcagggaagactggcagacatgggattgtccaaagacccaggagcatatagaagaaagcagaactggatgggctggtggattctttgtttcaacaccagttttcagctatgatgccatttcgtactacaaaatatttagtgacaaggatggctacaaacatattcactatatcaaagacactgtggaaaatgctattcaaattacaagtggcaagtgggaggccataaatatattcagagtaacacaggattcactgttttattctagcaatgaatttgaagaataccctggaagaagaaacatctacagaattagcattggaagctatcctccaagcaagaagtgtgttacttgccatctaaggaaagaaaggtgccaatattacacagcaagtttcagcgactacgccaagtactatgcacttgtctgctacggcccaggcatccccatttccacccttcatgatggacgcactgatcaagaaattaaaatcctggaagaaaacaaggaattggaaaatgctttgaaaaatatccagctgcctaaagaggaaattaagaaacttgaagtagatgaaattactttatggtacaagatgattcttcctcctcaatttgacagatcaaagaagtatcccttgctaattcaagtgtatggtggtccctgcagtcagagtgtaaggtctgtatttgctgttaattggatatcttatcttgcaagtaaggaagggatggtcattgccttggtggatggtcgaggaacagctttccaaggtgacaaactcctctatgcagtgtatcgaaagctgggtgtttatgaagttgaagaccagattacagctgtcagaaaattcatagaaatgggtttcattgatgaaaaaagaatagccatatggggctggtcctatggaggatacgtttcatcactggcccttgcatctggaactggtcttttcaaatgtggtatagcagtggctccagtctccagctgggaatattacgcgtctgtctacacagagagattcatgggtctcccaacaaaggatgataatcttgagcactataagaattcaactgtgatggcaagagcagaatatttcagaaatgtagactatcttctcatccacggaacagcagatgataatgtgcactttcaaaactcagcacagattgctaaagctctggttaatgcacaagtggatttccaggcaatgtggtactctgaccagaaccacggcttatccggcctgtccacgaaccacttatacacccacatgacccacttcctaaagcagtgtttctctttgtcagactaaaaacgatgcagatgcaagcctgtatcagaatctgaaaaccttatataaacccctcagacagtttgcttattttattttttatgttgtaaaatgctagtataaacaaacaaattaatgttgttctaaaggctgttaaaaaaaagatgaggactcagaagttcaagctaaatattgtttacattttctggtactctgtgaaagaagagaaaagggagtcatgcattttgctttggacacagtgttttatcacctgttcatttgaagaaaaataataaagtcagaagttcaa

SEQ ID NO: 146429 - DNA, 2283 bp, Artificial Sequence
  derived and/or modified sequence
atgaagacctgggtgaagatcgtgtttggagtggccaccagcgctgtgctggccctgctggtgatgtgcatcgtgctgcggcccagccgggtgcacaacagcgaggagaacaccatgagggccctgaccctgaaggacatcctgaatggcaccttctcctacaagaccttcttccccaactggatcagcggccaggagtacctgcaccagagcgctgacaacaacatcgtgctgtacaacattgaaacaggccagagctacaccatcctgagcaacagaaccatgaagtctgtgaatgccagcaactacggcctgagcccagaccggcagtttgtgtacctggagagtgactacagcaagctgtggagatacagctacacagccacctactacatctatgacctgagcaatggagaatttgtgagaggaaatgagctgccccggcccatccagtacctgtgctggagccctgtgggcagcaagctggcctacgtgtaccagaacaacatctacctgaagcagaggcctggggacccccccttccagatcaccttcaacggccgggagaacaagatcttcaacggcatcccagactgggtgtatgaggaggagatgctggccaccaagtatgccctgtggtggagccccaacgggaagttcctggcctatgcagagttcaatgacacagacatccctgtgattgcctacagctactatggagatgagcagtaccccaggaccatcaacatcccctaccccaaggccggggccaagaaccctgtggtgcgcatcttcatcatcgacaccacctacccagcctacgtgggcccccaggaggtgcctgtgcctgccatgattgccagcagtgactactacttctcctggctgacctgggtgacagatgagcgggtgtgcctgcagtggctgaagagggtgcagaatgtgtctgtgctgagcatctgtgacttccgggaggactggcagacctgggactgccccaagacccaggagcacatcgaggagagcaggacaggctgggccggcggcttctttgtgtccacccctgtgttctcctatgatgccatctcctactacaagatcttcagtgacaaggatggctacaagcacatccactacatcaaggacacagtggagaatgccatccagatcaccagcggcaagtgggaggccatcaacatcttccgggtgacccaggacagcctcttctacagcagcaatgaatttgaggagtacccaggaagaagaaacatctaccgcatcagcatcggcagctacccacccagcaagaagtgtgtgacctgccacctgaggaaggagcgctgccagtactacacagccagcttcagtgactatgccaagtactatgccctggtgtgctacggccctggcatccccatcagcaccctgcatgatggccgcacagaccaggagatcaagatcctggaggagaacaaggagctggagaatgccctgaagaacatccagctgcccaaggaggagatcaagaagctggaggtggatgagatcaccctgtggtacaagatgatcctgcccccccagtttgacaggagcaagaagtaccccctgctgatccaggtgtatggaggcccctgcagccagagcgtgcgctctgtgtttgctgtgaactggatctcctacctggccagcaaggagggcatggtgattgccctggtggatggccggggcacagccttccagggcgacaagctgctgtatgctgtgtacaggaagctgggcgtgtatgaggtggaggaccagatcacagctgtgaggaagttcatcgagatgggcttcattgatgagaagagaattgccatctggggctggagctatggaggctacgtgagcagcctggccctggccagcggcaccggcctcttcaagtgtggcattgctgtggcccctgtgtcctcctgggagtactatgcctctgtgtacacagagcgcttcatgggcctgcccaccaaggatgacaacctggagcactacaagaacagcacagtgatggcccgggcagagtacttcagaaatgtggactacctgctgatccacggcacagcagatgacaacgtgcacttccagaacagcgcccagatcgccaaggccctggtgaatgcccaggtggacttccaggccatgtggtacagcgaccagaaccacggcctgagcggcctgagcaccaaccacctgtacacccacatgacccacttcctgaagcagtgcttcagcctgagtgactag

SEQ ID NO: 146430 - DNA, 2283 bp, Artificial Sequence
  derived and/or modified sequence
atgaagacctgggtgaagatcgtgttcggcgtggccaccagcgccgtgttggctcttctcgtcatgtgtatcgtacttaggcctagccgtgttcataactcggaggagaatactatgagggctttaactctgaaagatatcctcaacggaacgttttcctataagacgtttttccctaactggattagcgggcaggagtatctgcaccagagcgcagataataacattgtattgtacaacatagagactggacagagctatacaatcttgtccaacaggactatgaaatcagtaaacgcaagcaactatggactttcccctgataggcagtttgtctatctcgaatcggattattctaagctatggcggtacagctatactgctacctattacatttacgatttatctaatggggagttcgttaggggaaacgagctccctcggcctattcagtatctctgttggtcacctgtggggagcaaattagcctacgtttatcagaataatatataccttaaacaacgaccaggggacccaccctttcagatcacatttaacggccgagaaaataaaatctttaacgggatccctgactgggtctatgaagaggagatgctagccactaagtatgcactatggtggagtcccaacggtaagttcctggcctatgccgagtttaatgataccgatatccccgtgatcgcctactcctactacggagatgaacagtaccccaggacaataaatattccctatcctaaggctggggccaagaatccagtcgttcgtatttttattatcgacaccacatatcccgcctacgtggggccccaggaggtgcccgtgcccgcgatgatagcttcatccgactattacttttcctggttaacttgggtgaccgacgagagggtgtgcctgcagtggctgaagcgagtccagaatgtgagcgtgcttagcatttgcgacttcagagaagactggcagacgtgggactgcccaaaaacccaggaacatatagaggaatcaagaaccggctgggcagggggatttttcgttagtaccccagttttctcttacgacgcaatcagctactacaagattttttccgacaaggatggatacaagcatattcattatattaaagacacggttgaaaacgccatccaaataacgtctggcaaatgggaggctatcaatattttcagggtcacacaggactctttgttttattccagcaatgagttcgaggagtaccctgggcgccggaacatctatagaatatcaatcggaagctacccccccagcaagaagtgcgtgacttgtcacctgcggaaagagcgctgccaatactataccgcttccttcagtgactatgccaagtactatgctttagtgtgctacgggccaggtattccgatctccacattgcatgatgggcggacggaccaggagatcaagattttagaggagaataaagagcttgaaaatgctctgaagaatatccagttgcctaaggaggagataaaaaaattagaggtggatgagatcacattgtggtataagatgatcttaccaccccaatttgatcgctccaaaaaatatccactgcttatccaggtctacggaggtccctgtagtcaaagcgtgcgatccgtattcgcagtcaattggatcagctatctggcctctaaagaagggatggtaatagcattggttgacggcagaggcacagcctttcagggcgacaagcttctttacgctgtgtaccggaagctgggcgtgtatgaggttgaggaccaaattacagcagtgcgcaaatttattgagatggggtttattgacgaaaagcggatcgcaatatggggctggtcctacggcggatatgtgtcctccctggccctggctagcggcactggcttatttaaatgcgggatagccgtggcccccgtaagttcgtgggagtattacgcctcagtgtacacagagagattcatgggcctccccactaaggacgacaacctagagcattataagaattctactgtgatggcccgcgccgagtatttcaggaatgtggattacctactcatccatggcaccgcagacgataatgtccacttccagaactccgcccagattgcaaaagcgctggtcaacgcccaggtggattttcaggccatgtggtactccgatcagaatcacgggctctcaggactctccaccaaccatctttacactcacatgacccactttttgaagcaatgtttctccctgtctgactag

SEQ ID NO: 146431 - DNA, 2283 bp, Artificial Sequence
  derived and/or modified sequence
atgaaaacttgggtgaagatagtatttggtgttgcaaccagcgcagtgctggctctgctcgtgatgtgcatcgtgctgagacccagccgagtgcataactccgaggaaaacacaatgagggccctcacattgaaggacattctgaatgggacctttagttataagacttttttccccaactggatttcgggtcaggagtacctacatcagagtgccgataataacatcgtgctttacaacatcgagacgggtcagagttacaccatcttgtccaacaggaccatgaaatcagtcaacgctagcaactatggcctctcgccggacaggcagtttgtgtacctcgagtctgactactcaaaactctggcggtacagctatacagccacctattacatttacgacttgtctaacggtgaattcgtaaggggcaacgagctgccacggcctattcagtacctgtgctggagtcctgttgggtccaagttggcttacgtttaccagaataacatttacctgaagcagagacctggagacccaccttttcaaattacattcaatgggagagaaaataaaattttcaatgggatccccgactgggtctacgaagaagagatgctcgcgacaaaatatgccctgtggtggtctccgaacggaaagtttctcgcgtacgccgagttcaacgatactgacatccctgttatcgcctatagttactatggagacgagcaatatcctaggacaattaacatcccttatccaaaagccggagcgaagaacccggtcgtgcgcatcttcatcatagataccacctacccggcttacgtgggaccacaggaggtccccgtccctgctatgatcgcctcttccgattactacttttcctggctaacatgggtgacagacgaaagggtgtgtttacagtggctcaagagggttcagaatgtctccgtcttatcaatttgcgacttcagggaagattggcaaacctgggattgtcccaagacccaggaacatattgaagagtcccgcactggatgggccggagggttcttcgtctctacccctgtcttcagttacgacgctatctcttactataagatcttctctgacaaggacggctataaacatattcactatataaaggacactgtcgagaacgctatccaaattacaagtgggaaatgggaggcaatcaatatcttcagggtgacacaggactctttattctactcctcaaatgaattcgaagagtaccccggacgaagaaatatctatcgcatttcaattggctcttaccccccatcaaaaaaatgcgtgacctgccacctgaggaaagaacgatgtcaatattatacagcttccttttcagattatgcgaagtactatgctctggtctgttatggaccaggcatccccatctccacactgcatgacgggcgtacagaccaggaaattaagatcttggaagagaacaaggagttagaaaacgctcttaaaaacatccagctgcccaaagaggagataaagaaactagaggttgacgagattacactgtggtacaagatgattctgcctcctcagtttgacagaagtaagaagtaccccctgcttatccaggtctacggtggcccatgtagccagagcgtgcgcagcgtctttgccgtgaactggatctcttaccttgcctccaaggaaggaatggtaatagccttagttgatggtcgcggtactgcttttcagggagacaagctgctttacgccgtgtatcgcaagcttggggtgtatgaggtcgaggaccagatcactgcagttcgtaaattcattgaaatgggcttcatcgacgagaagcgcatcgccatttggggatggtcatatggaggctatgtgagcagcctagctctcgcctctggtactgggctcttcaaatgcggcattgcagtagcgcctgtatcctcctgggagtattatgctagcgtgtataccgagagatttatgggattgcctaccaaagatgacaatttggagcattataaaaactccacagtaatggccagagccgagtacttcaggaacgtcgattatctgctgattcacggcactgcggatgacaatgtgcactttcagaactccgcgcagatcgccaaagccctggttaatgcccaagtcgactttcaggccatgtggtactccgaccagaatcatgggctgtccggcctttcgactaatcacctgtacacccacatgacacactttttgaagcagtgtttcagcttaagcgactag

SEQ ID NO: 146432 - protein, 508 aa, Artificial Sequence
  derived and/or modified sequence
MADGQVAELLLRRLEASDGGLDSAELAAELGMEHQAVVGAVKSLQALGEVIEAELRSTKHWELTAEGEEIAREGSHEARVFRSIPPEGLAQSELMRLPSGKVGFSKAMSNKWIRVDKSAADGPRVFRVVDSMEDEVQRRLQLVRGGQAEKLGEKERSELRKRKLLAEVTLKTYWVSKGSAFSTSISKQETELSPEMISSGSWRDRPFKPYNFLAHGVLPDSGHLHPLLKVRSQFRQIFLEMGFTEMPTDNFIESSFWNFDALFQPQQHPARDQHDTFFLRDPAEALQLPMDYVQRVKRTHSQGGYGSQGYKYNWKLDEARKNLLRTHTTSASARALYRLAQKKPFTPVKYFSIDRVFRNETLDATHLAEFHQIEGVVADHGLTLGHLMGVLREFFTKLGITQLRFKPAYNPYTEPSMEVFSYHQGLKKWVEVGNSGVFRPEMLLPMGLPENVSVIAWGLSLERPTMIKYGINNIRELVGHKVNLQMVYDSPLCRLDAEPRPPPTQEAA

SEQ ID NO: 146433 - protein, 477 aa, Artificial Sequence
  derived and/or modified sequence
MADGQVAELLLRRLEASDGGLDSAELAAELGMEHQAVVGAVKSLQALGEVIEAELRSTKHWELTAEGEEIAREGSHEARVFRSIPPEGLAQSELMRLPSGKVGFSKAMSNKWIRVDKSAADGPRVFRVVDSMEDEVQRRLQLVRGGQAEKLGEKERSELRKRKLLAEVGSWRDRPFKPYNFLAHGVLPDSGHLHPLLKVRSQFRQIFLEMGFTEMPTDNFIESSFWNFDALFQPQQHPARDQHDTFFLRDPAEALQLPMDYVQRVKRTHSQGGYGSQGYKYNWKLDEARKNLLRTHTTSASARALYRLAQKKPFTPVKYFSIDRVFRNETLDATHLAEFHQIEGVVADHGLTLGHLMGVLREFFTKLGITQLRFKPAYNPYTEPSMEVFSYHQGLKKWVEVGNSGVFRPEMLLPMGLPENVSVIAWGLSLERPTMIKYGINNIRELVGHKVNLQMVYDSPLCRLDAEPRPPPTQEAA

SEQ ID NO: 146434 - DNA, 1434 bp, Artificial Sequence
  derived and/or modified sequence
atggccgacggccaggtggccgagctgctgctgagaagactggaggccagcgacggcggcctggacagcgccgagctggccgccgagctgggcatggagcaccaggccgtggtgggcgccgtgaagagcctgcaggccctgggcgaggtgatcgaggccgagctgagaagcaccaagcactgggagctgaccgccgagggcgaggagatcgccagagagggcagccacgaggccagagtgttcagaagcatcccccccgagggcctggcccagagcgagctgatgagactgcccagcggcaaggtgggcttcagcaaggccatgagcaacaagtggatcagagtggacaagagcgccgccgacggccccagagtgttcagagtggtggacagcatggaggacgaggtgcagagaagactgcagctggtgagaggcggccaggccgagaagctgggcgagaaggagagaagcgagctgagaaagagaaagctgctggccgaggtgggcagctggagagacagacccttcaagccctacaacttcctggcccacggcgtgctgcccgacagcggccacctgcaccccctgctgaaggtgagaagccagttcagacagatcttcctggagatgggcttcaccgagatgcccaccgacaacttcatcgagagcagcttctggaacttcgacgccctgttccagccccagcagcaccccgccagagaccagcacgacaccttcttcctgagagaccccgccgaggccctgcagctgcccatggactacgtgcagagagtgaagagaacccacagccagggcggctacggcagccagggctacaagtacaactggaagctggacgaggccagaaagaacctgctgagaacccacaccaccagcgccagcgccagagccctgtacagactggcccagaagaagcccttcacccccgtgaagtacttcagcatcgacagagtgttcagaaacgagaccctggacgccacccacctggccgagttccaccagatcgagggcgtggtggccgaccacggcctgaccctgggccacctgatgggcgtgctgagagagttcttcaccaagctgggcatcacccagctgagattcaagcccgcctacaacccctacaccgagcccagcatggaggtgttcagctaccaccagggcctgaagaagtgggtggaggtgggcaacagcggcgtgttcagacccgagatgctgctgcccatgggcctgcccgagaacgtgagcgtgatcgcctggggcctgagcctggagagacccaccatgatcaagtacggcatcaacaacatcagagagctggtgggccacaaggtgaacctgcagatggtgtacgacagccccctgtgcagactggacgccgagcccagacccccccccacccaggaggccgcctag

SEQ ID NO: 146435 - DNA, 1527 bp, Artificial Sequence
  derived and/or modified sequence
atggcagacgggcaggtcgcggagctcctattgagacgactggaagccagtgacggcggcttggatagtgccgaacttgcggctgaactgggcatggagcaccaagcagtagtcggcgctgtgaaaagtttgcaagctcttggggaggttattgaagcagaacttcggtccacaaaacattgggagttaaccgccgaaggggaggagatcgcacgtgagggcagtcatgaggcccgcgtgttcagatcgatccccccggaaggcctagctcaaagtgagctgatgagactgcccagcgggaaagtgggattctccaaggcaatgtcaaacaaatggatccgtgttgataagtccgctgccgatgggccccgggtgtttagggttgttgactccatggaagacgaggtgcaaaggcggcttcagctcgtgagaggtggacaagcagagaaacttggagaaaaagaacggtctgaactccgtaagagaaaattacttgccgaagttactcttaagacctactgggtcagcaagggaagcgccttcagtaccagcattagcaagcaagaaaccgagctgagtcctgaaatgattagctctggctcatggagagatagaccctttaaaccctataatttcttggcacacggagtcctgcctgacagtggacacctccaccccctcctgaaagtgaggagtcagttcaggcagatatttttggagatggggtttactgagatgccaacagacaactttatcgaatcctcgttttggaattttgacgccctcttccaaccacagcagcatcctgccagagatcagcacgatactttttttctgcgagaccctgccgaagccttgcagctgccaatggactatgtgcaacgcgtgaagaggacccatagccagggggggtacggcagtcaaggttacaagtacaactggaagctggatgaagcccgcaagaatttgctccggacccacactactagtgctagcgcccgcgccttatacagattggctcaaaagaagcctttcacaccggtaaagtacttctcgattgatagggtgttcagaaatgaaaccctagacgccacacacctagctgagttccatcagatcgagggagttgtggctgaccacggcctgacactggggcacctgatgggcgtactgagagaattcttcaccaagctgggtatcacacagctcaggtttaagccagcatataacccctacacggagccttccatggaggtcttttcctatcatcagggtttaaagaaatgggttgaagtcggaaactccggagtgttccgacctgagatgctgttacccatgggcctgcccgagaacgtaagcgtcatcgcttggggcttatcactggagagacctaccatgattaagtatggaatcaacaacatccgtgagctggtcggtcataaggttaacttgcagatggtctacgattctcctctgtgtaggctggatgccgagccccggcccccccccactcaagaagcagcatag

SEQ ID NO: 146436 - DNA, 1434 bp, Artificial Sequence
  derived and/or modified sequence
atggctgacggccaggtcgccgagttgttactccgtagattggaggcgtctgacggcggtctggattctgcagagctcgctgcagaactcggaatggagcatcaggccgtcgtcggagctgttaagtcacttcaggctttgggggaagtgatagaagctgagcttagatccacaaagcactgggaactcaccgccgagggtgaggaaatcgctcgggaggggtctcacgaggccagagtgttccggtccatccctccagagggcctcgcccaatctgagctcatgaggctacccagcggaaaggtcggattctctaaagccatgtctaacaagtggatccgtgtcgataagtctgcggccgatggcccgcgagtgttcagggtagtcgatagcatggaagacgaggtacaaagaagactccagctcgtgcggggcggacaggccgaaaaattaggggagaaggagcgttccgagttaaggaaaaggaagcttctcgccgaagtcgggagctggcgtgataggccgttcaaaccctacaacttcttagcacacggggtgttgccagactcaggccacctgcatcctcttttaaaggtccgctcccagttccgtcagatttttcttgagatggggtttaccgagatgcccactgacaattttattgagagcagtttctggaatttcgatgcattgtttcagccccaacagcaccccgcaagggatcagcatgatactttctttttgcgtgaccccgccgaggctctgcaactgcctatggattatgtgcagcgggtgaaacggactcattcgcaagggggctacggctctcagggctataaatataattggaaattagacgaagcccgtaagaacctgctacgcactcatactacttcagcttctgctcgagcactgtacaggctggctcagaaaaagccttttacacccgtgaaatacttctcaatcgacagagtcttccgtaacgaaacactcgacgccacacatctggccgagtttcaccagattgaaggagtggtcgccgatcacggactcactttgggccacctgatgggcgttcttcgagaattctttaccaaactcggtattacccagttgcggtttaagcccgcctacaatccttacacagaaccaagcatggaggttttttcctaccaccaggggctgaagaagtgggtggaagtgggaaattcaggtgtttttcgacctgagatgttacttcccatgggactccccgagaatgtgtccgtgatcgcgtggggcctctctttggagcgccctaccatgattaagtatggcataaacaatatcagggagctcgttggccacaaggtgaaccttcagatggtgtacgactcccccctctgcaggctggacgcggagccccggccacctcctacacaggaagcggcctag

SEQ ID NO: 146437 - DNA, 1527 bp, Artificial Sequence
  derived and/or modified sequence
atggctgatggccaggtggccgagctgctgctgcggcggctggaggccagtgatggcggcctggacagcgctgagctggccgctgagctgggcatggagcaccaggccgtggtgggcgctgtgaagagcctgcaggccctgggggaggtgattgaagctgagctgcggagcaccaagcactgggagctgacagctgagggggaggagatcgcccgggagggcagccatgaggcccgggtcttccgcagcatccccccagagggcctggcccagagcgagctgatgaggctgcccagcggcaaggtgggcttcagcaaggccatgagcaacaagtggatccgggtggacaagtctgctgctgatggccccagggtcttccgggtggtggacagcatggaggatgaggtgcagaggcggctgcagctggtgcggggcggccaggccgagaagctgggggagaaggagaggtctgagctgaggaagaggaagctgctggccgaggtgaccctgaagacctactgggtgtccaaaggaagtgccttcagcaccagcatcagcaagcaggagacagagctgagccctgagatgatcagcagcggctcctggagggaccggcccttcaagccctacaacttcctggcccatggagtgctgcctgattctggccacctgcaccccctgctgaaggtgcgcagccagttccggcagatcttcctggagatgggcttcacagagatgcccacagacaacttcatcgagagcagcttctggaactttgatgccctcttccagccccagcagcacccagcccgggaccagcacgacaccttcttcctgcgggaccctgctgaggccctgcagctgcccatggactatgtgcagagggtgaagaggacccacagccagggcggctacggcagccagggctacaagtacaactggaagctggatgaggccaggaagaacctgctgcggacccacaccaccagcgccagcgcccgggccctgtaccgcctggcccagaagaagcccttcacccctgtgaagtacttcagcattgacagagtcttcagaaatgagaccctggatgccacccacctggccgagttccaccagattgaaggagtggtggccgaccacggcctgaccctgggccacctgatgggcgtgctgcgggagttcttcaccaagctgggcatcacccagctgcgcttcaagccagcctacaacccctacacagagcccagcatggaggtgttctcctaccaccagggcctgaagaagtgggtggaggtgggcaacagcggggtcttccggcctgagatgctgctgcccatgggcctgcctgaaaatgtgtctgtgattgcctggggcctgagcctggagcggcccaccatgatcaagtatggcatcaacaacatccgggagctggtgggccacaaggtgaacctgcagatggtgtatgacagccccctgtgccgcctggatgctgagccccggcccccacccacccaggaggccgcctag

SEQ ID NO: 146438 - DNA, 1434 bp, Artificial Sequence
  derived and/or modified sequence
atggctgatggccaggtggccgagctgctgctgcggcggctggaggccagtgatggcggcctggacagcgctgagctggccgctgagctgggcatggagcaccaggccgtggtgggcgctgtgaagagcctgcaggccctgggggaggtgattgaagctgagctgcggagcaccaagcactgggagctgacagctgagggggaggagatcgcccgggagggcagccatgaggcccgggtcttccgcagcatccccccagagggcctggcccagagcgagctgatgaggctgcccagcggcaaggtgggcttcagcaaggccatgagcaacaagtggatccgggtggacaagtctgctgctgatggccccagggtcttccgggtggtggacagcatggaggatgaggtgcagaggcggctgcagctggtgcggggcggccaggccgagaagctgggggagaaggagaggtctgagctgaggaagaggaagctgctggccgaggtgggctcctggagggaccggcccttcaagccctacaacttcctggcccacggcgtgctgcctgacagcggccacctgcaccccctgctgaaggtgcgcagccagttccggcagatcttcctggagatgggcttcacagagatgcccacagacaacttcatcgagagcagcttctggaactttgatgccctcttccagccccagcagcacccagcccgggaccagcacgacaccttcttcctgcgggaccctgctgaggccctgcagctgcccatggactatgtgcagagggtgaagaggacccacagccagggcggctacggcagccagggctacaagtacaactggaagctggatgaggccaggaagaacctgctgcggacccacaccaccagcgccagcgcccgggccctgtaccgcctggcccagaagaagcccttcacccctgtgaagtacttcagcattgacagagtcttcagaaatgagaccctggatgccacccacctggccgagttccaccagatcgagggcgtggtggccgaccacggcctgaccctgggccacctgatgggcgtgctgcgggagttcttcaccaagctgggcatcacccagctgcgcttcaagccagcctacaacccctacacagagcccagcatggaggtgttctcctaccaccagggcctgaagaagtgggtggaggtgggcaacagcggggtcttccggcctgagatgctgctgcccatgggcctgcctgaaaatgtgtctgtcatcgcctggggcctgagcctggagcggcccaccatgatcaagtatggcatcaacaacatccgggagctggtgggccacaaggtgaacctgcagatggtgtatgacagccccctgtgccgcctggatgctgagccccggcccccacccacccaggaggccgcctag

SEQ ID NO: 146439 - DNA, 1527 bp, Artificial Sequence
  derived and/or modified sequence
atggccgacggccaggtggccgagctgctgctgcggcggctggaggcttccgacggtggactcgattccgccgagttagctgctgaactgggtatggagcaccaggcggttgttggggcagtcaaatcgctgcaggctctgggcgaggtgatcgaagccgagctacgctctacaaaacattgggaacttacagccgagggcgaggaaatcgctagggagggctcgcatgaggcacgtgtattccgttccattccccccgagggactggcgcagtcggagctgatgaggttaccttctggcaaagttggattttccaaagcaatgtcaaataagtggatacgggtggacaagagcgctgcagacggcccacgcgtgtttagagttgtcgactcaatggaggatgaggtccagcgaaggctccagctcgtgagggggggccaggccgaaaagcttggagagaaggagagatctgagctccgtaaacggaaactgcttgcagaagttaccttgaagacatactgggtgtcaaaaggatccgcatttagtacctccatcagcaagcaggagactgaactgtccccggagatgatctctagcggctcctggagggatcggccctttaagccctataactttttagcccacggagtactgccagactcagggcatctccatcccctgttgaaggtgagaagccagtttcgccaaatcttcctggaaatggggtttacagaaatgcctacggataacttcatagagagttctttctggaacttcgacgccttatttcagcctcagcagcacccagcaagagatcagcacgacaccttttttctgagagatccagcagaggctctccagctcccaatggactacgtgcaacgcgtgaagaggactcattctcagggcggttacgggagtcaaggttacaagtataattggaagctcgatgaggcacgcaagaatctcctccggacccataccaccagcgcgagtgccagggccctttacagactggcacagaaaaaaccctttacccccgtgaagtactttagtatcgaccgggtctttaggaatgagactctggatgctacgcacctggctgaatttcaccagatcgagggggtcgtggcggaccacgggttgacactaggtcatcttatgggcgttcttagagaatttttcactaaactggggattacacaactacggtttaagccagcctacaatccttataccgagccttccatggaagtcttctcctaccatcagggattgaaaaaatgggtggaagtgggaaactccggagtcttccgccctgaaatgctgctgccaatgggactgcccgaaaacgtttcggtcattgcgtggggactgtcgctggaacgtccaactatgatcaaatacgggatcaacaacatccgcgagctggtggggcacaaggtcaacttacaaatggtgtacgactcgcccctgtgcagattggacgcagaacctcgccccccacctacccaagaagctgcctag

SEQ ID NO: 146440 - DNA, 1434 bp, Artificial Sequence
  derived and/or modified sequence
atggccgacggccaggtggccgagctgctgctgcggcggctggaggcttctgatggcggactggactctgctgagctcgctgcggaactcgggatggagcaccaagctgttgtcggagcagtgaagtccctccaggccctaggcgaagtgatcgaagctgaactgcgtagtacgaagcactgggaactaactgctgaaggcgaagagatcgcccgagagggtagccacgaagctagagtgtttcgcagtatacccccagagggcttagcacagagcgagcttatgaggctcccctcaggcaaggtaggcttttccaaggcaatgtcgaacaaatggattagagtcgataagagcgccgcagatggccccagggtctttcgtgttgtggacagcatggaagacgaggtgcagcgtcgactgcaactggtccgaggagggcaggccgaaaaattgggggaaaaagaacggagtgagctcaggaagaggaaactgcttgctgaggtgggttcctggcgggacaggccttttaagccatataacttcctcgctcatggggtactcccagatagcggacatctacacccactgctaaaggtcagaagtcagttccgccaaattttcctcgagatgggcttcacagagatgccaactgataatttcatagagtctagtttttggaactttgacgccctgtttcaaccacagcagcaccctgccagggaccagcacgacacttttttcctccgggaccctgcagaagcactacagctgcccatggattacgttcagcgcgtgaagcgcacacattctcagggcggttatgggtcacagggttacaaatacaattggaagctagacgaagccaggaagaatctgctgcggacccatacaacatctgccagtgcccgggcgctctatcgacttgcccagaaaaagccatttactccagtaaagtacttctctattgacagggtctttaggaacgaaactttggatgcgacgcatctggccgagtttcaccagatcgaaggggttgtcgccgatcatggactgacactcggccacctgatgggagtcctacgggaattctttacaaagctcggaattactcagttgcggtttaagccagcgtataacccttacactgaaccatccatggaagtgttttcatatcatcaaggcctgaaaaaatgggtagaagtggggaacagtggcgtgtttaggcccgaaatgctcttacccatgggccttcccgagaacgtgagcgtgatagcatggggattgtcactggagaggccaaccatgattaagtatggaatcaataatatacgtgaactggtcggacacaaggtcaatctacagatggtgtacgattctccactctgtcgactggatgccgaacctaggcctcctccgacgcaggaggccgcctag

SEQ ID NO: 146441 - DNA, 1527 bp, Artificial Sequence
  derived and/or modified sequence
atggccgacggtcaggttgccgagctgctccttcgccgattggaagcgtctgatggaggcctggattccgcagagctggcagcagagttggggatggagcatcaagccgtggtgggggctgtgaaatccctccaggcacttggagaagtgatagaagctgaactgcgcagcaccaaacactgggaattaaccgccgagggcgaagaaatagccagggaaggctctcacgaggccagagtgttccggtctattcctcctgaagggctcgctcagtccgagctgatgagactcccatcaggtaaagtgggtttttccaaagcaatgtctaataagtggatcagggtggacaagtcagccgcagacggaccacgcgtcttcagggtggtggattctatggaggacgaggtgcagcgaagacttcagcttgtcagagggggacaggctgagaaattaggggagaaggaacgatccgagttgaggaaaagaaaactcctcgcggaagtcaccctgaagacatactgggtcagcaaaggttctgcattttccactagcatcagcaaacaggagactgaactctcgcctgaaatgatatcatccggaagctggcgcgaccgtccttttaagccctacaattttctggctcacggcgtgctgcccgactcaggccacctacacccactgctgaaagtgcggtcccagtttcggcagatcttcctggaaatgggcttcacagagatgcctaccgacaacttcattgaatcttcattttggaattttgacgcactgtttcagccacagcagcacccggcaagagatcaacacgacacattctttctcagggatcccgctgaagccttacagctgccgatggattacgtgcaaagagtgaagcgtacgcactctcaagggggttacggatctcaggggtataagtataattggaagttggacgaagccaggaaaaatctcttacgtacccataccacctcagcgagcgctcgtgccctgtatcgcctggcccagaagaagccttttacacctgttaaatattttagtattgaccgtgtgttccggaatgagaccctcgacgcaacccacttggccgagtttcaccagatagagggcgtagtggctgatcacggactcacactcgggcacttaatgggtgttctcagggaattcttcacgaagctggggatcactcagctcaggtttaagccggcttataatccttacacagaaccttctatggaggtcttttcctatcaccaaggcctgaaaaaatgggtggaagtgggaaactccggagtgttcaggcccgagatgctgctcccaatgggtcttccagagaatgtgagcgtaattgcctggggcttatcattggaacgtcccacaatgatcaagtacggcattaataacattagagaactcgtgggacataaggtgaatctgcagatggtgtacgacagtccattgtgcagactggatgcagagccccgacctcctccaactcaggaagctgcctag

SEQ ID NO: 146442 - DNA, 1720 bp, Artificial Sequence
  derived and/or modified sequence
agcacactggaaggagtcatggcggatggtcaggtggcggaactgctgctccggcggctggaggcgtctgatggcggcctggacagcgccgagttggcggctgagctgggcatggagcaccaggcggtggtgggcgccgtgaagagccttcaggcgctgggcgaggtcatcgaggctgaacttcggtccaccaagcactgggagcttactgcggagggcgaggagattgcccgggagggcagccatgaggcccgtgtgtttcgaagcattcccccagagggcctggcccagagcgagcttatgcgactgcccagtggcaaagtgggcttcagcaaggccatgtccaacaagtggattcgggtggacaagagtgcggctgacgggccccgggtgttccgagtggtggacagcatggaggatgaggtgcagcggcggctccagctggtccgggggggacaggctgagaagctgggggagaaggagaggagcgagctgaggaagaggaagctgttggctgaagttggctcttggcgggaccggcccttcaagccctacaacttcttggcccacggtgtcctccccgacagcggccaccttcacccgctgctcaaggtccgctcccagttccgacagatcttcctggagatggggttcaccgagatgccgactgataacttcattgagagctccttctggaactttgacgccctcttccagccccagcagcacccagcccgtgaccagcacgacaccttcttccttcgagatccagcggaggccctgcagctcccaatggactatgtccagcgggtcaagcggacccactctcagggcggctacggctcacaggggtacaagtataactggaagctggacgaggcccggaaaaacctactgcgaacccacaccacatcagccagcgcccgtgcgctctaccgccttgcccagaagaagcccttcactccggtcaagtacttctccatcgaccgcgtattccggaatgagaccctggacgccacgcacctggctgagttccaccagatcgagggcgtggtggcggatcatggtctcaccttgggccacctcatgggcgttctgcgggagttcttcaccaagctgggtatcacgcaactccgcttcaagccagcctacaacccatacacagagcccagcatggaggtgttcagctaccaccaaggcctgaagaagtgggtggaggtcggaaactcgggggtcttccgtccagagatgctgctgcccatggggcttcccgagaacgtgtcggtcattgcctggggcctctccctggagcgcccaacgatgatcaaatatggcatcaacaatatccgggagctggtgggccacaaggtgaacctgcagatggtgtatgacagtcccctgtgccgcctggatgccgagccgaggccccctcccacacaggaggctgcgtgacatgggccactctaggacaggtcatcctccccgagtccctgctgctgcgctcctttgcatccctggccagtgaccttgtatttatgaggcctctgtgaggccagcccccaccttcctctttcccacctgtcccaggaccagaatcccagggacagaggactgggtagcaggttccttctgttgtcctgtgtggtgtgtctactgtgagggtgggccctgaggagacctgtgggccacctattgtctaataaagtgggcagttgccccc

SEQ ID NO: 146443 - DNA, 1434 bp, Artificial Sequence
  derived and/or modified sequence
atggctgatgggcaggttgctgaactgttgttacgcagactggaggcgtccgacggagggctggacagcgcagagttagcagctgagttaggtatggagcaccaggccgtcgtgggagccgtcaaatccctccaggccctgggtgaggtgatcgaagcagaactcagatccactaaacactgggaactgacagcagagggcgaagagatagcaagagaaggttcacacgaagcacgcgtgtttagaagtatcccccctgaaggtcttgcccagtctgagctgatgcgattgccgagcggaaaagttggcttttcaaaggccatgagcaataagtggatcagagttgataagtctgctgctgacggacctcgcgtttttagagtggtcgattccatggaggatgaagtgcagcgacgcctgcaattggtgcgcggaggtcaggctgagaaactgggagaaaaggaacgcagcgagcttcggaaaaggaagttactggcagaggtcggatcttggcgtgatcggccattcaagccctataactttttggctcacggcgtacttcccgatagtggacatctgcatcccctcctcaaagtgagatctcagtttcggcagatcttcctagaaatggggtttactgagatgccaacagataattttatcgagtcctccttttggaatttcgacgctttatttcagcctcagcagcacccagcccgagatcagcacgatacattttttctgagagatcccgctgaggccctccagctgccaatggactacgtccaacgcgtgaagagaacccactcccaaggaggctatgggtcccaggggtataagtataattggaagctggatgaggcaagaaagaatcttctcagaacgcacactacatccgcctcagcgagagctttataccgactcgctcagaaaaaacccttcacacctgtgaaatatttttcgattgatcgggtcttcaggaacgaaaccctggacgcgacccacctcgctgaattccatcagatcgaaggggtggtggccgaccacggcctaacgctcggccatctgatgggtgttctgcgagagtttttcactaagctgggcatcacccaactccggttcaaacccgcttacaatccatacactgagccaagtatggaggtgttctcatatcatcagggtttaaagaagtgggtggaggtcggcaacagcggcgttttccgaccggaaatgctcctgcctatgggcttgccagaaaacgtgtctgtgatcgcatggggcctgtctctggagaggcctacgatgattaagtacggcattaacaatattagggagcttgtcgggcataaggtgaacttgcaaatggtttacgactcaccactgtgtaggctggacgcagagcctcggccaccccctacgcaagaggcggcatag

SEQ ID NO: 146444 - DNA, 1853 bp, Artificial Sequence
  derived and/or modified sequence
ccccccgcccacccgggcccggacacgctgagcacactggaaggagtcatggcggatggtcaggtggcggaactgctgctccggcggctggaggcgtctgatggcggcctggacagcgccgagttggcggctgagctgggcatggagcaccaggcggtggtgggcgccgtgaagagccttcaggcgctgggcgaggtcatcgaggctgaacttcggtccaccaagcactgggagcttactgcggagggcgaggagattgcccgggagggcagccatgaggcccgtgtgtttcgaagcattcccccagagggcctggcccagagcgagcttatgcgactgcccagtggcaaagtgggcttcagcaaggccatgtccaacaagtggattcgggtggacaagagtgcggctgacgggccccgggtgttccgagtggtggacagcatggaggatgaggtgcagcggcggctccagctggtccgggggggacaggctgagaagctgggggagaaggagaggagcgagctgaggaagaggaagctgttggctgaagtgactctgaagacctactgggtgagcaaaggcagtgcctttagtaccagcatctccaagcaagagacagagctgagcccagagatgatctccagtggctcttggcgggaccggcccttcaagccctacaacttcttggcccacggtgtcctccccgacagcggccaccttcacccgctgctcaaggtccgctcccagttccgacagatcttcctggagatggggttcaccgagatgccgactgataacttcattgagagctccttctggaactttgacgccctcttccagccccagcagcacccagcccgtgaccagcacgacaccttcttccttcgagatccagcggaggccctgcagctcccaatggactatgtccagcgggtcaagcggacccactctcagggcggctacggctcacaggggtacaagtataactggaagctggacgaggcccggaaaaacctactgcgaacccacaccacatcagccagcgcccgtgcgctctaccgccttgcccagaagaagcccttcactccggtcaagtacttctccatcgaccgcgtattccggaatgagaccctggacgccacgcacctggctgagttccaccagatcgagggcgtggtggcggatcatggtctcaccttgggccacctcatgggcgttctgcgggagttcttcaccaagctgggtatcacgcaactccgcttcaagccagcctacaacccatacacagagcccagcatggaggtgttcagctaccaccaaggcctgaagaagtgggtggaggtcggaaactcgggggtcttccgtccagagatgctgctgcccatggggcttcccgagaacgtgtcggtcattgcctggggcctctccctggagcgcccaacgatgatcaaatatggcatcaacaatatccgggagctggtgggccacaaggtgaacctgcagatggtgtatgacagtcccctgtgccgcctggatgccgagccgaggccccctcccacacaggaggctgcgtgacatgggccactctaggacaggtcatcctccccgagtccctgctgctgcgctcctttgcatccctggccagtgaccttgtatttatgaggcctctgtgaggccagcccccaccttcctctttcccacctgtcccaggaccagaatcccagggacagaggactgggtagcaggttccttctgttgtcctgtgtggtgtgtctactgtgagggtgggccctgaggagacctgtgggccacctattgtctaataaagtgggcagttgcccccatctggtggc

SEQ ID NO: 146445 - DNA, 1527 bp, Artificial Sequence
  derived and/or modified sequence
atggccgacggccaggtggccgagctgctgctgagaagactggaggccagcgacggcggcctggacagcgccgagctggccgccgagctgggcatggagcaccaggccgtggtgggcgccgtgaagagcctgcaggccctgggcgaggtgatcgaggccgagctgagaagcaccaagcactgggagctgaccgccgagggcgaggagatcgccagagagggcagccacgaggccagagtgttcagaagcatcccccccgagggcctggcccagagcgagctgatgagactgcccagcggcaaggtgggcttcagcaaggccatgagcaacaagtggatcagagtggacaagagcgccgccgacggccccagagtgttcagagtggtggacagcatggaggacgaggtgcagagaagactgcagctggtgagaggcggccaggccgagaagctgggcgagaaggagagaagcgagctgagaaagagaaagctgctggccgaggtgaccctgaagacctactgggtgagcaagggcagcgccttcagcaccagcatcagcaagcaggagaccgagctgagccccgagatgatcagcagcggcagctggagagacagacccttcaagccctacaacttcctggcccacggcgtgctgcccgacagcggccacctgcaccccctgctgaaggtgagaagccagttcagacagatcttcctggagatgggcttcaccgagatgcccaccgacaacttcatcgagagcagcttctggaacttcgacgccctgttccagccccagcagcaccccgccagagaccagcacgacaccttcttcctgagagaccccgccgaggccctgcagctgcccatggactacgtgcagagagtgaagagaacccacagccagggcggctacggcagccagggctacaagtacaactggaagctggacgaggccagaaagaacctgctgagaacccacaccaccagcgccagcgccagagccctgtacagactggcccagaagaagcccttcacccccgtgaagtacttcagcatcgacagagtgttcagaaacgagaccctggacgccacccacctggccgagttccaccagatcgagggcgtggtggccgaccacggcctgaccctgggccacctgatgggcgtgctgagagagttcttcaccaagctgggcatcacccagctgagattcaagcccgcctacaacccctacaccgagcccagcatggaggtgttcagctaccaccagggcctgaagaagtgggtggaggtgggcaacagcggcgtgttcagacccgagatgctgctgcccatgggcctgcccgagaacgtgagcgtgatcgcctggggcctgagcctggagagacccaccatgatcaagtacggcatcaacaacatcagagagctggtgggccacaaggtgaacctgcagatggtgtacgacagccccctgtgcagactggacgccgagcccagacccccccccacccaggaggccgcctag

SEQ ID NO: 146446 - protein, 961 aa, Artificial Sequence
  derived and/or modified sequence
MHGHRAPGGAGPSEPEHPATNPPGAAPPACADSDPGASEPGLLARRGSGSALGGPLDPQFVGPSDTSLGAAPGHRVLPCGPSPQHHRALRFSYHLEGSQPRPGLHQGNRILVKSLSLDPGQSLEPHPEGPQRLRSDPGPPTETPSQRPSPLKRAPGPKPQVPPKPSYLQMPRMPPPLEPIPPPPSRPLPADPRVAKGLAPRAEASPSSAAVSSLIEKFEREPVIVASDRPVPGPSPGPPEPVMLPQPTSQPPVPQLPEGEASRCLFLLAPGPRDGEKVPNRDSGIDSISSPSNSEETCFVSDDGPPSHSLCPGPPALASVPVALADPHRPGSQEVDSDLEEEDDEEEEEEKDREIPVPLMERQESVELTVQQKVFHIANELLQTEKAYVSRLHLLDQVFCARLLEEARNRSSFPADVVHGIFSNICSIYCFHQQFLLPELEKRMEEWDRYPRIGDILQKLAPFLKMYGEYVKNFDRAVELVNTWTERSTQFKVIIHEVQKEEACGNLTLQHHMLEPVQRIPRYELLLKDYLLKLPHGSPDSKDAQKSLELIATAAEHSNAAIRKMERMHKLLKVYELLGGEEDIVSPTKELIKEGHILKLSAKNGTTQDRYLILFNDRLLYCVPRLRLLGQKFSVRARIDVDGMELKESSNLNLPRTFLVSGKQRSLELQARTEEEKKDWVQAINSTLLKHEQTLETFKLLNSTNREDEDTPPNSPNVDLGKRAPTPIREKEVTMCMRCQEPFNSITKRRHHCKACGHVVCGKCSEFRARLVYDNNRSNRVCTDCYVALHGVPGSSPACSQHTPQRRRSILEKQASVAAENSVICSFLHYMEKGGKGWHKAWFVVPENEPLVLYIYGAPQDVKAQRSLPLIGFEVGPPEAGERPDRRHVFKITQSHLSWYFSPETEELQRRWMAVLGRAGRGDTFCPGPTLSEDREMEEAPVAALGATAEPPESPQTRDKT

SEQ ID NO: 146447 - DNA, 387 bp, Artificial Sequence
  derived and/or modified sequence
atgagctgccaccagagccccctggtgtttgatgtgggccagtgccggcagcacgacctggccggccagatcctgatctaccacagcctgaccccagctggccccctgggccggcccccagatgtgccccacagcccccacctggccagccccaccggcagccggcagaggacagtgggcggcacctgtgacacagccctcttcctgtgcagctgcttcagcagcagcttcttcagcctgctggtgaccctcttcttcttcaccctgagcccccacaagaccaggaactttgtgatcctgctgatcttcctgtacagcgtgtgcctgcacacagatggctacctgcgggccagcgagctgagcctgcccccatccatcatctcctag

SEQ ID NO: 146448 - DNA, 4275 bp, Artificial Sequence
  derived and/or modified sequence
cagggctccttcccgcccgccgccgccgagacccaggctgaagctggggaggacggtggagcccggcccaggccgttctcctgcccccgcggctggagcatcgtctgggactactggctgaaggcgagccccgcagcccaagcgcagcgcacacgcgcgcccccggccaccgccgttctctcttccctcccctcctctcccctcccctctcctccgcccccggcctcggctgcggcgggaggaagaacgcttcccaaccagccaggagagcccagatctattcccattcggggagaaagaagagaccccgcacttggatccgaccgacttctcgccccggggccacggaagtggctcgccgtccaccggagagtccccgccgagcgtagccctccaaccctcgcccaaccgcagccgcatagacagcgctccccagcgggcccccggccccgccgagcccactccccgcgcggggccggggccggggccggcgatgcctggcacggcagcggcggtggccgcggctgctgctgctgctactgccaccgctgccacggctgctggcccgggcccgggctgggggcttgagtctctgcagtggggctgagcccgcagtcccgccccccgatcctgaggccgctgctccgccgggcgccgggcctcctccgcccgcgcctccgccccaggagctggagccaagcggggagctcgggccccgcgcccaggcccggaccatgcatggccaccgagccccggggggcgccgggccttcggagcccgaacacccggccacgaacccgccgggcgccgctccgccggcctgtgccgactcggaccctggagcctcggaacccggactgctggcgcgcaggggctcaggttcggctcttggcggcccactggatccccagtttgtcggaccctcggacaccagcctgggcgctgctccaggccaccgggtcttgccctgcggtcccagtccacagcaccaccgggccctgcgcttctcttaccacctggagggctcgcagcctcggcctgggctgcaccagggaaaccggatcctggttaaaagtttgtcccttgaccctggccaaagcctagagcctcatccagaaggtccccagcggcttcgctcagacccaggtcccccgactgaaacccctagccagcgtccttcaccactgaagcgggcaccgggcccgaagccacaggtgcccccaaagcccagctacctgcagatgccccggatgccccccccactggagcccatcccccctccaccatcacgcccactgcctgccgacccccgagtggccaagggcctggctcccagggcagaggccagccccagttctgcagcagtatcctcactgattgagaagtttgaaagagagcctgtgattgtcgcctcggatagaccagtccctggccccagcccaggtcccccagagccagtcatgttgccacagccaacctcgcagccaccagtgccccagctccccgagggtgaggcctcccgctgcctgtttctgctggctcctgggccccgggacggtgagaaggtgcccaaccgggacagcggcattgatagcatcagctcgccatccaacagcgaggagacctgcttcgtcagtgatgacgggccccccagccacagcctctgccctgggccccctgccctggctagtgtgcctgttgccttggccgacccccaccggcctggctcccaagaggttgacagtgacctggaggaggaggacgacgaggaggaggaggaagagaaggacagagaaatcccagtgcccctgatggagagacaggagtctgtggagttgactgtgcagcaaaaggtgtttcacattgccaatgagctcctgcaaactgagaaggcctacgtttccaggctccatctcctggatcaggtgttctgtgcccggctgctggaagaagctcggaaccgcagttccttcccggccgacgttgtccacggcatcttctctaacatctgctccatctattgcttccaccagcagttcctgctgcctgagctagagaagcgcatggaggaatgggaccgctatccacgcattggagacatcctgcagaaactggcccccttcctcaagatgtatggtgagtatgtgaagaactttgaccgggccgtggagctggtcaacacctggacagagcgctccacccagtttaaagtcatcatccatgaggtgcagaaggaggaagcctgtggcaacctgacattgcagcaccacatgctggagcctgtgcagcgcatcccccgctatgagcttcttctcaaggactatctgttaaagctgccccatggctccccggacagcaaggatgcccaaaagtctctggagctgatcgccacagcagcagagcactcgaatgctgccatccgcaaaatggagcgaatgcataagctgctgaaggtatatgagctgttagggggcgaggaggacattgtcagccccaccaaagagctcataaaagaaggccacatccttaagctgtcagcaaagaatgggaccactcaagaccgatacctcatactattcaacgaccgcctcctttactgcgtgcccaggctgcggctccttggccagaagtttagcgtgcgggcacgcattgatgtagatggcatggagctaaaggagagctccaacctcaatctgcctcgaaccttcctggtgtcaggaaagcagcgctccctcgagctccaggccaggactgaggaggagaagaaagactgggtccaggccatcaactccaccctcctgaagcatgaacagacgctggagactttcaaactgttgaactcaacaaacagggaagatgaagacaccccacccaactctccaaacgtggatcttgggaagcgggcacctacgcccatccgggaaaaggaagtcaccatgtgcatgcgctgccaggagcccttcaattctatcaccaaacgcaggcaccactgcaaggcctgcgggcatgtggtttgtgggaagtgctccgagttccgggcccgcctcgtctatgacaacaaccgctccaaccgtgtgtgcactgattgctatgtggccttgcacggggtgcctgggagcagtccagcctgcagccagcatacaccccagcgccggaggtccatcctggagaaacaggcctcagtggctgcagagaacagcgtcatctgcagcttcctgcactacatggagaagggtggcaaaggatggcacaaggcatggttcgtggtccctgaaaatgaacccttggtgctgtatatctacggagcccctcaggatgtgaaagcccagcgcagcctgcccctcattggcttcgaggtgggaccgcccgaggcaggggagcggcctgacagaaggcatgtcttcaagatcacccagagccacctcagctggtacttcagccctgagacagaggaactacagcgacgctggatggctgtgcttggccgggcgggccgaggggacacgttctgcccggggcccacactgtctgaggacagggagatggaggaggcaccggtggctgctttaggagccactgctgaaccccccgaatccccccagacccgagacaagacctagagggtttgggacaaactgggagcccccaccccacactctagttgcccatgtctgattgggggctctagccccttccctcccagctcagtcaatacttgaactcccatcacgggcactttcaatcccgaatgctgggtcttgggttttttaattcatcttttcacaaaacgtgggcttttaaaaaatatattcctacagtgatgtcaatttttattaatccctgtccccagggagggtgggagccgttgccagtcctacctgaattaggtcgtttttctccctcatccctcaataccctaccacagatcctgcctccacccagttccccacaaagcaccagaggtaggagacctggattcaagtgccagctctgccactgaccctggggccccgacccagccctgcctcctcagccagtgtcttcacacgtacaactccacgtggggtggcaactagacctctcctgcctctcccatggcttacagcttctacccggccccaaggctacccagtattttatcgtccagacccatggcagggccagcgggcaggacagggaaacaggggggaggacaatggatactcagttttttgtgtttttttgtgtgtttttttttttttaagaaaaatacagtttatttcaggcttacagtaa

SEQ ID NO: 146449 - DNA, 2886 bp, Artificial Sequence
  derived and/or modified sequence
atgcacgggcatcgggctccaggaggagctgggccctccgagccagagcaccctgctaccaaccctccgggcgctgcaccccctgcgtgcgccgacagtgacccaggagcttctgagcctggcctactcgcccgccggggatccgggagcgcactgggtggccctctggacccacagttcgtgggccccagcgacacttctctcggtgccgcccctggtcatcgcgttctcccctgtggcccttcaccacagcatcacagggcattgcgtttttcctatcatctagagggttcccagcctcggcccggcctccatcaaggcaataggatacttgtgaaatcgctgagtctggatcctggtcagagtctggagcctcaccctgaaggccctcaacggctccgaagcgaccccgggccacctacagaaaccccgagccagaggccaagtcctctaaaacgggcacccggtccgaagccacaggtcccccctaagccatcataccttcaaatgcctagaatgcctcctcctctggagccaatcccccctccgccaagtaggcctctccccgctgaccctagggttgccaaagggctcgctcccagggcagaagcctctccctcatctgctgcggtctcgagcctaatcgaaaagtttgagcgcgaaccggtcattgtggcaagcgatcggcctgtgccaggtcctagccccggacctcccgaacctgtcatgctgcctcaacctacctcgcagccccctgtgccccagctgccggagggcgaagcctcaagatgtctgtttctcctggcccccggcccgcgtgacggcgagaaagttcccaacagggattcggggattgactcaattagttccccatctaactctgaggagacttgttttgtgtctgacgacggccctcctagccattccctatgtcccggtcctccagccctggctagtgtcccggtcgcactcgctgaccctcaccgacctggcagccaggaggtagattctgacttggaggaagaagacgacgaagaagaggaggaggaaaaagacagagaaattccagtgcctcttatggagaggcaggagtcggttgagctgacagtccagcagaaggtgtttcatatcgcaaacgaactgttacagactgagaaggcatatgtttccaggctgcaccttttggaccaggttttctgcgcccgtctcctggaagaggccagaaaccgttcctccttccctgctgatgttgtgcacggaatcttctcaaatatctgcagcatttactgcttccatcagcagttccttctgccagagctcgaaaagcgaatggaggagtgggacaggtaccctcgaatcggcgacattttgcagaagctggccccctttcttaagatgtatggggaatatgtaaagaactttgatagggctgttgaactcgtaaacacttggacagagcggagtacacagtttaaggtgatcattcatgaagtccagaaagaggaggcctgcgggaacctgacacttcagcaccatatgctggaaccggttcaaaggatcccccgatatgaactgctcctgaaagactatctgctgaagctgcctcatggttcgcccgattcaaaggacgcccagaaaagccttgagctgatcgcaacagcggccgagcatagcaatgctgctattcgcaaaatggagcggatgcacaagctgcttaaggtctatgagctgctgggtggcgaagaggacattgtttcaccaaccaaagaactaattaaggaaggtcatattctcaagctgtccgctaagaacggcacaacacaagatcgctacctgatcctgttcaatgaccgcctgctgtattgcgttccacgcctccgattgcttggacagaagttttcagtgcgtgcaagaattgatgttgacggcatggagctaaaggagagttccaatctgaatctgccccgaacattcctggtcagtggaaaacaaaggtcgctggagctgcaggcaagaactgaggaggaaaagaaggactgggttcaggcaattaatagtacgctcctgaagcatgagcaaaccttggagaccttcaaactgctgaactctacaaaccgcgaggacgaggacacgcctccaaatagccccaacgtcgatttgggaaaaagagccccaacaccaattcgggaaaaagaggttacaatgtgtatgaggtgccaggagccattcaacagcattacaaagcggcgccatcactgtaaggcctgtggacacgtcgtgtgtggcaagtgctcggaattcagagctcggttagtctatgacaacaatagaagtaatagggtatgcacagattgctacgtggcactgcacggcgtacccgggtccagccccgcctgctcccagcacacaccacaaagacggaggtcaatacttgagaaacaggcgagcgtcgccgctgagaactcggttatttgctcttttctacactacatggagaagggcggcaaggggtggcacaaagcctggtttgttgttcctgagaatgaacccctcgtcctgtacatttatggtgccccacaggacgtcaaggctcagaggtcattgccactcattggctttgaagtggggcccccagaggcaggtgagcggcccgataggagacacgtattcaaaataacgcaaagccacttgtcttggtacttttccccggaaaccgaggagctccagcgccggtggatggccgtgctgggccgggcaggtaggggcgacacgttctgtccaggccctaccctctctgaggatcgtgagatggaagaggcccccgtcgcagctctgggcgccactgccgaacctccagaatccccgcagaccagggataaaacttag

SEQ ID NO: 146450 - DNA, 2886 bp, Artificial Sequence
  derived and/or modified sequence
atgcacggccaccgggcccctggaggagctggccccagcgagcctgagcacccagccaccaaccccccaggagctgcccccccagcctgtgccgacagcgaccccggggccagcgagcccggcctgctggcccggcggggcagcggcagcgccctgggcggccccctggacccccagtttgtgggccccagcgacaccagcctgggcgccgcccctggccaccgggtgctgccctgtggccccagcccccagcaccaccgggccctgcgcttctcctaccacctggagggcagccagccccggcccggcctgcaccagggcaaccgcatcctggtgaagagcctgagcctggaccccggccagagcctggagccccaccctgagggcccccagaggctgcggagtgaccccggccccccaacagagacccccagccagaggcccagccccctgaagagggcccctggccccaagccccaggtgccccccaagcccagctacctgcagatgcccaggatgcccccacccctggagcccatccccccaccacccagccggcccctgcctgctgacccccgggtggccaagggcctggcccccagggctgaggccagccccagcagcgctgctgtgagcagcctgattgagaagtttgagcgggagcccgtcatcgtggccagtgacaggcctgtgcccggccccagccctggccccccagagcctgtgatgctgccccagcccaccagccagccccctgtgccccagctgcctgagggggaggccagccgctgcctcttcctgctggcccctggccccagagatggagagaaggtgcccaacagagattctggaattgacagcatcagcagccccagcaacagcgaggagacctgctttgtgtctgatgatggcccccccagccacagcctgtgccccggccccccagccctggcctctgtgcctgtggccctggccgacccccaccggcccggcagccaggaggtggacagcgacctggaggaggaggatgatgaggaggaggaggaggagaaggaccgggagatccctgtgcccctgatggagcggcaggagagcgtggagctgactgtgcagcagaaggtgttccacatcgccaatgagctgctgcagacagagaaggcctacgtgtcccggctgcacctgctggaccaggtgttctgtgcccggctgctggaggaggccaggaacagaagcagcttcccagcagatgtggtgcacggcatcttcagcaacatctgcagcatctactgcttccaccagcagttcctgctgcctgagctggagaagaggatggaggagtgggaccgctaccccagaattggagacatcctgcagaagctggcccccttcctgaagatgtatggagaatatgtgaagaactttgacagagctgtggagctggtgaacacctggacagagaggagcacccagttcaaggtgatcatccacgaggtgcagaaggaggaggcctgtggcaacctgaccctgcagcaccacatgctggagcctgtgcagaggatccccaggtatgagctgctgctgaaggactacctgctgaagctgccccacggcagcccagacagcaaggatgcccagaagagcctggagctgattgccacagctgctgagcacagcaatgctgccatcaggaagatggagaggatgcacaagctgctgaaggtgtatgagctgctgggcggggaggaggacatcgtgagccccaccaaggagctgatcaaggagggccacatcctgaagctgagcgccaagaatggcaccacccaggaccgctacctgatcctcttcaatgaccggctgctgtactgtgtgccccggctgcggctgctgggccagaagttctctgtgcgggccagaattgatgtggatggcatggagctgaaggagagcagcaacctgaacctgcccaggaccttcctggtgtctgggaagcagaggagcctggagctgcaggccaggacagaggaggagaagaaggactgggtgcaggccatcaacagcaccctgctgaagcatgagcagaccctggagaccttcaagctgctgaacagcaccaacagagaagatgaggacaccccacccaacagccccaacgtggacctgggcaagagggcccccacccccatccgggagaaggaggtgaccatgtgcatgcgctgccaggagcccttcaacagcatcaccaagagaagacaccactgcaaggcctgtggccacgtggtgtgtgggaaatgttctgagttccgggcccggctggtgtatgacaacaacagaagcaacagagtgtgcacagactgctacgtggccctgcacggcgtgcccggcagcagccctgcctgcagccagcacaccccccagaggagaagaagcatcctggagaagcaggcctctgtggccgctgagaacagcgtcatctgcagcttcctgcactacatggagaagggcggcaagggctggcacaaggcctggtttgtggtgcctgaaaatgagcccctggtgctgtacatctacggggccccccaggatgtgaaggcccagaggagcctgcccctgattggatttgaggtgggccccccagaggccggggagaggccagaccggcggcacgtgttcaagatcacccagagccacctgtcctggtacttcagccctgagacagaggagctgcagaggcgctggatggctgtgctgggccgggccggccgcggggacaccttctgccccggccccaccctgtctgaagatcgggagatggaggaggcccctgtggccgccctgggcgccacagctgagcccccagagagcccccagacccgggacaagacctag

SEQ ID NO: 146451 - DNA, 2886 bp, Artificial Sequence
  derived and/or modified sequence
atgcacggccaccgggcccccggcggcgccggccccagcgagcccgagcacccggccactaacccaccaggcgccgccccaccggcctgcgccgattccgatccgggcgcctccgaaccgggtcttctggcccgccggggttctggtagtgctcttggaggtcccctggatccccagttcgtgggtccatctgataccagcttgggtgcagccccaggccacagagtgttgccttgcgggccttcccctcaacatcaccgagctctacgcttctcttaccacctcgagggctctcaaccccgtcccggactgcatcaggggaatcggattctggtcaaatccctttcactggatcctggccaaagcttggaacctcaccccgagggccctcagaggctgcgctcggaccccggcccccctaccgagactccctctcaaagaccatctccactaaagagagcacccgggcctaagccacaagtgccccctaagccatcttacctgcaaatgcctaggatgccaccacctctcgaaccgatccctccaccaccttctcgccccctgcctgccgatccacgtgtcgctaagggcttggcccctagggcggaggcatcaccctccagcgcagccgtatcgtccctgattgagaagtttgagagggagccggtcatcgtggcttccgaccgccctgtgcctggaccttctcccgggccgccagagcccgttatgctgcctcagcccacgagccagccgcctgtcccccagctaccagaaggagaggctagcaggtgtctatttctgttggcaccaggaccccgcgacggggaaaaggtccccaatagagactccggcattgacagcatttcctccccttcgaattctgaggagacttgttttgtgagcgatgatggccctccttcccacagtctgtgccccggccccccagccttggccagcgtccccgttgccctggcagatccccaccgccccgggagccaggaggtcgattcagatctggaggaggaagacgatgaggaggaagaagaagagaaggaccgggagattcccgtgccgctgatggaaaggcaggaatccgtagagcttacagttcagcagaaggtgttccatatcgctaacgaactgctccagacagaaaaagcatacgtgtcgagactacatctattggaccaagtcttttgcgccagactcctggaggaggcgcgcaaccgatctagcttccctgcggatgtcgtacatggcatcttctcgaacatttgttctatatattgcttccatcagcagttcctccttcctgaactcgaaaagcgaatggaagagtgggataggtatcctaggatcggagacattctccagaagctggccccatttcttaagatgtacggtgagtatgtcaagaacttcgatagagcagtcgaactggtgaacacctggacggagcggagtacccaattcaaagtgataatccacgaggttcagaaagaggaggcatgtggaaacctcacgctgcagcatcacatgttagaacccgtacagcgcatcccccgttatgaattgctgctgaaggattatctccttaagctgccccatggaagcccggactccaaagacgcacagaaaagcctcgaactgatcgctacggctgcagagcattctaatgccgccattcgcaaaatggaacgcatgcataagctgttaaaggtctatgaacttcttggcggggaggaggacatagtgagcccaactaaggaactgatcaaggaggggcatattttgaaactgagtgcgaagaatggtacaacccaggaccgctatctcatcctctttaatgaccggctgctttactgtgttccacgtctgcgcctactgggacagaagttctctgtgagagcccggatcgatgtggacggtatggagctgaaggaaagttcaaatctgaacttgccacgcacttttttggtttcagggaagcaacggtctctagagctgcaggcaagaactgaggaggaaaagaaggattgggttcaggcaatcaacagcactctgctcaaacacgagcagacactcgagacatttaagctcctgaacagcacaaatagggaggacgaagatacacctcctaacagccctaatgtcgacctcggaaaacgggcacccactcccatccgtgagaaggaagtaacgatgtgcatgagatgccaggaaccattcaactcaataacaaaaagaagacaccactgtaaggcatgtgggcatgtagtgtgcggaaaatgtagtgaatttagagcacggttggtctatgacaacaatagatctaatagagtatgcacagattgctatgttgcactgcacggcgtgcctggttcttcacccgcttgctcacagcataccccccagaggcgacggagcatactcgaaaaacaggcttccgttgcagccgaaaacagcgtgatctgcagctttctgcattacatggaaaaagggggcaaaggctggcacaaagcatggtttgtagtgcctgaaaacgagccgctggtgctgtatatctatggagctccgcaggatgttaaggcccagagaagtctccctctaatcggatttgaagtgggccccccagaggcgggggagcggcccgacagacgacacgtgttcaagataacccagtctcatctgtcttggtatttctccccagaaacagaggagttacagaggaggtggatggcagtgttgggtagggctggtaggggcgatactttctgccccgggcctaccctatctgaagatcgggagatggaggaggctcccgttgctgccctcggcgccacagcagaacccccggagtctccgcagacacgggacaagacgtag

SEQ ID NO: 146452 - DNA, 2886 bp, Artificial Sequence
  derived and/or modified sequence
atgcatgggcatcgcgcacctgggggagctggcccaagcgaacctgagcaccctgcaaccaatccgccaggcgctgctcctcctgcatgtgccgatagcgatcccggtgctagtgaacccggactccttgcccgtcggggttctggctccgcactgggtggccctttagatccacaattcgtgggaccgtctgatactagcctaggggctgcacccggacatagggtgttgccttgcggcccttcccctcaacaccaccgtgctctccgctttagctaccatttagagggaagccagccgcgtcccggactgcatcagggcaaccgcatcctggtcaaatcgctgtcattggaccccggtcagtccctagaaccacatcccgaaggtccacagagactccggagcgaccccggacctccaacagaaacgccaagccagcgtcccagccctctgaaacgggctcccggacctaaaccccaagtcccaccgaaacccagttacctccagatgcccaggatgccaccacctctggagccaatcccccctcctccctcgcgacccctccccgctgatccgagggtggccaagggtttggcacccagggctgaagctagtccatcaagtgccgctgtttcttccctcattgagaagttcgagcgagagcccgtgattgtcgctagtgaccgtcctgtccctggcccatccccaggaccgcctgaacctgtgatgctgccacaaccgacaagccaaccccctgtaccccagctcccggaaggagaagcgagtagatgcctgtttcttctagcccctggccctcgagatggcgagaaagtgccaaatcgcgattcgggaatcgatagcatctcgagcccaagtaattctgaggaaacctgtttcgtgtcggatgacggcccacccagccattcattgtgcccaggacctcctgctctggcatctgttccggtcgctttagctgatccacatcgcccaggatcacaggaggtagactctgatcttgaggaggaggacgacgaggaggaggaggaggaaaaagatcgggaaatcccagtcccattaatggagcgtcaagaaagtgtcgagcttaccgtgcaacaaaaagtgtttcacatcgccaacgaactcttacaaacagagaaagcatacgtgagtaggctgcatcttctcgatcaggtgttctgcgctagactgctggaggaggccagaaaccgctcctctttcccagcagacgtggtgcatggaatattctccaatatctgttccatctattgtttccaccagcagttcctactgcccgaattggagaagaggatggaagaatgggacaggtatcctaggataggagatattctccagaagttagcacctttcctcaagatgtatggagagtacgtgaagaattttgatcgcgctgtcgagctcgtaaatacatggacagagcgctcgacgcaatttaaggtgataatccatgaagtccagaaagaggaggcgtgcggaaatttgacactacagcaccacatgctcgagccagtgcagcggatcccaagatatgagctcctgctcaaggattatctgctgaagttaccccatgggagccccgactccaaagacgcccaaaagtcattggaactgattgcgaccgcagcagagcactccaatgccgctattcggaagatggaacgaatgcataagttgcttaaggtttatgaactcttaggaggggaggaggacattgtctcccctacaaaagagttgattaaagaggggcatatcttgaaattgtcagccaagaacgggactacgcaggaccgctacctcatacttttcaacgatagacttctatattgcgtgcccaggttgcggcttctcggtcagaaattctccgtgcgagcgcgaattgacgtagatggtatggagttaaaggagagttcgaacctcaatctccctcgaacatttctcgtgagtggaaaacagcggtcactggaactgcaagcccgaaccgaggaagagaagaaggattgggtccaagctatcaattcgaccttattgaagcatgagcagacattggaaacctttaaactcttaaattctacaaatagagaagacgaagacacaccaccgaacagccctaatgtcgacttaggaaagagggccccaacaccgattagggaaaaagaggttacgatgtgcatgagatgccaagaaccctttaattccatcactaagcggaggcatcattgtaaagcctgtggtcacgtggtatgcggcaagtgtagcgaatttcgggcaaggctggtgtatgacaacaatcggtctaatagggtctgcacggactgttatgtagccctccatggggtgcccggaagcagcccagcctgttcgcagcatacccctcagagaaggaggtcaattcttgaaaagcaggcctctgtcgcagcagagaatagtgttatttgttcttttctccactatatggagaaaggaggaaagggatggcataaagcttggtttgtggtgcctgagaacgaacctcttgtgctatatatctacggagctcctcaggatgtgaaagctcagcggtctcttcccctcataggatttgaagttgggccacccgaggcgggagaacggccagataggcgacacgtcttcaagattacacagtcacacctgtcctggtatttctcacctgaaaccgaggaactccagagaagatggatggcagtactggggagagccggtcgaggcgacaccttttgccccggacccacactgagcgaagatcgtgagatggaggaggcccctgtggctgcacttggggctactgccgagccaccggagtcgccacagacacgtgataagacctag

SEQ ID NO: 146453 - DNA, 2886 bp, Artificial Sequence
  derived and/or modified sequence
atgcacggccacagagcccccggcggcgccggccccagcgagcccgagcaccccgccaccaacccccccggcgccgccccccccgcctgcgccgacagcgaccccggcgccagcgagcccggcctgctggccagaagaggcagcggcagcgccctgggcggccccctggacccccagttcgtgggccccagcgacaccagcctgggcgccgcccccggccacagagtgctgccctgcggccccagcccccagcaccacagagccctgagattcagctaccacctggagggcagccagcccagacccggcctgcaccagggcaacagaatcctggtgaagagcctgagcctggaccccggccagagcctggagccccaccccgagggcccccagagactgagaagcgaccccggcccccccaccgagacccccagccagagacccagccccctgaagagagcccccggccccaagccccaggtgccccccaagcccagctacctgcagatgcccagaatgcccccccccctggagcccatcccccccccccccagcagacccctgcccgccgaccccagagtggccaagggcctggcccccagagccgaggccagccccagcagcgccgccgtgagcagcctgatcgagaagttcgagagagagcccgtgatcgtggccagcgacagacccgtgcccggccccagccccggcccccccgagcccgtgatgctgccccagcccaccagccagccccccgtgccccagctgcccgagggcgaggccagcagatgcctgttcctgctggcccccggccccagagacggcgagaaggtgcccaacagagacagcggcatcgacagcatcagcagccccagcaacagcgaggagacctgcttcgtgagcgacgacggcccccccagccacagcctgtgccccggcccccccgccctggccagcgtgcccgtggccctggccgacccccacagacccggcagccaggaggtggacagcgacctggaggaggaggacgacgaggaggaggaggaggagaaggacagagagatccccgtgcccctgatggagagacaggagagcgtggagctgaccgtgcagcagaaggtgttccacatcgccaacgagctgctgcagaccgagaaggcctacgtgagcagactgcacctgctggaccaggtgttctgcgccagactgctggaggaggccagaaacagaagcagcttccccgccgacgtggtgcacggcatcttcagcaacatctgcagcatctactgcttccaccagcagttcctgctgcccgagctggagaagagaatggaggagtgggacagataccccagaatcggcgacatcctgcagaagctggcccccttcctgaagatgtacggcgagtacgtgaagaacttcgacagagccgtggagctggtgaacacctggaccgagagaagcacccagttcaaggtgatcatccacgaggtgcagaaggaggaggcctgcggcaacctgaccctgcagcaccacatgctggagcccgtgcagagaatccccagatacgagctgctgctgaaggactacctgctgaagctgccccacggcagccccgacagcaaggacgcccagaagagcctggagctgatcgccaccgccgccgagcacagcaacgccgccatcagaaagatggagagaatgcacaagctgctgaaggtgtacgagctgctgggcggcgaggaggacatcgtgagccccaccaaggagctgatcaaggagggccacatcctgaagctgagcgccaagaacggcaccacccaggacagatacctgatcctgttcaacgacagactgctgtactgcgtgcccagactgagactgctgggccagaagttcagcgtgagagccagaatcgacgtggacggcatggagctgaaggagagcagcaacctgaacctgcccagaaccttcctggtgagcggcaagcagagaagcctggagctgcaggccagaaccgaggaggagaagaaggactgggtgcaggccatcaacagcaccctgctgaagcacgagcagaccctggagaccttcaagctgctgaacagcaccaacagagaggacgaggacaccccccccaacagccccaacgtggacctgggcaagagagcccccacccccatcagagagaaggaggtgaccatgtgcatgagatgccaggagcccttcaacagcatcaccaagagaagacaccactgcaaggcctgcggccacgtggtgtgcggcaagtgcagcgagttcagagccagactggtgtacgacaacaacagaagcaacagagtgtgcaccgactgctacgtggccctgcacggcgtgcccggcagcagccccgcctgcagccagcacaccccccagagaagaagaagcatcctggagaagcaggccagcgtggccgccgagaacagcgtgatctgcagcttcctgcactacatggagaagggcggcaagggctggcacaaggcctggttcgtggtgcccgagaacgagcccctggtgctgtacatctacggcgccccccaggacgtgaaggcccagagaagcctgcccctgatcggcttcgaggtgggcccccccgaggccggcgagagacccgacagaagacacgtgttcaagatcacccagagccacctgagctggtacttcagccccgagaccgaggagctgcagagaagatggatggccgtgctgggcagagccggcagaggcgacaccttctgccccggccccaccctgagcgaggacagagagatggaggaggcccccgtggccgccctgggcgccaccgccgagccccccgagagcccccagaccagagacaagacctag

SEQ ID NO: 146454 - protein, 268 aa, Artificial Sequence
  derived and/or modified sequence
MSLSFLLLLFFSHLILSAWAHGEKRLAPKGQPGPAATDRNPRGSSSRQSSSSAMSSSSASSSPAASLGSQGSGLEQSSFQWSPSGRRTGSLYCRVGIGFHLQIYPDGKVNGSHEANMLSVLEIFAVSQGIVGIRGVFSNKFLAMSKKGKLHASAKFTDDCKFRERFQENSYNTYASAIHRTEKTGREWYVALNKRGKAKRGCSPRVKPQHISTHFLPRFKQSEQPELSFTVTVPEKKKPPSPIKPKIPLSAPRKNTNSVKYRLKFRFG

SEQ ID NO: 146455 - DNA, 5295 bp, Artificial Sequence
  derived and/or modified sequence
ggggaagcttcgcaggcgtgcacggagcagtgagatcactggcgttataaatatcccggtgccagcgcggagatccgctcgggtggcctctctcttcccctctccccttctcttccccgaggctatgtccacccggtgcggcgaggcgggcagagccagaggcacgcagccgcacaggggctacagagcccagaatcagccctacaagatgcacttaggacccccgcggctggaagaatgagcttgtccttcctcctcctcctcttcttcagccacctgatcctcagcgcctgggctcacggggagaagcgtctcgcccccaaagggcaacccggacccgctgccactgataggaaccctagaggctccagcagcagacagagcagcagtagcgctatgtcttcctcttctgcctcctcctcccccgcagcttctctgggcagccaaggaagtggcttggagcagagcagtttccagtggagcccctcggggcgccggaccggcagcctctactgcagagtgggcatcggtttccatctgcagatctacccggatggcaaagtcaatggatcccacgaagccaatatgttaagccaagttcacagatgactgcaagttcagggagcgttttcaagaaaatagctataatacctatgcctcagcaatacatagaactgaaaaaacagggcgggagtggtatgtggccctgaataaaagaggaaaagccaaacgagggtgcagcccccgggttaaaccccagcatatctctacccattttctgccaagattcaagcagtcggagcagccagaactttctttcacggttactgttcctgaaaagaaaaagccacctagccctatcaagccaaagattcccctttctgcacctcggaaaaataccaactcagtgaaatacagactcaagtttcgctttggataatattcctcttggccttgtgagaaaccattctttcccctcaggagtttctataggtgtcttcagagttctgaagaaaaattactggacacagcttcagctatacttacactgtattgaagtcacgtcatttgtttcaatgtgactgaaacaaaatgttttttgataggaaggaaactggaattctttgtactaatacagggagcacactccttcagttcagcaagacataaagccttttgctttatgcttgagggatatttagaactttgtattttcggaaagttaaataacagggactacgtatttttctgacttttacagattaacctgaaagaacatacatgatacatttttatttttggtttccaaagaatattttgatgcagataaaatattttgttaacttttgtttttttttgtttgttttcttaaaagtacctctgcattgagcatattttcttacttttattattttaattaatatgacataagcaatcattttatgctgtttatgaattataaatgtgtttatagctcatttgtaatatggaaatcttttacatttttcctattcactgcacttttttattgtttttatttctagccatacctcagataatatgtttagttttacattttaaaatgtttaaattctctttcacagcaccaaaggctcagcttggatttgtgtgtatgtgtatgtcaattcatgacattatgtggaatcctaaacctttggtggctgggatatgatgggttagaagcaaggagaaaatataaggactttttgatggaattaaatgtgggaggtaaggaaaaggatttagaggtaaaagtacactaagtttgcaacatttattgagatctaagtctgtcttgccttcatttctctttttatctcccccttgccctcattcttgaacagctggaggaatacattttattctgtccatgaagcatacactatgaaattcaagtgcttaaaaatacttctatgactctctgctatcccactgtatagatccacagggagcaaacacttagaaatgatagagaactgaaggagatcaatggtttaacagttatccatgccaagtcccattgtcagaaatattcttattactcagtcaaacactctttgagcttcccttcctaaaggtaaccaatccagtgaatagatgtgcccttttataaggaaacttctgatgtttattaaaaaaactggccttttgatagaggtaacttaatttgggaatttgttgtgttgaaatggcatttaatttcaacctaaatactgactgctggacataaatcacagaaaatttaacttaagaaaatttacaaaatttattctcaggtaatcattttaataaagttctgcaaaatacacgtttatcttacattcagaaatgtggcaaaaaaggcatagctaaaggctaaacatatggctttagtagtaacaaaagggttcatagaaacttcatggtttgcatttaaacatgtttaaagtgtacttataaactatttttttcttaaagcaaactatgatttattttggtgcacaaatacaaagtggaaacttaccaaaattgaactagctaccatataagcagattgctttaatttgatgggaaaatagtacacacatatatataacaaataatatattaaaaaacccatccatcaactaaaacattatatgtatacatcagtatagtgttttattataaagccaattatctgattaagcattctttccactgaatgcataatgtttaaatagcataaaatgaaatgctacaaaaattgaactaatttatactttaaagtatttctgggttaaatgaaacaatgaaattttttagtatgttcaactctcatccaaatggcatatgaccctgtttacacagcctaaagctaaaaatattactctagtttattctaatctattgttaagtattgtgcactgtataccaagttcttagggcacatgaaaaattttagctgccaaacaggaactagtaaacatatgttcctaataagtgaagggaaagataataatgatggtcaacaataagccacgtcaatgcataagttgtataggctaaatgttgcttgtaggctacattaaactcaaatgtaatagtttatcttatactcctggtttgatttgattagcatattaacgtgaaagtaggatagctactaaatatatattatgcaagtcaggaatcattaatttcaaaatttaaagccatgctaaaattaaaaagaaaatattaaattacacaattacacttgtctttactggccatacaaaatgattttttttttttttttgagacagagtcttgctctgtcaccaggctggagtgcagtggcatgatctcggctcactgcaacctccaactccctggtttaagggattctcctgcctcagcctcccaagtagctgggattacagactcatgccaccacgccagctaatttttgtatttttagtagagacggggtttcaccatgttggtcaggatggtctcaatcctggcctcttgatagtcctgacctcatgatctgcccacctcggcctccccaaagtgctgggattacaggtacaatgatgtataattaatgcttagtgaagcataaagttacctacatcaattaattaaatgaacttatgtacagaaaacatgtataaatataagtctatactaatgcttacaactttctaagagggttcttgcttatgtagctttttattattttaagtaactagaaccaccaaatatcaaataaaattatttggttatggttatgttcatctaaacacaacaataacttttatattaatatttaggagtctattttgtctataggtgacaaacatctccagactaacatgtcagttttatcaattatattatgtttaattatttaagatttctttatgtggaacatctatagagataaatagaaattttcaataagatgtagtaacactgtgatttatctttcaagagtctctcttcacttccttctaaagagactaatttgagagtacaggtgcatattaattttcttggttctttcagctgaattatattggtccagaagttcaaaatcatgtgacaataataagggatactgacagaagttatttccaagtttgtgtatatattataaaaattacatatataaaactaaggcttttatttctgttatttttaagcttttatttcttgtagctaaaaataaaacatcataaatctggtaggtaaatttcttattaaatcaatcttgaaatagaaaatgtaataactttcttaccattaacattttttacccttccatagaagggagggaataaatcatgacttatcccattttcaataacaaaacgaaactatggcactaaccaaaaacttgcattctggcataatttttacagttgcagagaattgtttctgggctcattaaaaaaagtagtattgcagacattgctgcaatgggaagcagacaataacttcttaaaggaattctacacctcctttaagatttacttaattgctacatctaaattctgataatttaaaatccattttaggtgataaaattttttaaaagttttgaaggaaacctctggataaatggacaaggcctaatttttttttgtagtcaatccaactgtactggccaatttttgaaataagattatatgattaggtattagcagagacaaagagttacctcctccatcttactctgccctatttgaaagtctcaggggagaaaagggaacaagatgctgatccaacctgagtggagtcaggtgaggcatctttacatctaagaatttttttttaaattttattattattatacttcaagttctagggtacatgtccacaatgcacatgtctgtcacacatgcacacatgtgccatgctggtgtgctgcacccaccaacctgtcatccagcattaggtatatctcctaatgctatccctcccctctccacccaccccacagcaggccccggtatgtgatgttccccttcgtgtgtccatgtgttcttattgttcaattcccacctatgagtgagaatatgtggtgtttggtttttggtccttgcaatagtttgctgagaatgatggtttccagcttcatccatgtccctacaaagaacatgaactcatcattttttatggctgcatagtattccatggtgtatatgtgccacattttcttaatccagtctatcattgttggacatttgggttggttccaagtctttgctattgtgaatagtgctgcaataaacatatgtgtgcatgtgtctttaaaaaaaaaaa

SEQ ID NO: 146456 - DNA, 5399 bp, Artificial Sequence
  derived and/or modified sequence
ggggaagcttcgcaggcgtgcacggagcagtgagatcactggcgttataaatatcccggtgccagcgcggagatccgctcgggtggcctctctcttcccctctccccttctcttccccgaggctatgtccacccggtgcggcgaggcgggcagagccagaggcacgcagccgcacaggggctacagagcccagaatcagccctacaagatgcacttaggacccccgcggctggaagaatgagcttgtccttcctcctcctcctcttcttcagccacctgatcctcagcgcctgggctcacggggagaagcgtctcgcccccaaagggcaacccggacccgctgccactgataggaaccctagaggctccagcagcagacagagcagcagtagcgctatgtcttcctcttctgcctcctcctcccccgcagcttctctgggcagccaaggaagtggcttggagcagagcagtttccagtggagcccctcggggcgccggaccggcagcctctactgcagagtgggcatcggtttccatctgcagatctacccggatggcaaagtcaatggatcccacgaagccaatatgttaagtgttttggaaatatttgctgtgtctcaggggattgtaggaatacgaggagttttcagcaacaaatttttagcgatgtcaaaaaaaggaaaactccatgcaagtgccaagttcacagatgactgcaagttcagggagcgttttcaagaaaatagctataatacctatgcctcagcaatacatagaactgaaaaaacagggcgggagtggtatgtggccctgaataaaagaggaaaagccaaacgagggtgcagcccccgggttaaaccccagcatatctctacccattttctgccaagattcaagcagtcggagcagccagaactttctttcacggttactgttcctgaaaagaaaaagccacctagccctatcaagccaaagattcccctttctgcacctcggaaaaataccaactcagtgaaatacagactcaagtttcgctttggataatattcctcttggccttgtgagaaaccattctttcccctcaggagtttctataggtgtcttcagagttctgaagaaaaattactggacacagcttcagctatacttacactgtattgaagtcacgtcatttgtttcaatgtgactgaaacaaaatgttttttgataggaaggaaactggaattctttgtactaatacagggagcacactccttcagttcagcaagacataaagccttttgctttatgcttgagggatatttagaactttgtattttcggaaagttaaataacagggactacgtatttttctgacttttacagattaacctgaaagaacatacatgatacatttttatttttggtttccaaagaatattttgatgcagataaaatattttgttaacttttgtttttttttgtttgttttcttaaaagtacctctgcattgagcatattttcttacttttattattttaattaatatgacataagcaatcattttatgctgtttatgaattataaatgtgtttatagctcatttgtaatatggaaatcttttacatttttcctattcactgcacttttttattgtttttatttctagccatacctcagataatatgtttagttttacattttaaaatgtttaaattctctttcacagcaccaaaggctcagcttggatttgtgtgtatgtgtatgtcaattcatgacattatgtggaatcctaaacctttggtggctgggatatgatgggttagaagcaaggagaaaatataaggactttttgatggaattaaatgtgggaggtaaggaaaaggatttagaggtaaaagtacactaagtttgcaacatttattgagatctaagtctgtcttgccttcatttctctttttatctcccccttgccctcattcttgaacagctggaggaatacattttattctgtccatgaagcatacactatgaaattcaagtgcttaaaaatacttctatgactctctgctatcccactgtatagatccacagggagcaaacacttagaaatgatagagaactgaaggagatcaatggtttaacagttatccatgccaagtcccattgtcagaaatattcttattactcagtcaaacactctttgagcttcccttcctaaaggtaaccaatccagtgaatagatgtgcccttttataaggaaacttctgatgtttattaaaaaaactggccttttgatagaggtaacttaatttgggaatttgttgtgttgaaatggcatttaatttcaacctaaatactgactgctggacataaatcacagaaaatttaacttaagaaaatttacaaaatttattctcaggtaatcattttaataaagttctgcaaaatacacgtttatcttacattcagaaatgtggcaaaaaaggcatagctaaaggctaaacatatggctttagtagtaacaaaagggttcatagaaacttcatggtttgcatttaaacatgtttaaagtgtacttataaactatttttttcttaaagcaaactatgatttattttggtgcacaaatacaaagtggaaacttaccaaaattgaactagctaccatataagcagattgctttaatttgatgggaaaatagtacacacatatatataacaaataatatattaaaaaacccatccatcaactaaaacattatatgtatacatcagtatagtgttttattataaagccaattatctgattaagcattctttccactgaatgcataatgtttaaatagcataaaatgaaatgctacaaaaattgaactaatttatactttaaagtatttctgggttaaatgaaacaatgaaattttttagtatgttcaactctcatccaaatggcatatgaccctgtttacacagcctaaagctaaaaatattactctagtttattctaatctattgttaagtattgtgcactgtataccaagttcttagggcacatgaaaaattttagctgccaaacaggaactagtaaacatatgttcctaataagtgaagggaaagataataatgatggtcaacaataagccacgtcaatgcataagttgtataggctaaatgttgcttgtaggctacattaaactcaaatgtaatagtttatcttatactcctggtttgatttgattagcatattaacgtgaaagtaggatagctactaaatatatattatgcaagtcaggaatcattaatttcaaaatttaaagccatgctaaaattaaaaagaaaatattaaattacacaattacacttgtctttactggccatacaaaatgattttttttttttttttgagacagagtcttgctctgtcaccaggctggagtgcagtggcatgatctcggctcactgcaacctccaactccctggtttaagggattctcctgcctcagcctcccaagtagctgggattacagactcatgccaccacgccagctaatttttgtatttttagtagagacggggtttcaccatgttggtcaggatggtctcaatcctggcctcttgatagtcctgacctcatgatctgcccacctcggcctccccaaagtgctgggattacaggtacaatgatgtataattaatgcttagtgaagcataaagttacctacatcaattaattaaatgaacttatgtacagaaaacatgtataaatataagtctatactaatgcttacaactttctaagagggttcttgcttatgtagctttttattattttaagtaactagaaccaccaaatatcaaataaaattatttggttatggttatgttcatctaaacacaacaataacttttatattaatatttaggagtctattttgtctataggtgacaaacatctccagactaacatgtcagttttatcaattatattatgtttaattatttaagatttctttatgtggaacatctatagagataaatagaaattttcaataagatgtagtaacactgtgatttatctttcaagagtctctcttcacttccttctaaagagactaatttgagagtacaggtgcatattaattttcttggttctttcagctgaattatattggtccagaagttcaaaatcatgtgacaataataagggatactgacagaagttatttccaagtttgtgtatatattataaaaattacatatataaaactaaggcttttatttctgttatttttaagcttttatttcttgtagctaaaaataaaacatcataaatctggtaggtaaatttcttattaaatcaatcttgaaatagaaaatgtaataactttcttaccattaacattttttacccttccatagaagggagggaataaatcatgacttatcccattttcaataacaaaacgaaactatggcactaaccaaaaacttgcattctggcataatttttacagttgcagagaattgtttctgggctcattaaaaaaagtagtattgcagacattgctgcaatgggaagcagacaataacttcttaaaggaattctacacctcctttaagatttacttaattgctacatctaaattctgataatttaaaatccattttaggtgataaaattttttaaaagttttgaaggaaacctctggataaatggacaaggcctaatttttttttgtagtcaatccaactgtactggccaatttttgaaataagattatatgattaggtattagcagagacaaagagttacctcctccatcttactctgccctatttgaaagtctcaggggagaaaagggaacaagatgctgatccaacctgagtggagtcaggtgaggcatctttacatctaagaatttttttttaaattttattattattatacttcaagttctagggtacatgtccacaatgcacatgtctgtcacacatgcacacatgtgccatgctggtgtgctgcacccaccaacctgtcatccagcattaggtatatctcctaatgctatccctcccctctccacccaccccacagcaggccccggtatgtgatgttccccttcgtgtgtccatgtgttcttattgttcaattcccacctatgagtgagaatatgtggtgtttggtttttggtccttgcaatagtttgctgagaatgatggtttccagcttcatccatgtccctacaaagaacatgaactcatcattttttatggctgcatagtattccatggtgtatatgtgccacattttcttaatccagtctatcattgttggacatttgggttggttccaagtctttgctattgtgaatagtgctgcaataaacatatgtgtgcatgtgtctttaaaaaaaaaaa

SEQ ID NO: 146457 - DNA, 807 bp, Artificial Sequence
  derived and/or modified sequence
atgagcctgagcttcctgctgctgctgttcttcagccacctgatcctgagcgcctgggcccacggcgagaagagactggcccccaagggccagcccggccccgccgccaccgacagaaaccccagaggcagcagcagcagacagagcagcagcagcgccatgagcagcagcagcgccagcagcagccccgccgccagcctgggcagccagggcagcggcctggagcagagcagcttccagtggagccccagcggcagaagaaccggcagcctgtactgcagagtgggcatcggcttccacctgcagatctaccccgacggcaaggtgaacggcagccacgaggccaacatgctgagcgtgctggagatcttcgccgtgagccagggcatcgtgggcatcagaggcgtgttcagcaacaagttcctggccatgagcaagaagggcaagctgcacgccagcgccaagttcaccgacgactgcaagttcagagagagattccaggagaacagctacaacacctacgccagcgccatccacagaaccgagaagaccggcagagagtggtacgtggccctgaacaagagaggcaaggccaagagaggctgcagccccagagtgaagccccagcacatcagcacccacttcctgcccagattcaagcagagcgagcagcccgagctgagcttcaccgtgaccgtgcccgagaagaagaagccccccagccccatcaagcccaagatccccctgagcgcccccagaaagaacaccaacagcgtgaagtacagactgaagttcagattcggctag

SEQ ID NO: 146458 - DNA, 807 bp, Artificial Sequence
  derived and/or modified sequence
atgagccttagctttctcctcctgttgttttttagccatttgattcttagtgcctgggcacacggcgagaagaggctggcaccgaaaggacagccaggccccgccgcaaccgatcgcaatcccaggggaagtagctcccgccaatcatctagttcagcaatgtcttcgagcagcgcctcttcaagcccagccgccagcctggggtctcaggggagtggtctggaacagtcgtctttccagtggagtccttctggaagacgtaccggttcgttatattgtagagttgggattgggtttcacttacagatttaccctgacgggaaggtgaacggaagtcacgaggcgaatatgttgagcgtgttagagattttcgccgtttcccagggaattgtgggtattcgcggcgttttctccaataagtttctggccatgtctaagaagggcaaactgcatgccagtgctaaattcactgacgactgtaaatttagagagagattccaagagaacagttacaatacatatgcttccgctattcaccggacagaaaaaacgggtagggaatggtatgtagctctgaacaagcgaggaaaagcgaaaagggggtgctcgccccgggtcaagccccagcatatctccactcattttcttcccagatttaagcagagcgagcagccagagctgtcatttacggtgacggtgcccgagaaaaagaagcctccatcgcctattaaacctaaaatccctctttcagccccaaggaaaaacacaaactcagttaaataccggctgaagtttcgcttcggatag

SEQ ID NO: 146459 - DNA, 807 bp, Artificial Sequence
  derived and/or modified sequence
atgagcctgtccttcctgctgctgctcttcttcagccacctgatcctgagcgcctgggcccatggagagaagaggctggcccccaagggccagcccggccctgctgccacagacaggaacccccggggcagcagcagccggcagagcagcagcagcgccatgagcagcagcagcgccagcagcagccctgctgccagcctgggcagccagggcagcggcctggagcagagcagcttccagtggagccccagcggccgcaggacaggcagcctgtactgccgggtgggcatcggcttccacctgcagatctacccagatggcaaggtgaatggcagccatgaggccaacatgctgtctgtgctggagatctttgctgtgtcccagggcatcgtgggcatccggggcgtcttcagcaacaagttcctggccatgagcaagaagggcaagctgcacgccagcgccaagttcacagatgactgcaagttccgggagcgcttccaggagaacagctacaacacctacgccagcgccatccacaggacagagaagacaggccgggagtggtacgtggccctgaacaagaggggcaaggccaagaggggctgcagcccccgggtgaagccccagcacatcagcacccacttcctgccccgcttcaagcagagcgagcagcctgagctgtccttcaccgtgacagtgcctgagaagaagaagccacccagccccatcaagcccaagatccccctgagcgcccccaggaagaacaccaacagcgtgaagtaccgcctgaagttccgctttggatag

SEQ ID NO: 146460 - DNA, 807 bp, Artificial Sequence
  derived and/or modified sequence
atgagcctgagcttcctgctgctgctgttcttcagccacctgatcctgtctgcttgggcccatggagagaaacgactggcaccaaagggccagccggggcccgctgcaacggaccgaaatcctcgtgggtcttcttctcggcagtcctcgagcagcgcaatgagttcctcttcggccagtagctcaccagccgcctcgctaggaagccaagggtcaggactggaacagtcctcctttcagtggtcaccatccggacgcaggacagggagtctgtactgccgtgtcggaatcggcttccacttgcagatttaccctgacggaaaagtgaacggttcccacgaggccaatatgctatcagtcctcgaaatctttgctgtgagccagggaattgttggcattcgtggagtcttttccaacaaatttctcgcaatgagcaagaaagggaaattgcatgctagtgcaaagttcacagacgattgtaagtttcgggaacgatttcaggagaatagttacaacacctatgcatccgctattcatcggacggagaaaacagggagagagtggtacgttgctctgaataaacgtggcaaggctaagagagggtgcagccctagggtgaaacctcagcatatcagtacccacttcttgcccagatttaaacaatccgagcagccagagctttccttcacagtgactgtgcccgaaaaaaagaagcccccatctcccattaaacctaagatcccgctgtctgccccccgcaaaaatacgaactccgtaaagtaccgactgaagttcaggtttggatag

SEQ ID NO: 146461 - DNA, 807 bp, Artificial Sequence
  derived and/or modified sequence
atgtctttgtcttttttgctgttgctcttcttttctcatctaattttatcagcctgggcccacggagagaagaggcttgccccaaaggggcaaccagggcctgccgctacagaccgaaacccaaggggaagttccagccgccagtccagttcctccgcgatgtcatcaagcagcgcttcgtctagtcccgctgcgagcctggggtcacagggcagcggactggagcagtcctctttccagtggagcccttcaggacgtaggacaggcagcctgtattgcagagtcggtatagggttccatctacagatctatcccgacggcaaggtcaacggaagccacgaagcaaacatgctgagcgtgctggagatttttgccgtgtcgcaaggtatagtgggaatccgcggagtattctctaacaagttcctagccatgtctaaaaaaggtaagctgcacgctagcgccaaattcaccgatgactgtaaattcagagagaggtttcaggagaattcatataacacctacgccagcgctatccatagaacagagaagaccggtcgcgagtggtatgtggcgctgaataaaagaggcaaggctaaaagaggctgctcaccgagagtaaagccccagcatatctctacacacttcctgccaagatttaaacaaagcgaacaacccgaactctcatttacagtgactgtgcctgagaaaaagaagcctccctctcccatcaaacccaagattccattgtctgctccacgtaagaatacaaacagcgtgaagtaccggttgaaattcagattcgggtag

SEQ ID NO: 146462 - DNA, 4555 bp, Artificial Sequence
  derived and/or modified sequence
gcaggcgtgcacggagcagtgagatcactggcgttataaatatcccggtgccagcgcggagatccgctcgggtggcctctctcttcccctctccccttctcttccccgaggctatgtccacccggtgcggcgaggcgggcagagccagaggcacgcagccgcacaggggctacagagcccagaatcagccctacaagatgcacttaggacccccgcggctggaagaatgagcttgtccttcctcctcctcctcttcttcagccacctgatcctcagcgcctgggctcacggggagaagcgtctcgcccccaaagggcaacccggacccgctgccactgataggaaccctagaggctccagcagcagacagagcagcagtagcgctatgtcttcctcttctgcctcctcctcccccgcagcttctctgggcagccaaggaagtggcttggagcagagcagtttccagtggagcccctcggggcgccggaccggcagcctctactgcagagtgggcatcggtttccatctgcagatctacccggatggcaaagtcaatggatcccacgaagccaatatgttaagtgttttggaaatatttgctgtgtctcaggggattgtaggaatacgaggagttttcagcaacaaatttttagcgatgtcaaaaaaaggaaaactccatgcaagtgccaagttcacagatgactgcaagttcagggagcgttttcaagaaaatagctataatacctatgcctcagcaatacatagaactgaaaaaacagggcgggagtggtatgtggccctgaataaaagaggaaaagccaaacgagggtgcagcccccgggttaaaccccagcatatctctacccattttctgccaagattcaagcagtcggagcagccagaactttctttcacggttactgttcctgaaaagaaaaagccacctagccctatcaagccaaagattcccctttctgcacctcggaaaaataccaactcagtgaaatacagactcaagtttcgctttggataatattcctcttggccttgtgagaaaccattctttcccctcaggagtttctataggtgtcttcagagttctgaagaaaaattactggacacagcttcagctatacttacactgtattgaagtcacgtcatttgtttcaatgtgactgaaacaaaatgttttttgataggaaggaaactggaattctttgtactaatacagggagcacactccttcagttcagcaagacataaagccttttgctttatgcttgagggatatttagaactttgtattttcggaaagttaaataacagggactacgtatttttctgacttttacagattaacctgaaagaacatacatgatacatttttatttttggtttccaaagaatattttgatgcagataaaatattttgttaacttttgtttttttttgtttgttttcttaaaagtacctctgcattgagcatattttcttacttttattattttaattaatatgacataagcaatcattttatgctgtttatgaattataaatgtgtttatagctcatttgtaatatggaaatcttttacatttttcctattcactgcacttttttattgtttttatttctagccatacctcagataatatgtttagttttacattttaaaatgtttaaattctctttcacagcaccaaaggctcagcttggatttgtgtgtatgtgtatgtcaattcatgacattatgtggaatcctaaacctttggtggctgggatatgatgggttagaagcaaggagaaaatataaggactttttgatggaattaaatgtgggaggtaaggaaaaggatttagaggtaaaagtacactaagtttgcaacatttattgagatctaagtctgtcttgccttcatttctctttttatctcccccttgccctcattcttgaacagctggaggaatacattttattctgtccatgaagcatacactatgaaattcaagtgcttaaaaatacttctatgactctctgctatcccactgtatagatccacagggagcaaacacttagaaatgatagagaactgaaggagatcaatggtttaacagttatccatgccaagtcccattgtcagaaatattcttattactcagtcaaacactctttgagcttcccttcctaaaggtaaccaatccagtgaatagatgtgcccttttataaggaaacttctgatgtttattaaaaaaactggccttttgatagaggtaacttaatttgggaatttgttgtgttgaaatggcatttaatttcaacctaaatactgactgctggacataaatcacagaaaatttaacttaagaaaatttacaaaatttattctcaggtaatcattttaataaagttctgcaaaatacacgtttatcttacattcagaaatgtggcaaaaaaggcatagctaaaggctaaacatatggctttagtagtaacaaaagggttcatagaaacttcatggtttgcatttaaacatgtttaaagtgtacttataaactatttttttcttaaagcaaactatgatttattttggtgcacaaatacaaagtggaaacttaccaaaattgaactagctaccatataagcagattgctttaatttgatgggaaaatagtacacacatatatataacaaataatatattaaaaaacccatccatcaactaaaacattatatgtatacatcagtatagtgttttattataaagccaattatctgattaagcattctttccactgaatgcataatgtttaaatagcataaaatgaaatgctacaaaaattgaactaatttatactttaaagtatttctgggttaaatgaaacaatgaaattttttagtatgttcaactctcatccaaatggcatatgaccctgtttacacagcctaaagctaaaaatattactctagtttattctaatctattgttaagtattgtgcactgtataccaagttcttagggcacatgaaaaattttagctgccaaacaggaactagtaaacatatgttcctaataagtgaagggaaagataataatgatggtcaacaataagccacgtcaatgcataagttgtataggctaaatgttgcttgtaggctacattaaactcaaatgtaatagtttatcttatactcctggtttgatttgattagcatattaacgtgaaagtaggatagctactaaatatatattatgcaagtcaggaatcattaatttcaaaatttaaagccatgctaaaattaaaaagaaaatattaaattacacaattacacttgtctttactggccatacaaaatgattttttttttttttttgagacagagtcttgctctgtcaccaggctggagtgcagtggcatgatctcggctcactgcaacctccaactccctggtttaagggattctcctgcctcagcctcccaagtagctgggattacagactcatgccaccacgccagctaatttttgtatttttagtagagacggggtttcaccatgttggtcaggatggtctcaatcctggcctcttgatagtcctgacctcatgatctgcccacctcggcctccccaaagtgctgggattacaggtacaatgatgtataattaatgcttagtgaagcataaagttacctacatcaattaattaaatgaacttatgtacagaaaacatgtataaatataagtctatactaatgcttacaactttctaagagggttcttgcttatgtagctttttattattttaagtaactagaaccaccaaatatcaaataaaattatttggttatggttatgttcatctaaacacaacaataacttttatattaatatttaggagtctattttgtctataggtgacaaacatctccagactaacatgtcagttttatcaattatattatgtttaattatttaagatttctttatgtggaacatctatagagataaatagaaattttcaataagatgtagtaacactgtgatttatctttcaagagtctctcttcacttccttctaaagagactaatttgagagtacaggtgcatattaattttcttggttctttcagctgaattatattggtccagaagttcaaaatcatgtgacaataataagggatactgacagaagttatttccaagtttgtgtatatattataaaaattacatatataaaactaaggcttttatttctgttatttttaagcttttatttcttgtagctaaaaataaaacatcataaatctggtaggtaaatttcttattaaatcaatcttgaaatagaaaatgtaataactttcttaccattaacattttttacccttccatagaagggagggaataaatcatgacttatcccattttcaataacaaaacgaaactatggcactaaccaaaaacttgcattctggcataatttttacagttgcagagaattgtttctgggctcattaaaaaaagtagtattgcagacattgctgcaatgggaagcagaca

SEQ ID NO: 146463 - DNA, 5234 bp, Artificial Sequence
  derived and/or modified sequence
tatcccggtgccagcgcggagatccgctcgggtggcctctctcttcccctctccccttctcttccccgaggctatgtccacccggtgcggcgaggcgggcagagccagaggcacgcagccgcacaggggctacagagcccagaatcagccctacaagatgcacttaggacccccgcggctggaagaatgagcttgtccttcctcctcctcctcttcttcagccacctgatcctcagcgcctgggctcacggggagaagcgtctcgcccccaaagggcaacccggacccgctgccactgataggaaccctagaggctccagcagcagacagagcagcagtagcgctatgtcttcctcttctgcctcctcctcccccgcagcttctctgggcagccaaggaagtggcttggagcagagcagtttccagtggagcccctcggggcgccggaccggcagcctctactgcagagtgggcatcggtttccatctgcagatctacccggatggcaaagtcaatggatcccacgaagccaatatgttaagccaagttcacagatgactgcaagttcagggagcgttttcaagaaaatagctataatacctatgcctcagcaatacatagaactgaaaaaacagggcgggagtggtatgtggccctgaataaaagaggaaaagccaaacgagggtgcagcccccgggttaaaccccagcatatctctacccattttctgccaagattcaagcagtcggagcagccagaactttctttcacggttactgttcctgaaaagaaaaagccacctagccctatcaagccaaagattcccctttctgcacctcggaaaaataccaactcagtgaaatacagactcaagtttcgctttggataatattcctcttggccttgtgagaaaccattctttcccctcaggagtttctataggtgtcttcagagttctgaagaaaaattactggacacagcttcagctatacttacactgtattgaagtcacgtcatttgtttcaatgtgactgaaacaaaatgttttttgataggaaggaaactggaattctttgtactaatacagggagcacactccttcagttcagcaagacataaagccttttgctttatgcttgagggatatttagaactttgtattttcggaaagttaaataacagggactacgtatttttctgacttttacagattaacctgaaagaacatacatgatacatttttatttttggtttccaaagaatattttgatgcagataaaatattttgttaacttttgtttttttttgtttgttttcttaaaagtacctctgcattgagcatattttcttacttttattattttaattaatatgacataagcaatcattttatgctgtttatgaattataaatgtgtttatagctcatttgtaatatggaaatcttttacatttttcctattcactgcacttttttattgtttttatttctagccatacctcagataatatgtttagttttacattttaaaatgtttaaattctctttcacagcaccaaaggctcagcttggatttgtgtgtatgtgtatgtcaattcatgacattatgtggaatcctaaacctttggtggctgggatatgatgggttagaagcaaggagaaaatataaggactttttgatggaattaaatgtgggaggtaaggaaaaggatttagaggtaaaagtacactaagtttgcaacatttattgagatctaagtctgtcttgccttcatttctctttttatctcccccttgccctcattcttgaacagctggaggaatacattttattctgtccatgaagcatacactatgaaattcaagtgcttaaaaatacttctatgactctctgctatcccactgtatagatccacagggagcaaacacttagaaatgatagagaactgaaggagatcaatggtttaacagttatccatgccaagtcccattgtcagaaatattcttattactcagtcaaacactctttgagcttcccttcctaaaggtaaccaatccagtgaatagatgtgcccttttataaggaaacttctgatgtttattaaaaaaactggccttttgatagaggtaacttaatttgggaatttgttgtgttgaaatggcatttaatttcaacctaaatactgactgctggacataaatcacagaaaatttaacttaagaaaatttacaaaatttattctcaggtaatcattttaataaagttctgcaaaatacacgtttatcttacattcagaaatgtggcaaaaaaggcatagctaaaggctaaacatatggctttagtagtaacaaaagggttcatagaaacttcatggtttgcatttaaacatgtttaaagtgtacttataaactatttttttcttaaagcaaactatgatttattttggtgcacaaatacaaagtggaaacttaccaaaattgaactagctaccatataagcagattgctttaatttgatgggaaaatagtacacacatatatataacaaataatatattaaaaaacccatccatcaactaaaacattatatgtatacatcagtatagtgttttattataaagccaattatctgattaagcattctttccactgaatgcataatgtttaaatagcataaaatgaaatgctacaaaaattgaactaatttatactttaaagtatttctgggttaaatgaaacaatgaaattttttagtatgttcaactctcatccaaatggcatatgaccctgtttacacagcctaaagctaaaaatattactctagtttattctaatctattgttaagtattgtgcactgtataccaagttcttagggcacatgaaaaattttagctgccaaacaggaactagtaaacatatgttcctaataagtgaagggaaagataataatgatggtcaacaataagccacgtcaatgcataagttgtataggctaaatgttgcttgtaggctacattaaactcaaatgtaatagtttatcttatactcctggtttgatttgattagcatattaacgtgaaagtaggatagctactaaatatatattatgcaagtcaggaatcattaatttcaaaatttaaagccatgctaaaattaaaaagaaaatattaaattacacaattacacttgtctttactggccatacaaaatgattttttttttttttttgagacagagtcttgctctgtcaccaggctggagtgcagtggcatgatctcggctcactgcaacctccaactccctggtttaagggattctcctgcctcagcctcccaagtagctgggattacagactcatgccaccacgccagctaatttttgtatttttagtagagacggggtttcaccatgttggtcaggatggtctcaatcctggcctcttgatagtcctgacctcatgatctgcccacctcggcctccccaaagtgctgggattacaggtacaatgatgtataattaatgcttagtgaagcataaagttacctacatcaattaattaaatgaacttatgtacagaaaacatgtataaatataagtctatactaatgcttacaactttctaagagggttcttgcttatgtagctttttattattttaagtaactagaaccaccaaatatcaaataaaattatttggttatggttatgttcatctaaacacaacaataacttttatattaatatttaggagtctattttgtctataggtgacaaacatctccagactaacatgtcagttttatcaattatattatgtttaattatttaagatttctttatgtggaacatctatagagataaatagaaattttcaataagatgtagtaacactgtgatttatctttcaagagtctctcttcacttccttctaaagagactaatttgagagtacaggtgcatattaattttcttggttctttcagctgaattatattggtccagaagttcaaaatcatgtgacaataataagggatactgacagaagttatttccaagtttgtgtatatattataaaaattacatatataaaactaaggcttttatttctgttatttttaagcttttatttcttgtagctaaaaataaaacatcataaatctggtaggtaaatttcttattaaatcaatcttgaaatagaaaatgtaataactttcttaccattaacattttttacccttccatagaagggagggaataaatcatgacttatcccattttcaataacaaaacgaaactatggcactaaccaaaaacttgcattctggcataatttttacagttgcagagaattgtttctgggctcattaaaaaaagtagtattgcagacattgctgcaatgggaagcagacaataacttcttaaaggaattctacacctcctttaagatttacttaattgctacatctaaattctgataatttaaaatccattttaggtgataaaattttttaaaagttttgaaggaaacctctggataaatggacaaggcctaatttttttttgtagtcaatccaactgtactggccaatttttgaaataagattatatgattaggtattagcagagacaaagagttacctcctccatcttactctgccctatttgaaagtctcaggggagaaaagggaacaagatgctgatccaacctgagtggagtcaggtgaggcatctttacatctaagaatttttttttaaattttattattattatacttcaagttctagggtacatgtccacaatgcacatgtctgtcacacatgcacacatgtgccatgctggtgtgctgcacccaccaacctgtcatccagcattaggtatatctcctaatgctatccctcccctctccacccaccccacagcaggccccggtatgtgatgttccccttcgtgtgtccatgtgttcttattgttcaattcccacctatgagtgagaatatgtggtgtttggtttttggtccttgcaatagtttgctgagaatgatggtttccagcttcatccatgtccctacaaagaacatgaactcatcattttttatggctgcatagtattccatggtgtatatgtgccacattttcttaatccagtctatcattgttggacatttgggttggttccaagtctttgctattgtgaatagtgctgcaataaacatatgtgtgcatgtgtcttta

SEQ ID NO: 146464 - protein, 572 aa, Artificial Sequence
  derived and/or modified sequence
MDAQTWPVGFRCLLLLALVGSARSEGVQTCEEVRKLFQWRLLGAVRGLPDSPRAGPDLQVCISKKPTCCTRKMEERYQIAARQDMQQFLQTSSSTLKFLISRNAAAFQETLETLIKQAENYTSILFCSTYRNMALEAAASVQEFFTDVGLYLFGADVNPEEFVNRFFDSLFPLVYNHLINPGVTDSSLEYSECIRMARRDVSPFGNIPQRVMGQMGRSLLPSRTFLQALNLGIEVINTTDYLHFSKECSRALLKMQYCPHCQGLALTKPCMGYCLNVMRGCLAHMAELNPHWHAYIRSLEELSDAMHGTYDIGHVLLNFHLLVNDAVLQAHLNGQKLLEQVNRICGRPVRTPTQSPRCSFDQSKEKHGMKTTTRNSEETLANRRKEFINSLRLYRSFYGGLADQLCANELAAADGLPCWNGEDIVKSYTQRVVGNGIKAQSGNPEVKVKGIDPVINQIIDKLKHVVQLLQGRSPKPDKWELLQLGSGGGMVEQVSGDCDDEDGCGGSGSGEVKRTLKITDWMPDDMNFSDVKQIHQTDTGSTLDTTGAGCAVATESMTFTLISVVMLLPGIW

SEQ ID NO: 146465 - DNA, 1719 bp, Artificial Sequence
  derived and/or modified sequence
atggacgcacagacttggcctgtgggattccgctgtctgctgctgttggctcttgtggggagtgccaggagcgaaggagtacagacttgtgaggaggttcggaaacttttccagtggcgtctgctaggcgctgtcagaggcttgccagactctccccgagcaggcccggacttgcaagtgtgtatctccaagaagcccacctgctgcaccaggaaaatggaagagcgctatcagattgccgctcgtcaagatatgcaacaattcctgcagacaagctcatctactttgaagtttctgataagcagaaacgccgctgctttccaggaaaccctggagacgttaatcaagcaggctgagaattacacaagtattctgttctgtagcacttaccggaatatggcccttgaggctgccgcctctgtacaagaattcttcacagacgtgggactgtacttatttggcgcggacgttaacccggaggaattcgtgaaccggttcttcgactccctctttcccttggtgtataaccatcttataaatccgggggtcacggactcttctcttgagtattcagagtgtattcggatggctaggcgcgatgtgtccccattcggcaacatcccccagagagtgatgggtcagatgggcaggtcactgctgccctcccgtacctttctccaggccctaaacctaggaattgaggtgatcaatacaactgattatctgcatttcagcaaggagtgttctcgcgccctcttgaaaatgcaatattgtccccactgccaggggttggcactcactaagccctgtatggggtactgccttaatgtcatgagaggctgcctagcacacatggccgagctaaacccgcactggcatgcttacatcaggtcactagaggaactgtctgatgccatgcacggcacatatgatattggccacgtgctgctgaatttccacctcttagtcaacgacgccgttctccaggcacatcttaacggtcagaagttgttggaacaggtgaacaggatctgtggaagacctgtaagaacccccactcagagtcctcgttgctcttttgatcagtctaaagagaagcacggaatgaagactactactcggaatagcgaagaaaccttagccaaccgtcgcaaagaatttatcaactctcttagactttataggtctttctacggcggcttagcagaccagctctgcgctaacgagctggccgctgccgatggtctgccttgctggaatggagaggatatagtgaagtcctacactcagcgagtagtcggtaacggaattaaagcacaatccggaaaccctgaagtgaaagttaaagggatagaccctgtaatcaaccagattatcgataagctgaaacacgtagttcaactgcttcaaggccggtcaccaaaacctgacaaatgggaactgttgcagctgggcagcgggggagggatggtagagcaagtttctggcgactgcgacgatgaagatggctgtggaggaagcgggagtggtgaagtaaagcgcaccctcaagattactgactggatgccagacgatatgaacttctctgatgtgaaacagatccaccagactgatactggtagcacactggacaccaccggagccgggtgcgcagtggcaaccgaaagtatgacattcaccctgatctctgtcgtcatgttgctgcccggaatttggtag

SEQ ID NO: 146466 - DNA, 2889 bp, Artificial Sequence
  derived and/or modified sequence
ggcagtggcggcagtggcggcagtggcggcagcggcagcagttgcagcagtggtggccagagcggatgcttgcgggctccctgcggctccactagttttcttcgccccgcccagccgcccactcttctcggctagggaagaagaccagagggtgctcagctggaaaactctggtgtctcagcttagggcctcctccgggaagagctaactgctcccaggtgaagccggtgcccgcgggcggtccgtacaccccgcagccggctcgcaccgctcgagagcctcggccgctgtgtcttccacgtctgcagctcagccagggcgcgcagggcgagtggggtccactggcgggtaaaggggaccaggacggcgaggatggacgcacagacctggcccgtgggctttcgctgcctcctccttctggccctggttgggtccgcccgcagcgagggcgtgcagacctgcgaagaagttcggaaacttttccagtggcggctgctgggagctgtcagggggctgccggattcgccgcgggcaggacctgatcttcaggtttgcatatccaaaaagcctacatgttgcaccaggaagatggaggagagatatcagattgcggctcgccaggatatgcagcagtttcttcaaacgtccagctctacattaaagtttctaatatctcgaaatgcggctgcttttcaagaaacccttgaaactctcatcaaacaagcagaaaattacaccagtatacttttttgcagtacctacaggaacatggccttggaggctgctgcttcggttcaggagttcttcactgatgtggggctgtatttatttggtgcggatgttaatcctgaagaatttgtaaacagattttttgacagtctttttcctctggtctacaaccacctcattaaccctggtgtgactgacagttccctggaatactcagaatgcatccggatggctcgccgggatgtgagtccatttggtaatattccccaaagagtaatgggacagatggggaggtccctgctgcccagccgcacttttctgcaggcactcaatctgggcattgaagtcatcaacaccacagactatctgcacttctccaaagagtgcagcagagccctcctgaagatgcaatactgcccgcactgccaaggcctggcgctcactaagccttgtatgggatactgcctcaatgtcatgcgaggctgcctggcgcacatggcggagcttaatccacactggcatgcatatatccggtcgttggaagaactctcggatgcaatgcatggaacatacgacattggacacgtgctgctgaactttcacttgcttgttaatgatgctgtgttacaggctcacctcaatggacaaaaattattggaacaggtaaataggatttgtggccgccctgtaagaacacccacacaaagcccccgttgttcttttgatcagagcaaagagaagcatggaatgaagaccaccacaaggaacagtgaagagacgcttgccaacagaagaaaagaatttatcaacagccttcgactgtacaggtcattctatggaggtctagctgatcagctttgtgctaatgaattagctgctgcagatggacttccctgctggaatggagaagatatagtaaaaagttatactcagcgtgtggttggaaatggaatcaaagcccagtctggaaatcctgaagtcaaagtcaaaggaattgatcctgtgataaatcagattattgataaactgaagcatgttgttcagttgttacagggtagatcacccaaacctgacaagtgggaacttcttcagctgggcagtggtggaggcatggttgaacaagtcagtggggactgtgatgatgaagatggttgcgggggatcaggaagtggagaagtcaagaggacactgaagatcacagactggatgccagatgatatgaacttcagtgatgtaaagcaaatccatcaaacagacactggcagtactttagacacaacaggagcaggatgtgcagtggcgactgaatctatgacattcactctgataagtgtggtgatgttacttcccgggatttggtaactgaactcttctgtcctgacataccttactgaagtctcgatttcttctctctctgcatatgcctggaataagagatcctttttcaatgtaacaattatatttatgaaaagatatgttacactaacttctcagaagccaagctgaaatattcataaagtccctaaaactcaacgtttaaatgacacactttaaaaatatgtcttttttcaatctaactgaaaaccttcttaacttctaatatattaaatctgaagatgtgaagggcacagaagtgactttgaataagaagaatttagtgtatctgtaattttattatcaattccaagccccttcctttctaaattaaaaatgttttcatttgaaagtgtatttgccagacaatgaaaacagtatgcagtatttcttaaagtattgaaattagaatatcatgaaataaatcaaaacatacaatggcaagtagtatgcatgcatattcaagagactcttccatttttgcaagctgtagaaggaaatgtctgaatgtctataagttatggggtagattcttgagaagcatttcatataatttcactgaagaaccttgataattttgacccactgtaacttagccactgatgaaccttaaagctgagtattttattaacacctgatttgtattccattatattcaaaatgcatctttggtattgtgcctctgctcccatctctctctttgcctcatagatttagctatgttgggaagcacatgcttgctctaggaatatctccaataaagctgttaactatttggtggaaaaa

SEQ ID NO: 146467 - DNA, 1719 bp, Artificial Sequence
  derived and/or modified sequence
atggatgcccagacctggcctgtgggcttccgctgcctgctgctgctggccctggtgggcagcgcccggtctgagggcgtgcagacctgtgaggaggtgaggaagctgttccagtggaggctgctgggcgctgtgcggggcctgcctgacagcccccgggccggccctgacctgcaggtgtgcatcagcaagaagcccacctgctgcaccaggaagatggaggagcgctaccagattgctgcccggcaggacatgcagcagttcctgcagaccagcagcagcaccctgaagttcctgatcagcagaaatgctgctgccttccaggagaccctggagaccctcatcaagcaggccgagaactacaccagcatcctcttctgcagcacctacagaaacatggccctggaggccgccgcctctgtgcaggagttcttcacagatgtgggcctgtacctgtttggagcagatgtgaaccctgaggagtttgtgaaccgcttctttgacagcctcttccccctggtgtacaaccacctgatcaaccctggggtgacagacagcagcctggagtacagcgagtgcatccgcatggccaggagagatgtgagccccttcggcaacatcccccagagggtgatgggccagatgggccgcagcctgctgcccagcaggaccttcctgcaggccctgaacctgggcattgaagtcatcaacaccacagactacctgcacttcagcaaagaatgttcccgggccctgctgaagatgcagtactgcccccactgccagggcctggccctgaccaagccctgcatgggctactgcctgaatgtgatgaggggctgcctggcccacatggccgagctgaacccccactggcacgcctacatccgcagcctggaggagctgagtgatgccatgcacggcacctatgacatcggccacgtgctgctgaacttccacctgctggtgaatgatgctgtgctgcaggcccacctgaatggccagaagctgctggagcaggtgaaccgcatctgtggccggcctgtgaggacccccacccagagcccccgctgcagctttgaccagagcaaggagaagcacggcatgaagaccaccaccaggaacagcgaggagaccctggccaacagaaggaaggagttcatcaacagcctgcggctgtaccgctccttctacggcggcctggccgaccagctgtgtgccaatgagctggccgctgctgatggcctgccctgctggaatggagaggacatcgtgaagagctacacccagagggtggtgggcaatggcatcaaggcccagagcggcaaccctgaggtgaaggtgaagggcattgatcctgtgatcaaccagatcatcgacaagctgaagcacgtggtgcagctgctgcagggccgcagccccaagccagacaagtgggagctgctgcagctgggcagcggcggcggcatggtggagcaggtgtctggggactgtgatgatgaagatggctgcggcggcagcggcagcggggaggtgaagaggaccctgaagatcacagactggatgccagatgacatgaacttcagtgatgtgaagcagatccaccagacagacaccggcagcaccctggacaccaccggggccggctgtgctgtggccacagagagcatgaccttcaccctcatctctgtggtgatgctgctgcccggcatctggtag

SEQ ID NO: 146468 - DNA, 1719 bp, Artificial Sequence
  derived and/or modified sequence
atggacgcccagacctggcccgtgggcttccggtgcctgctgctgcttgcattggttgggagcgctcgatcagagggggtccagacctgcgaggaagttagaaagcttttccagtggcgcctgctgggcgcagtccgagggctgccagacagtccaagggcaggccctgacttacaggtttgtatttctaagaaaccaacttgctgcacccggaaaatggaggaaagatatcagatcgccgccaggcaggacatgcagcagttccttcagacgagctcgagtaccttgaagttcctaatcagcagaaacgcggcggcttttcaggagacattggagacactgattaagcaggccgaaaactatacctccatcctgttttgttccacttaccgaaacatggccttggaagctgccgccagtgtgcaggagttctttacggacgtcggcctgtacctgttcggcgcagatgttaaccctgaagagtttgtgaatagattcttcgatagccttttccccctcgtgtataaccacctcattaaccctggggtgacagacagtagtttggagtatagcgagtgtatccgaatggcccggagagatgtcagcccctttgggaacatacctcagagggtgatgggacagatgggcaggagtctgctgcctagcaggacttttcttcaggcgctgaatctgggtatcgaggttattaataccactgactatttacacttttccaaggagtgtagccgggcattgctgaagatgcagtactgtccccactgccaaggtttagcattgacgaaaccttgtatgggctactgccttaatgtcatgaggggttgcctcgcacatatggcagaacttaaccctcattggcatgcctatatacggagcctcgaggagttgagcgatgctatgcacggcacatatgacattgggcacgtgcttctcaatttccatctcttagtgaacgatgccgtccttcaagcccacctgaatgggcagaaacttctggaacaagtgaataggatttgcgggcgacccgtgcgcacaccgacccaatcaccaaggtgctccttcgaccagtctaaggaaaagcatggaatgaagacaaccacgcgcaactcagaggagactctcgctaatcgaaggaaggaattcattaacagcctaaggctctatcgcagcttctacggcggcctcgcagatcagctctgtgcaaacgagcttgcagccgcagacggtctgccttgttggaacggggaggacatcgtgaaaagctacactcaaagggtcgtggggaatggcattaaggcacaatcaggcaacccagaggtgaaggtgaaaggcattgaccccgttattaatcagataattgacaagctcaagcatgttgtgcaattgttgcagggccgctcccccaagcccgacaagtgggagttactgcaactaggttccggcggcggcatggtggaacaggtctccggtgattgtgacgatgaggatgggtgtggaggatccggcagcggcgaggtgaaacggacactgaagattacagactggatgcctgatgacatgaattttagcgacgtcaagcagatacaccagactgacacaggttctacgctggataccacgggggccggctgcgcggtcgctacagaaagtatgactttcacactgatctctgttgtgatgctcttgcctggtatctggtag

SEQ ID NO: 146469 - DNA, 1719 bp, Artificial Sequence
  derived and/or modified sequence
atggacgcccagacatggcctgttggcttccgctgcctgttattgcttgcgcttgtaggcagtgcccgttctgaaggtgttcagacttgtgaggaggttcgcaagttgttccagtggagactccttggggcagtccggggtttacccgatagccccagagcagggccagacctccaagtctgcatctctaagaaaccgacatgctgcacacggaagatggaagagaggtaccagatagcagcgcgacaggacatgcagcagtttttgcagacctcctcgtccaccctgaagtttctcatctctcgcaatgccgcagcctttcaagagacgttggagactcttattaagcaggctgaaaattacacaagcatcctgttttgcagtacataccggaacatggcattagaggcagcagctagcgtccaggagttctttacagacgtgggactctatctgtttggcgcagatgtgaatcctgaggagttcgtcaatcgtttctttgactcactgtttccacttgtgtacaatcacctgatcaatccaggtgttactgattcttctctggagtatagcgaatgcatccgcatggcacggagagatgtctcaccttttgggaatatcccgcagcgtgtaatgggccagatgggcaggtcactcctgccctctaggacattcttgcaagccttgaatctcgggatcgaagtgatcaatacaacagattatctgcacttttccaaagagtgtagccgagcattgttgaagatgcagtattgcccccactgccaaggcctggccctgactaagccttgtatgggctactgcttaaatgtcatgcgcggttgtctggctcatatggctgagctcaatccccactggcacgcctacattcggtccctcgaggaactcagtgatgcaatgcacgggacctacgatattggtcacgtcctcttgaattttcatcttcttgtgaatgacgccgtcctccaggctcaccttaacgggcagaaattactggaacaagtgaacagaatctgtggaaggcccgtcagaacccccacgcagagcccccgatgttcattcgatcagtccaaggagaagcatgggatgaagacaaccacgaggaattcagaagagacactggcaaacagacgcaaggaatttatcaacagtcttcgtttgtaccggagcttctacggcggtctggctgatcagctctgcgctaatgagctcgcggcagctgacggccttccttgttggaatggcgaggacattgtaaaaagctacacacagagagtcgtgggtaatggtatcaaggcccaatccggtaatcctgaagttaaggtgaaggggatcgatcctgtgataaatcaaattatagataaactcaagcatgttgtgcagctcctgcaggggcgatccccaaagcccgataagtgggagctgctccagctcggttctggaggtggaatggtcgaacaggtatctggggactgcgatgatgaagacgggtgcggaggatctggctctggcgaagtgaaacgcaccctgaagatcactgactggatgcctgatgacatgaacttctcagatgtaaagcaaattcatcaaaccgacactggtagcacgctggacaccactggtgccggatgtgccgtggctacagagagcatgacatttaccttgatctcagtggtgatgctcctaccaggcatctggtag

SEQ ID NO: 146470 - DNA, 1719 bp, Artificial Sequence
  derived and/or modified sequence
atggacgcccagacctggcccgtgggcttcagatgcctgctgctgctggccctggtgggcagcgccagaagcgagggcgtgcagacctgcgaggaggtgagaaagctgttccagtggagactgctgggcgccgtgagaggcctgcccgacagccccagagccggccccgacctgcaggtgtgcatcagcaagaagcccacctgctgcaccagaaagatggaggagagataccagatcgccgccagacaggacatgcagcagttcctgcagaccagcagcagcaccctgaagttcctgatcagcagaaacgccgccgccttccaggagaccctggagaccctgatcaagcaggccgagaactacaccagcatcctgttctgcagcacctacagaaacatggccctggaggccgccgccagcgtgcaggagttcttcaccgacgtgggcctgtacctgttcggcgccgacgtgaaccccgaggagttcgtgaacagattcttcgacagcctgttccccctggtgtacaaccacctgatcaaccccggcgtgaccgacagcagcctggagtacagcgagtgcatcagaatggccagaagagacgtgagccccttcggcaacatcccccagagagtgatgggccagatgggcagaagcctgctgcccagcagaaccttcctgcaggccctgaacctgggcatcgaggtgatcaacaccaccgactacctgcacttcagcaaggagtgcagcagagccctgctgaagatgcagtactgcccccactgccagggcctggccctgaccaagccctgcatgggctactgcctgaacgtgatgagaggctgcctggcccacatggccgagctgaacccccactggcacgcctacatcagaagcctggaggagctgagcgacgccatgcacggcacctacgacatcggccacgtgctgctgaacttccacctgctggtgaacgacgccgtgctgcaggcccacctgaacggccagaagctgctggagcaggtgaacagaatctgcggcagacccgtgagaacccccacccagagccccagatgcagcttcgaccagagcaaggagaagcacggcatgaagaccaccaccagaaacagcgaggagaccctggccaacagaagaaaggagttcatcaacagcctgagactgtacagaagcttctacggcggcctggccgaccagctgtgcgccaacgagctggccgccgccgacggcctgccctgctggaacggcgaggacatcgtgaagagctacacccagagagtggtgggcaacggcatcaaggcccagagcggcaaccccgaggtgaaggtgaagggcatcgaccccgtgatcaaccagatcatcgacaagctgaagcacgtggtgcagctgctgcagggcagaagccccaagcccgacaagtgggagctgctgcagctgggcagcggcggcggcatggtggagcaggtgagcggcgactgcgacgacgaggacggctgcggcggcagcggcagcggcgaggtgaagagaaccctgaagatcaccgactggatgcccgacgacatgaacttcagcgacgtgaagcagatccaccagaccgacaccggcagcaccctggacaccaccggcgccggctgcgccgtggccaccgagagcatgaccttcaccctgatcagcgtggtgatgctgctgcccggcatctggtag

SEQ ID NO: 146471 - protein, 312 aa, Artificial Sequence
  derived and/or modified sequence
MAKVFSFILVTTALTMGREISALEDCAQEQMRLRAQVRLLETRVKQQQVKIKQLLQENEVQFLDKGDENTVIDLGSKRQYADCSEIFNDGYKLSGFYKIKPLQSPAEFSVYCDMSDGGGWTVIQRRSDGSENFNRGWKDYENGFGNFVQKHGEYWLGNKNLHFLTTQEDYTLKIDLADFEKNSRYAQYKNFKVGDEKNFYELNIGEYSGTAGDSLAGNFHPEVQWWASHQRMKFSTWDRDHDNYEGNCAEEDQSGWWFNRCHSANLNGVYYSGPYTAKTDNGIVWYTWHGWWYSLKSVVMKIRPNDFIPNVI

SEQ ID NO: 146472 - protein, 282 aa, Artificial Sequence
  derived and/or modified sequence
MRLRAQVRLLETRVKQQQVKIKQLLQENEVQFLDKGDENTVIDLGSKRQYADCSEIFNDGYKLSGFYKIKPLQSPAEFSVYCDMSDGGGWTVIQRRSDGSENFNRGWKDYENGFGNFVQKHGEYWLGNKNLHFLTTQEDYTLKIDLADFEKNSRYAQYKNFKVGDEKNFYELNIGEYSGTAGDSLAGNFHPEVQWWASHQRMKFSTWDRDHDNYEGNCAEEDQSGWWFNRCHSANLNGVYYSGPYTAKTDNGIVWYTWHGWWYSLKSVVMKIRPNDFIPNVI

SEQ ID NO: 146473 - DNA, 939 bp, Artificial Sequence
  derived and/or modified sequence
atggccaaagtattcagcttcatcttggtcacaacagcgctcactatgggcagagagattagtgccctggaagattgcgctcaggaacagatgcgcctgagggctcaagttagactcctggagactagagtgaagcagcagcaagtgaagataaaacagctgttacaagagaatgaagtccagtttttggataaaggggatgagaacacggtcatcgatctgggttccaaaaggcagtacgccgattgctcggagattttcaacgacggctacaagctgagtggtttctacaagatcaaacctctacagtcccctgccgagttcagcgtctactgcgatatgtccgatggagggggatggactgtgatccagagacgttccgacggaagtgaaaatttcaatcgcggatggaaagattatgaaaacgggtttgggaactttgtgcagaagcacggagagtactggctcgggaacaagaatcttcacttcttgactactcaagaagattacaccttaaagatcgacctagcggatttcgaaaagaattcacgctatgcccagtataagaacttcaaggtgggggacgagaagaacttctatgagctgaatataggcgaatatagcggcacggctggggatagcctggcaggtaacttccatccggaggttcagtggtgggcttctcatcagcgaatgaagttctcaacttgggaccgcgatcacgataactacgagggcaattgcgccgaagaagaccaatccggatggtggttcaataggtgccactccgccaatctgaacggggtttactacagtggaccatacactgctaagactgataacggaatcgtctggtatacctggcatgggtggtggtactctttgaaatcagtcgtgatgaagatcagacccaatgactttatcccaaatgtaatttag

SEQ ID NO: 146474 - DNA, 939 bp, Artificial Sequence
  derived and/or modified sequence
atggccaaggtgttctccttcatcctggtgaccacagccctgaccatgggccgggagatcagcgccctggaggactgtgcccaggagcagatgaggctgcgggcccaggtgcggctgctggagaccagggtgaagcagcagcaggtgaagatcaagcagctgctgcaggagaatgaggtgcagttcctggacaagggagatgagaacacagtcatcgacctgggcagcaagaggcagtatgctgactgcagcgagatcttcaatgatggctacaagctgagcggcttctacaagatcaagcccctgcagagccctgctgagttctctgtgtactgtgacatgtctgatggcggcggctggacagtcatccagaggagaagtgatggcagcgagaacttcaacagaggctggaaggactatgaaaatggcttcggcaactttgtgcagaagcatggagagtactggctgggcaacaagaacctgcacttcctgaccacccaggaggactacaccctgaagattgacctggccgactttgagaagaacagccgctatgcccagtacaagaacttcaaggtgggagatgagaagaacttctatgagctgaacatcggggagtacagcggcacagctggggacagcctggccggcaacttccaccctgaggtgcagtggtgggccagccaccagaggatgaagttcagcacctgggaccgggaccatgacaactatgagggcaactgtgccgaggaggaccagagcggctggtggttcaaccgctgccacagcgccaacctgaatggagtgtactacagcggcccctacacagccaagacagacaatggaattgtgtggtacacctggcacggctggtggtacagcctgaagtctgtggtgatgaagatccggcccaatgacttcatccccaacgtcatctag

SEQ ID NO: 146475 - DNA, 939 bp, Artificial Sequence
  derived and/or modified sequence
atggccaaggtgttcagcttcatcctggtgaccaccgccctgaccatgggccgagagatatccgcccttgaggactgcgcacaggaacagatgaggctgcgggctcaggtcaggctcctagagaccagagtgaagcaacaacaggttaaaataaagcagctcctccaggaaaatgaagtgcagttcctggacaagggcgacgagaacactgtgatcgacctgggttccaagcggcaatacgccgactgtagtgagatctttaatgatggttataaactgtccgggttctacaaaattaagcctctacagagcccagctgagtttagtgtgtactgcgatatgagtgatggggggggatggacagtgattcagcgcaggagcgatggttcggagaattttaatagggggtggaaagattatgagaatggcttcgggaacttcgttcagaagcacggcgaatattggcttgggaataagaatctccattttctgaccacccaagaggactatacactaaaaatcgatctggctgactttgaaaagaatagtagatatgcccagtacaagaattttaaggtcggtgacgagaagaacttttatgagctgaacattggggaatacagcgggacggcaggggacagcctggcaggtaatttccaccctgaggtgcagtggtgggcttcccaccagcggatgaaattctctacatgggatcgagatcacgataattatgaaggaaattgcgctgaagaagaccaatcaggctggtggtttaatcgctgtcactccgcaaacctcaatggcgtgtattactcaggcccctacaccgccaaaactgataacggtatcgtgtggtacacctggcacgggtggtggtacagcttaaaatcggtcgtgatgaagatcaggcctaacgactttattccgaacgtgatctag

SEQ ID NO: 146476 - DNA, 939 bp, Artificial Sequence
  derived and/or modified sequence
atggccaaagtcttctcattcatccttgtaaccaccgcattaaccatgggacgagaaatatccgctttggaggactgtgctcaggaacagatgcgcttaagagcgcaggtcaggctgctcgaaacacgggtgaagcagcagcaagtgaaaatcaagcagctgttgcaggagaacgaagtccagttcctcgacaagggagacgagaacactgttattgacttgggcagcaagcgccagtatgctgattgcagcgaaattttcaacgatggctacaagttgtccgggttctataagataaaacctcttcagtcgcccgcagaattctctgtgtactgtgatatgagtgatggagggggttggaccgtcattcagcggaggtcggatgggtcagaaaacttcaataggggctggaaagactacgagaatggcttcggcaactttgtgcaaaagcatggggagtattggctggggaacaagaatttacactttcttactactcaggaggattacacacttaagatcgacttagccgacttcgagaagaacagcaggtacgcccaatacaagaacttcaaagtgggcgacgagaagaatttctatgaactaaacatcggcgaatacagtggtactgcgggagatagcttggctggaaacttccatcccgaagtgcagtggtgggcctcccaccagcgaatgaaattcagtacttgggacagggatcacgataactacgagggcaactgcgccgaggaagaccaatccggttggtggttcaaccgttgtcacagtgccaatttgaacggcgtttactacagcggcccatacacagcgaagacggataacggaatcgtttggtacacttggcatggctggtggtatagcctcaagtcagtggtgatgaagatcaggcccaacgattttatcccaaacgtaatatag

SEQ ID NO: 146477 - DNA, 939 bp, Artificial Sequence
  derived and/or modified sequence
atggctaaagtgttttcttttatactggtcacgacggctctgactatggggcgggagatttctgccctggaagattgtgcacaggaacagatgaggcttcgtgcccaagttcgcttacttgaaactcgtgtcaaacagcagcaagtgaagatcaagcagcttcttcaggaaaacgaagtgcaattccttgataagggagacgaaaacaccgtgattgatctgggctctaagcggcagtacgccgattgctctgaaatttttaacgatggatataagctgtctggtttttacaaaatcaaaccactccagtctcccgcagaattttcggtttattgcgacatgagcgacgggggaggatggacagttatccaaagacggagcgacggctccgaaaattttaatcgaggctggaaagactacgaaaatggctttggaaattttgtgcagaaacacggggagtactggctgggcaacaagaacctgcacttcctgactacgcaagaagattatactttaaaaatagacctagctgactttgaaaagaacagccgttacgcccagtataaaaattttaaggtgggagatgagaagaacttttatgaactgaatattggggaatactcgggaaccgccggcgacagcttagctggtaactttcatcctgaagtccaatggtgggcctcacatcagcgtatgaagttctctacatgggaccgggaccacgacaattacgaaggaaactgcgccgaagaggaccagtcagggtggtggttcaacagatgccatagcgctaatctaaacggtgtctactattccggtccctatacagctaagacagacaatggcatagtatggtacacttggcacggttggtggtattccctgaagtctgtggtcatgaaaatccgacccaacgactttatcccgaacgtgatctag

SEQ ID NO: 146478 - DNA, 939 bp, Artificial Sequence
  derived and/or modified sequence
atggctaaggttttctcctttatacttgtgacaaccgcacttactatgggccgtgagatctcagccctggaggattgtgcgcaagaacaaatgagactgcgtgcccaggtcaggctgctagagacaagggtaaaacaacagcaggtgaagattaagcaacttctccaagaaaacgaagttcaattcttagataagggcgatgaaaacacagttattgacctaggatctaaaaggcaatacgctgactgttccgaaatcttcaacgacggatacaagctttctggattctataagatcaaaccactccagagtccagccgaattttctgtttactgcgatatgagtgatggaggcggatggaccgtaatacagcgcagatccgacgggagcgagaatttcaaccgcggctggaaggactacgagaatggattcggaaattttgtccagaagcacggagaatactggctcggcaataagaacctgcatttcctgactacacaagaagattatactctgaaaattgatttagccgattttgagaaaaattctcggtacgcccagtataagaatttcaaggtgggggatgagaagaatttctacgaactgaatatcggcgagtatagcggtaccgcaggcgattctctggctggaaactttcaccccgaagttcagtggtgggcgtcacatcaacggatgaaattttctacttgggatagggatcacgacaattacgagggaaactgtgcagaggaggatcaatctggatggtggttcaaccggtgccattctgcgaaccttaatggcgtttattactccggcccatacactgcgaaaacagataatggtatcgtgtggtatacgtggcacgggtggtggtattctcttaaaagtgtagtgatgaaaataaggcccaacgacttcatccccaacgtaatctag

SEQ ID NO: 146479 - DNA, 939 bp, Artificial Sequence
  derived and/or modified sequence
atggccaaggtgttcagcttcatcctggtgaccaccgccctgaccatgggcagagagatcagcgccctggaggactgcgcccaggagcagatgagactgagagcccaggtgagactgctggagaccagagtgaagcagcagcaggtgaagatcaagcagctgctgcaggagaacgaggtgcagttcctggacaagggcgacgagaacaccgtgatcgacctgggcagcaagagacagtacgccgactgcagcgagatcttcaacgacggctacaagctgagcggcttctacaagatcaagcccctgcagagccccgccgagttcagcgtgtactgcgacatgagcgacggcggcggctggaccgtgatccagagaagaagcgacggcagcgagaacttcaacagaggctggaaggactacgagaacggcttcggcaacttcgtgcagaagcacggcgagtactggctgggcaacaagaacctgcacttcctgaccacccaggaggactacaccctgaagatcgacctggccgacttcgagaagaacagcagatacgcccagtacaagaacttcaaggtgggcgacgagaagaacttctacgagctgaacatcggcgagtacagcggcaccgccggcgacagcctggccggcaacttccaccccgaggtgcagtggtgggccagccaccagagaatgaagttcagcacctgggacagagaccacgacaactacgagggcaactgcgccgaggaggaccagagcggctggtggttcaacagatgccacagcgccaacctgaacggcgtgtactacagcggcccctacaccgccaagaccgacaacggcatcgtgtggtacacctggcacggctggtggtacagcctgaagagcgtggtgatgaagatcagacccaacgacttcatccccaacgtgatctag

SEQ ID NO: 146480 - DNA, 1630 bp, Artificial Sequence
  derived and/or modified sequence
gagatgacatattaattcatatttttgtgggtaaaatgttattacccttaatacaaagcaaagtttcagctggacttcgtttttacttaatcttcaatggaacattattgaagttacagtacaaaaattctctgaatgaacataataataagttgtaaaatatatatatctttataaagatatattattggatctttcacaaaaagtcatacaagtggggaaaaaagaaaaatatcagagtattgggatttgtccttgaatcttctcttttagctttctttcagttaaacctgtgtccacatgtttgtttctggattgaagccagaatcaacattgtccctatttctaatcaaataatggagaaataattacaaattcccaatgcagttacaggatcctgggaagcagagtgtctggatggaacctgagctgggtctctgactcacttctgactttaggcaattttttcaagggggaacatggcaaaggtgttcagtttcatccttgttaccaccgctctgacaatgggcagggaaatttcggcgctcgaggactgtgcccaggagcagatgcggctcagagcccaggtgcgcctgcttgagacccgggtcaaacagcaacaggtcaagatcaagcagcttttgcaggagaatgaagtccagttccttgataaaggagatgagaatactgtcattgatcttggaagcaagaggcagtatgcagattgttcagagattttcaatgatgggtataagctcagtggattttacaaaatcaaacctctccagagcccagcagaattttctgtttattgtgacatgtccgatggaggaggatggactgtaattcagagacgatctgatggcagtgaaaactttaacagaggatggaaagactatgaaaatggctttggaaattttgtccaaaaacatggtgaatattggctgggcaataaaaatcttcacttcttgaccactcaagaagactacactttaaaaatcgaccttgcagattttgaaaaaaatagccgttatgcacaatataagaatttcaaagttggagatgaaaagaatttctacgagttgaatattggggaatattctggaacagctggagattcccttgcggggaattttcatcctgaggtgcagtggtgggctagtcaccaaagaatgaaattcagcacgtgggacagagatcatgacaactatgaagggaactgcgcagaagaagatcagtctggctggtggtttaacaggtgtcactctgcaaacctgaatggtgtatactacagcggcccctacacggctaaaacagacaatgggattgtctggtacacctggcatgggtggtggtattctctgaaatctgtggttatgaaaattaggccaaatgattttattccaaatgtaatttaattgctgctgttgggctttcgtttctgcaattcagctttgtttaaagtgatttgaaaaatactcattctgaacatatccatgcgcaatcatgataactgttgtgagtagtgcttttcattcttctcacttgcctttgttacttaatgtgctttcagtacagcagatatgcaatattcaccaaataaatgtagactgtgttaatatttattgaa

SEQ ID NO: 146481 - DNA, 1335 bp, Artificial Sequence
  derived and/or modified sequence
aatgctaatttatttcacaggtatgatagtaaccaaaactcaggtaacaaccattagcttttgcaagaagtcaggttgactagcaaggagtctgcttctgctacttggagaagagatttagaattatgtatcttttgttacagatatacagatatacaaatatacagatatacaaataagttttttcaagggggaacatggcaaaggtgttcagtttcatccttgttaccaccgctctgacaatgggcagggaaatttcggcgctcgaggactgtgcccaggagcagatgcggctcagagcccaggtgcgcctgcttgagacccgggtcaaacagcaacaggtcaagatcaagcagcttttgcaggagaatgaagtccagttccttgataaaggagatgagaatactgtcattgatcttggaagcaagaggcagtatgcagattgttcagagattttcaatgatgggtataagctcagtggattttacaaaatcaaacctctccagagcccagcagaattttctgtttattgtgacatgtccgatggaggaggatggactgtaattcagagacgatctgatggcagtgaaaactttaacagaggatggaaagactatgaaaatggctttggaaattttgtccaaaaacatggtgaatattggctgggcaataaaaatcttcacttcttgaccactcaagaagactacactttaaaaatcgaccttgcagattttgaaaaaaatagccgttatgcacaatataagaatttcaaagttggagatgaaaagaatttctacgagttgaatattggggaatattctggaacagctggagattcccttgcggggaattttcatcctgaggtgcagtggtgggctagtcaccaaagaatgaaattcagcacgtgggacagagatcatgacaactatgaagggaactgcgcagaagaagatcagtctggctggtggtttaacaggtgtcactctgcaaacctgaatggtgtatactacagcggcccctacacggctaaaacagacaatgggattgtctggtacacctggcatgggtggtggtattctctgaaatctgtggttatgaaaattaggccaaatgattttattccaaatgtaatttaattgctgctgttgggctttcgtttctgcaattcagctttgtttaaagtgatttgaaaaatactcattctgaacatatccatgcgcaatcatgataactgttgtgagtagtgcttttcattcttctcacttgcctttgttacttaatgtgctttcagtacagcagatatgcaatattcaccaaataaatgtagactgtgtt

SEQ ID NO: 146482 - DNA, 1374 bp, Artificial Sequence
  derived and/or modified sequence
aattacaaattcccaatgcagttacaggatcctgggaagcagagtgtctggatggaacctgagctgggtctctgactcacttctgactttagggtgaagatggagggaatctgataaagacatcttataaattcaacagacacaaaagaatttgatctcccataagcaactgtgaaattacaataacagatcctgggaagttctacaattctaattcagttttttcaagggggaacatggcaaaggtgttcagtttcatccttgttaccaccgctctgacaatgggcagggaaatttcggcgctcgaggactgtgcccaggagcagatgcggctcagagcccaggtgcgcctgcttgagacccgggtcaaacagcaacaggtcaagatcaagcagcttttgcaggagaatgaagtccagttccttgataaaggagatgagaatactgtcattgatcttggaagcaagaggcagtatgcagattgttcagagattttcaatgatgggtataagctcagtggattttacaaaatcaaacctctccagagcccagcagaattttctgtttattgtgacatgtccgatggaggaggatggactgtaattcagagacgatctgatggcagtgaaaactttaacagaggatggaaagactatgaaaatggctttggaaattttgtccaaaaacatggtgaatattggctgggcaataaaaatcttcacttcttgaccactcaagaagactacactttaaaaatcgaccttgcagattttgaaaaaaatagccgttatgcacaatataagaatttcaaagttggagatgaaaagaatttctacgagttgaatattggggaatattctggaacagctggagattcccttgcggggaattttcatcctgaggtgcagtggtgggctagtcaccaaagaatgaaattcagcacgtgggacagagatcatgacaactatgaagggaactgcgcagaagaagatcagtctggctggtggtttaacaggtgtcactctgcaaacctgaatggtgtatactacagcggcccctacacggctaaaacagacaatgggattgtctggtacacctggcatgggtggtggtattctctgaaatctgtggttatgaaaattaggccaaatgattttattccaaatgtaatttaattgctgctgttgggctttcgtttctgcaattcagctttgtttaaagtgatttgaaaaatactcattctgaacatatccatgcgcaatcatgataactgttgtgagtagtgcttttcattcttctcacttgcctttgttacttaatgtgctttcagtacagcagatatgcaatattcaccaaataaatgtagactgtgtt

SEQ ID NO: 146483 - DNA, 1462 bp, Artificial Sequence
  derived and/or modified sequence
aatgctaatttatttcacaggtatgatagtaaccaaaactcaggtaacaaccattagcttttgcaagaagtcaggttgactagcaaggagtctgcttctgctacttggagaagagatttagaattatgtatcttttgttacagatatacagatatacaaatatacagatatacaaataagggtgaagatggagggaatctgataaagacatcttataaattcaacagacacaaaagaatttgatctcccataagcaactgtgaaattacaataacagatcctgggaagttctacaattctaattcagttttttcaagggggaacatggcaaaggtgttcagtttcatccttgttaccaccgctctgacaatgggcagggaaatttcggcgctcgaggactgtgcccaggagcagatgcggctcagagcccaggtgcgcctgcttgagacccgggtcaaacagcaacaggtcaagatcaagcagcttttgcaggagaatgaagtccagttccttgataaaggagatgagaatactgtcattgatcttggaagcaagaggcagtatgcagattgttcagagattttcaatgatgggtataagctcagtggattttacaaaatcaaacctctccagagcccagcagaattttctgtttattgtgacatgtccgatggaggaggatggactgtaattcagagacgatctgatggcagtgaaaactttaacagaggatggaaagactatgaaaatggctttggaaattttgtccaaaaacatggtgaatattggctgggcaataaaaatcttcacttcttgaccactcaagaagactacactttaaaaatcgaccttgcagattttgaaaaaaatagccgttatgcacaatataagaatttcaaagttggagatgaaaagaatttctacgagttgaatattggggaatattctggaacagctggagattcccttgcggggaattttcatcctgaggtgcagtggtgggctagtcaccaaagaatgaaattcagcacgtgggacagagatcatgacaactatgaagggaactgcgcagaagaagatcagtctggctggtggtttaacaggtgtcactctgcaaacctgaatggtgtatactacagcggcccctacacggctaaaacagacaatgggattgtctggtacacctggcatgggtggtggtattctctgaaatctgtggttatgaaaattaggccaaatgattttattccaaatgtaatttaattgctgctgttgggctttcgtttctgcaattcagctttgtttaaagtgatttgaaaaatactcattctgaacatatccatgcgcaatcatgataactgttgtgagtagtgcttttcattcttctcacttgcctttgttacttaatgtgctttcagtacagcagatatgcaatattcaccaaataaatgtagactgtgtt

SEQ ID NO: 146484 - DNA, 1967 bp, Artificial Sequence
  derived and/or modified sequence
gatcaggtctccacagcagcggaacaacacttttctggacagaaagttaatttacatgaaggaaaaacggtctggtggaaggataccagaactaaaacttgggaattaagaaaaattatgacgcggggaagggcttttgcttgtgtttcaccaggagacaatcaaacacccatttagatacccaatagacatttgaaattctgcaatgaaccctacaccgaccggacagaagaaagggaagaatccaaagaggaagaagactggtccctccgacctgtcctttcgggagctgagaaagatgacgaagctgagcgtctcagagaaacaacagaagacggagaagacccgccaggctacaccaccgacatgagaacagataaagaagctgactcaaatggcagagggcagcctaaaggagaaacaactggcaattatcccgggtaatatgatcttggctgccttgatggtaattaccgcggcgtaaatcaacaggattacctttcccttaataatcttcaaaatgtccacgtgaaggacaggaagatgtttaatgggaagaccaaacatcgtcagtgctcaagtccagtagataacaaagaacagaaagaaaacaaaactttggtattttactggaatctgagtgaataaatagggaccacaggacaaatggcaaacaactgcttgagttacatcagaaggaaagaagaaatgatgaacccagatttccattacaggatcctgggaagcagagtgtctggatggaacctgagctgggtctctgactcacttctgactttagttttttcaagggggaacatggcaaaggtgttcagtttcatccttgttaccaccgctctgacaatgggcagggaaatttcggcgctcgaggactgtgcccaggagcagatgcggctcagagcccaggtgcgcctgcttgagacccgggtcaaacagcaacaggtcaagatcaagcagcttttgcaggagaatgaagtccagttccttgataaaggagatgagaatactgtcattgatcttggaagcaagaggcagtatgcagattgttcagagattttcaatgatgggtataagctcagtggattttacaaaatcaaacctctccagagcccagcagaattttctgtttattgtgacatgtccgatggaggaggatggactgtaattcagagacgatctgatggcagtgaaaactttaacagaggatggaaagactatgaaaatggctttggaaattttgtccaaaaacatggtgaatattggctgggcaataaaaatcttcacttcttgaccactcaagaagactacactttaaaaatcgaccttgcagattttgaaaaaaatagccgttatgcacaatataagaatttcaaagttggagatgaaaagaatttctacgagttgaatattggggaatattctggaacagctggagattcccttgcggggaattttcatcctgaggtgcagtggtgggctagtcaccaaagaatgaaattcagcacgtgggacagagatcatgacaactatgaagggaactgcgcagaagaagatcagtctggctggtggtttaacaggtgtcactctgcaaacctgaatggtgtatactacagcggcccctacacggctaaaacagacaatgggattgtctggtacacctggcatgggtggtggtattctctgaaatctgtggttatgaaaattaggccaaatgattttattccaaatgtaatttaattgctgctgttgggctttcgtttctgcaattcagctttgtttaaagtgatttgaaaaatactcattctgaacatatccatgcgcaatcatgataactgttgtgagtagtgcttttcattcttctcacttgcctttgttacttaatgtgctttcagtacagcagatatgcaatattcaccaaataaatgtagactgtgttaatatttattgaa

SEQ ID NO: 146485 - DNA, 1247 bp, Artificial Sequence
  derived and/or modified sequence
aattacaaattcccaatgcagttacaggatcctgggaagcagagtgtctggatggaacctgagctgggtctctgactcacttctgactttagttttttcaagggggaacatggcaaaggtgttcagtttcatccttgttaccaccgctctgacaatgggcagggaaatttcggcgctcgaggactgtgcccaggagcagatgcggctcagagcccaggtgcgcctgcttgagacccgggtcaaacagcaacaggtcaagatcaagcagcttttgcaggagaatgaagtccagttccttgataaaggagatgagaatactgtcattgatcttggaagcaagaggcagtatgcagattgttcagagattttcaatgatgggtataagctcagtggattttacaaaatcaaacctctccagagcccagcagaattttctgtttattgtgacatgtccgatggaggaggatggactgtaattcagagacgatctgatggcagtgaaaactttaacagaggatggaaagactatgaaaatggctttggaaattttgtccaaaaacatggtgaatattggctgggcaataaaaatcttcacttcttgaccactcaagaagactacactttaaaaatcgaccttgcagattttgaaaaaaatagccgttatgcacaatataagaatttcaaagttggagatgaaaagaatttctacgagttgaatattggggaatattctggaacagctggagattcccttgcggggaattttcatcctgaggtgcagtggtgggctagtcaccaaagaatgaaattcagcacgtgggacagagatcatgacaactatgaagggaactgcgcagaagaagatcagtctggctggtggtttaacaggtgtcactctgcaaacctgaatggtgtatactacagcggcccctacacggctaaaacagacaatgggattgtctggtacacctggcatgggtggtggtattctctgaaatctgtggttatgaaaattaggccaaatgattttattccaaatgtaatttaattgctgctgttgggctttcgtttctgcaattcagctttgtttaaagtgatttgaaaaatactcattctgaacatatccatgcgcaatcatgataactgttgtgagtagtgcttttcattcttctcacttgcctttgttacttaatgtgctttcagtacagcagatatgcaatattcaccaaataaatgtagactgtgtt

SEQ ID NO: 146486 - DNA, 1093 bp, Artificial Sequence
  derived and/or modified sequence
agggtgaagatggagggaatctgataaagacatcttataaattcaacagacacaaaagaatttgatctcccataagcaactgtgaaattacaataacagatcctgggaagttctacaattctaattcagttttttcaagggggaacatggcaaaggtgttcagtttcatccttgttaccaccgctctgacaatgggcagggaaatttcggcgctcgaggactgtgcccaggagcagatgcggctcagagcccaggtgcgcctgcttgagacccgggtcaaacagcaacaggtcaagatcaagcagcttttgcaggagaatgaagtccagttccttgataaaggagatgagaatactgtcattgatcttggaagcaagaggcagtatgcagattgttcagagattttcaatgatgggtataagctcagtggattttacaaaatcaaacctctccagagcccagcagaattttctgtttattgtgacatgtccgatggaggaggatggactgtaattcagagacgatctgatggcagtgaaaactttaacagaggatggaaagactatgaaaatggctttggaaattttgtccaaaaacatggtgaatattggctgggcaataaaaatcttcacttcttgaccactcaagaagactacactttaaaaatcgaccttgcagattttgaaaaaaatagccgttatgcacaatataagaatttcaaagttggagatgaaaagaatttctacgagttgaatattggggaatattctggaacagctggagattcccttgcggggaattttcatcctgaggtgcagtggtgggctagtcaccaaagaatgaaattcagcacgtgggacagagatcatgacaactatgaagggaactgcgcagaagaagatcagtctggctggtggtttaacaggtgtcactctgcaaacctgaatggtgtatactacagcggcccctacacggctaaaacagacaatgggattgtctggtacacctggcatgggtggtggtattctctgaaatctgtggttatgaaaattaggccaaatgattttattccaaatgtaatttaattgctgct

SEQ ID NO: 146487 - DNA, 1713 bp, Artificial Sequence
  derived and/or modified sequence
gaaagatgacgaagctgagcgtctcagagaaacaacagaagacggagaagacccgccaggctacaccaccgacatgagaacagataaagaagctgactcaaatggcagagggcagcctaaaggagaaacaactggcaattatcccgggtaatatgatcttggctgccttgatggtaattaccgcggcgtaaatcaacaggattacctttcccttaataatcttcaaaatgtccacgtgaaggacaggaagatgtttaatgggaagaccaaacatcgtcagtgctcaagtccagtagataacaaagaacagaaagaaaacaaaactttggtattttactggaatctgagtgaataaatagggaccacaggacaaatggcaaacaactgcttgagttacatcagaaggaaagaagaaatgatgaacccagatttccattacaggatcctgggaagcagagtgtctggatggaacctgagctgggtctctgactcacttctgactttaggcaaatggagggaatctgataaagacatcttataaattcaacagacacaaaagaatttgatctcccataagcaactgtgaaattacaataacagatcctgggaagttctacaattctaattcaggcgctcgaggactgtgcccaggagcagatgcggctcagagcccaggtgcgcctgcttgagacccgggtcaaacagcaacaggtcaagatcaagcagcttttgcaggagaatgaagtccagttccttgataaaggagatgagaatactgtcattgatcttggaagcaagaggcagtatgcagattgttcagagattttcaatgatgggtataagctcagtggattttacaaaatcaaacctctccagagcccagcagaattttctgtttattgtgacatgtccgatggaggaggatggactgtaattcagagacgatctgatggcagtgaaaactttaacagaggatggaaagactatgaaaatggctttggaaattttgtccaaaaacatggtgaatattggctgggcaataaaaatcttcacttcttgaccactcaagaagactacactttaaaaatcgaccttgcagattttgaaaaaaatagccgttatgcacaatataagaatttcaaagttggagatgaaaagaatttctacgagttgaatattggggaatattctggaacagctggagattcccttgcggggaattttcatcctgaggtgcagtggtgggctagtcaccaaagaatgaaattcagcacgtgggacagagatcatgacaactatgaagggaactgcgcagaagaagatcagtctggctggtggtttaacaggtgtcactctgcaaacctgaatggtgtatactacagcggcccctacacggctaaaacagacaatgggattgtctggtacacctggcatgggtggtggtattctctgaaatctgtggttatgaaaattaggccaaatgattttattccaaatgtaatttaattgctgctgttgggctttcgtttctgcaattcagctttgtttaaagtgatttgaaaaatactcattctgaacatatccatgcgcaatcatgataactgttgtgagtagtgcttttcattcttctcacttgcctttgttacttaatgtgctttcagtacagcagatatgcaatattcaccaaataaatgtagactgtgttaatattta

SEQ ID NO: 146488 - DNA, 1367 bp, Artificial Sequence
  derived and/or modified sequence
gtgatgaaacagattcaattctagttaacactcagtgtcattctgtgtggtgagaggctgggaaagtctgggagaatttcctcggcgactctaagattagggatggcctgcggctgcatccgacttcctggagctactgaagtctgaactctggtctcatgaaaaattcaaggttgatacatttataaaattctttttgttcttgcagttttttcaagggggaacatggcaaaggtgttcagtttcatccttgttaccaccgctctgacaatgggcagggaaatttcggcgctcgaggactgtgcccaggagcagatgcggctcagagcccaggtgcgcctgcttgagacccgggtcaaacagcaacaggtcaagatcaagcagcttttgcaggagaatgaagtccagttccttgataaaggagatgagaatactgtcattgatcttggaagcaagaggcagtatgcagattgttcagagattttcaatgatgggtataagctcagtggattttacaaaatcaaacctctccagagcccagcagaattttctgtttattgtgacatgtccgatggaggaggatggactgtaattcagagacgatctgatggcagtgaaaactttaacagaggatggaaagactatgaaaatggctttggaaattttgtccaaaaacatggtgaatattggctgggcaataaaaatcttcacttcttgaccactcaagaagactacactttaaaaatcgaccttgcagattttgaaaaaaatagccgttatgcacaatataagaatttcaaagttggagatgaaaagaatttctacgagttgaatattggggaatattctggaacagctggagattcccttgcggggaattttcatcctgaggtgcagtggtgggctagtcaccaaagaatgaaattcagcacgtgggacagagatcatgacaactatgaagggaactgcgcagaagaagatcagtctggctggtggtttaacaggtgtcactctgcaaacctgaatggtgtatactacagcggcccctacacggctaaaacagacaatgggattgtctggtacacctggcatgggtggtggtattctctgaaatctgtggttatgaaaattaggccaaatgattttattccaaatgtaatttaattgctgctgttgggctttcgtttctgcaattcagctttgtttaaagtgatttgaaaaatactcattctgaacatatccatgcgcaatcatgataactgttgtgagtagtgcttttcattcttctcacttgcctttgttacttaatgtgctttcagtacagcagatatgcaatattcaccaaataaatgtagactgtgttaata

SEQ ID NO: 146489 - DNA, 939 bp, Artificial Sequence
  derived and/or modified sequence
atggccaaggttttttcttttatcttggttacaacagcgcttacaatgggtagagagattagcgctctcgaggactgcgctcaggaacagatgaggctgcgcgcccaggtcagactgctcgaaacacgcgtcaaacagcagcaagtgaagattaaacagctgttacaagaaaacgaggttcagtttctggataaaggagatgaaaataccgtaatcgacctcgggtccaagcggcagtacgcagactgttccgaaatatttaacgatgggtacaaactgagtggattttataagatcaagcccttacaatcacctgcagagtttagcgtgtactgcgacatgtctgacggtgggggctggaccgttatccagcggaggtcggacgggtctgaaaattttaacaggggctggaaggattacgagaacggcttcggcaactttgtgcagaaacatggggagtactggttaggaaataaaaacctgcattttctgaccacacaggaggattacactctcaaaattgacttggcggactttgaaaaaaattcacgatacgcccaatacaagaatttcaaggtgggggacgaaaagaatttctatgagctgaacattggcgagtactcagggacagccggggactcacttgctggcaactttcaccccgaggtccagtggtgggcatcgcaccagcgtatgaagttcagtacatgggaccgggaccatgacaattatgaagggaactgcgcagaggaagatcagagtggatggtggtttaaccgctgccactcagcaaatttgaatggggtctactacagtggaccctacacagccaaaaccgataacggtatcgtttggtacacttggcacggatggtggtatagcctgaagtctgtggtgatgaaaatccgcccaaatgactttatccctaacgtgatctag

SEQ ID NO: 146490 - DNA, 939 bp, Artificial Sequence
  derived and/or modified sequence
atggccaaggtgtttagtttcatattagtaacgaccgcccttacgatgggacgcgagatcagcgccctggaagactgcgcccaagagcagatgcggctgagggctcaggttcggctgttagagacgcgggtgaaacagcaacaggtcaagattaagcagctgctgcaggagaatgaagttcaatttctagacaaaggagacgagaatactgttattgacctggggtccaagcgacagtacgcagactgttcagaaattttcaacgatggatacaagctgtctggcttttataaaattaaacccctgcagagcccagcagaattttctgtctattgcgatatgtcagacggcggaggatggaccgtgatccagaggcgaagcgatggcagcgaaaactttaatcgaggatggaaggattacgaaaacgggttcggcaactttgtccagaaacatggggagtattggctggggaataaaaacctgcatttcctaactacacaggaggattacacgcttaaaattgacttggcagacttcgagaagaactcccgttacgctcagtataaaaatttcaaggtgggagatgaaaagaacttttacgagctgaatataggggaatacagcggaaccgccggcgattcactagcaggtaactttcatccagaagtgcaatggtgggcctcccaccaaagaatgaagttctccacctgggaccgcgatcacgataattatgagggcaattgcgcagaagaagaccagtctggctggtggtttaataggtgtcactctgccaacctaaatggcgtgtactattccggaccatatacagccaagacggataacggtatcgtctggtacacctggcacggatggtggtactcattgaagtcagttgtaatgaaaataaggcccaacgatttcatccccaatgtaatttag

SEQ ID NO: 146491 - DNA, 939 bp, Artificial Sequence
  derived and/or modified sequence
atggccaaggtgttcagttttatcctagtgacaacggccctgacaatgggacgagaaatttcagccttggaagactgtgcccaagagcaaatgaggctgcgagcccaggttaggctgctagagactagggtgaagcagcagcaggtgaagattaaacagctgctgcaggaaaacgaagttcaatttctggacaaaggcgacgaaaataccgttattgacttagggtccaagcgccagtatgccgactgcagcgagatctttaatgacggatacaagctttctggcttctataaaatcaagccccttcagagcccagctgagttttccgtgtactgcgacatgagcgacgggggtggctggacagttattcagcgccggtctgacggcagtgagaactttaatcggggatggaaggactacgagaacggcttcggaaactttgtgcagaaacacggggaatactggctcgggaacaaaaacttacacttcctcactacacaggaagactatacccttaaaattgatcttgcagattttgaaaaaaacagtcggtacgcccagtacaagaactttaaagttggcgatgagaaaaatttttacgagctgaatattggggagtattcaggaaccgcgggagactctcttgctggaaacttccatcccgaggtgcagtggtgggccagccaccaaaggatgaaatttagcacttgggatcgcgaccatgacaattatgaaggcaattgtgccgaagaagaccaatccggttggtggttcaacaggtgccacagtgcaaatctaaacggggtgtactacagcggaccatacactgctaaaactgataatgggatcgtgtggtatacttggcatggatggtggtattctctgaaatcagtggtgatgaagataagacccaatgatttcatccctaacgtgatctag

SEQ ID NO: 146492 - DNA, 939 bp, Artificial Sequence
  derived and/or modified sequence
atggccaaggtgttttcatttattcttgtgacaacggccctgaccatgggccgcgaaatcagcgccctggaggactgtgcccaggagcagatgaggttgcgcgcccaggtgcgcctcctcgaaactcgggttaagcagcaacaggttaagattaagcaattgctgcaagaaaatgaggtgcagttcctggataagggcgacgaaaatacagtcattgaccttggcagcaagaggcaatacgctgattgctcagagatattcaatgacgggtacaagctttccggtttttacaagatcaagccactgcaatccccggctgagttcagcgtttattgcgatatgtccgatgggggggggtggacagttatccagcggagatcggatggatccgaaaattttaatcgcggctggaaggactatgagaatggctttgggaattttgttcaaaaacatggggaatactggctgggcaataagaatctgcatttcctcacaactcaggaggattacacactgaagattgatttggccgactttgaaaaaaactctagatacgctcagtataaaaacttcaaagtcggagatgaaaaaaatttctatgagctgaatatcggtgaatacagtggcactgccggggacagccttgcagggaactttcatccagaagttcagtggtgggcgtcccatcagcgaatgaagttttctacttgggaccgcgatcacgataactacgaaggaaactgtgccgaggaagaccagtccgggtggtggttcaaccgctgccattcagccaatctgaatggtgtgtactatagcgggccctacactgcaaaaaccgataacggcattgtgtggtacacctggcacgggtggtggtactctttgaagtctgtggtgatgaaaatccggcctaacgacttcattccaaatgtgatttag

SEQ ID NO: 146493 - DNA, 939 bp, Artificial Sequence
  derived and/or modified sequence
atggcaaaagtcttctcttttattttagtgaccacagccctgaccatgggtcgcgagatctcagccctggaggattgcgcccaagaacagatgcgacttcgggctcaggtaaggttgctcgagacccgggttaagcagcaacaagtcaagatcaaacagctcctgcaagagaatgaggtgcagttcctggacaagggcgacgagaatacagtcattgacctcggaagtaagcgacagtacgcagattgctcagaaattttcaacgatggttataagctgtccggcttctataaaattaagcccctacagagtccagccgaattctcagtgtattgcgatatgagcgacggaggagggtggactgtgattcaacggcgctcagacggtagcgaaaattttaaccgagggtggaaggactacgaaaacggatttggaaatttcgtgcagaagcacggagaatattggttggggaacaaaaatctgcatttccttacaactcaagaggactacactctgaaaatagacttagctgactttgagaagaattcacgctacgcacagtacaagaactttaaggtcggcgacgagaagaatttctatgagctcaatattggcgaatatagcggcaccgctggggatagcttggccggaaacttccaccccgaggtgcagtggtgggcctctcatcagcggatgaagttttccacatgggacagagaccacgacaattatgaaggaaactgtgctgaggaggatcagagcggttggtggttcaataggtgccacagtgctaacctaaatggcgtatattactcaggaccgtatacggccaagactgacaatggaattgtctggtacacttggcacgggtggtggtacagccttaagagcgtagtaatgaaaatccgacccaatgactttatcccaaatgtgatttag

SEQ ID NO: 146494 - DNA, 939 bp, Artificial Sequence
  derived and/or modified sequence
atggctaaggttttttccttcatcctagtcactacagcactcaccatggggagagaaattagcgcactcgaggactgcgctcaagagcagatgcggctgcgggcccaagttagactactagagactcgggtgaaacagcagcaagtcaagatcaaacaattgctgcaggaaaacgaagtccagtttctggacaagggcgacgagaataccgtgattgacctgggcagtaagcgacagtacgctgattgcagcgaaatctttaatgatgggtataagttgagcggcttctacaaaatcaaacctctgcagtcccctgccgagttctccgtttattgcgacatgagcgatggcgggggttggactgtgatccagcgtagatcagacgggagcgagaattttaacagaggatggaaggactatgagaacggtttcgggaattttgtccaaaagcatggggaatattggctgggcaacaagaatttacacttccttactacccaggaggactacactcttaaaattgatctggccgactttgagaagaactctaggtacgctcaatataaaaacttcaaagtaggcgacgagaagaacttttacgaactgaacatcggtgagtactcaggtactgctggggactccctagccgggaatttccaccccgaggttcaatggtgggcatcgcatcagcggatgaagttttccacatgggatcgtgatcacgataattacgagggtaattgtgctgaggaggatcagtcaggctggtggtttaaccgttgtcacagtgcaaatctgaatggcgtgtattactcagggccatacactgccaaaactgataacggcattgtatggtacacatggcatggatggtggtactcgctcaagtcggtggttatgaaaatccgccccaacgacttcatccccaatgtgatatag

SEQ ID NO: 146495 - DNA, 849 bp, Artificial Sequence
  derived and/or modified sequence
atgcgtctcagagctcaggtgcgtctgctcgaaacgcgcgtgaagcagcagcaagtgaaaataaagcaactgctgcaagagaacgaggtacagtttctggataaaggagatgaaaacaccgttatcgatctcgggagcaaacgccagtacgctgactgtagcgagatctttaatgatggctacaaacttagtgggttctataaaattaagcctcttcagtcacccgcagaattcagcgtttactgcgatatgagcgatggaggggggtggactgtgatccagaggcgatcagacggaagtgagaatttcaacaggggctggaaagattacgaaaatggttttgggaactttgtgcaaaagcatggcgagtactggttaggcaataagaacctgcattttttgaccacacaggaagactacacactgaagatcgacctggctgattttgaaaagaatagtaggtacgcacagtataaaaactttaaggttggcgacgagaaaaatttctatgaactgaacatcggcgaatactcagggaccgcaggagattccctagcaggcaactttcacccagaagtccagtggtgggccagtcaccaacgcatgaagttctctacctgggaccgcgaccacgataattacgagggaaactgtgccgaggaagaccagtctggttggtggttcaatcgatgccactcagcaaatctcaacggcgtgtactactctggaccctacacagccaaaaccgataacgggatcgtgtggtacacctggcacggatggtggtattctctgaagtcagtggtgatgaagataaggccaaatgactttatccctaacgtcatttag

SEQ ID NO: 146496 - DNA, 939 bp, Artificial Sequence
  derived and/or modified sequence
atggcgaaagtgttttccttcattttggtgacaactgcccttacaatggggagggaaataagtgcactggaagattgtgcccaggaacagatgcgcctccgggcccaggtaagactgttggaaacaagggtcaagcaacaacaggtgaagattaagcagctcttgcaggagaatgaagtgcagttccttgataaaggagatgagaatacagttatcgaccttggatctaagcggcagtacgccgattgttccgaaatctttaatgatggctacaaactgtccggattctacaagataaagccactgcagagtcctgctgagttctccgtgtattgcgacatgtctgatggcggaggttggactgtaattcagcgaagaagcgatggttccgagaacttcaacagaggatggaaagattacgagaatggctttggtaatttcgtgcagaagcacggcgagtactggttaggcaacaagaatctgcattttctcaccacccaggaagactatactctgaagattgatctggcagattttgaaaagaactcaaggtatgcgcagtataagaactttaaggtgggagatgaaaagaatttttacgagcttaatatcggagagtactccggtacagccggggacagcctggcggggaacttccatcctgaagtgcagtggtgggccagccatcagaggatgaaatttagcacttgggaccgtgatcatgacaattatgagggtaactgtgccgaggaggaccagtctggctggtggtttaatcggtgtcattcagctaaccttaatggagtgtactacagcggaccatacacagccaagacagacaacggcatagtctggtacacttggcacggttggtggtatagcttgaagtccgtcgtgatgaagatacgccctaacgatttcatcccgaacgtcatatag

SEQ ID NO: 146497 - DNA, 849 bp, Artificial Sequence
  derived and/or modified sequence
atgaggctgcgggcccaggtgcggctgctggagaccagggtgaagcagcagcaggtgaagatcaagcagctgctgcaggagaatgaggtgcagttcctggacaagggagatgagaacacagtcatcgacctgggcagcaagaggcagtatgctgactgcagcgagatcttcaatgatggctacaagctgagcggcttctacaagatcaagcccctgcagagccctgctgagttctctgtgtactgtgacatgtctgatggcggcggctggacagtcatccagaggagaagtgatggcagcgagaacttcaacagaggctggaaggactatgaaaatggcttcggcaactttgtgcagaagcatggagagtactggctgggcaacaagaacctgcacttcctgaccacccaggaggactacaccctgaagattgacctggccgactttgagaagaacagccgctatgcccagtacaagaacttcaaggtgggagatgagaagaacttctatgagctgaacatcggggagtacagcggcacagctggggacagcctggccggcaacttccaccctgaggtgcagtggtgggccagccaccagaggatgaagttcagcacctgggaccgggaccatgacaactatgagggcaactgtgccgaggaggaccagagcggctggtggttcaaccgctgccacagcgccaacctgaatggagtgtactacagcggcccctacacagccaagacagacaatggaattgtgtggtacacctggcacggctggtggtacagcctgaagtctgtggtgatgaagatccggcccaatgacttcatccccaacgtcatctag

SEQ ID NO: 146498 - DNA, 939 bp, Artificial Sequence
  derived and/or modified sequence
atggccaaggtgttcagcttcatcctggtgaccaccgccctgaccatggggcgggagataagcgctctcgaagactgtgcccaagaacagatgcggctgagagcacaggtccgcctactagagactcgggtgaaacaacagcaggtgaaaatcaaacagctgctgcaggagaacgaggtccagtttctcgataagggcgatgaaaacactgttatcgacctaggcagcaagcgccaatatgccgactgtagcgaaatctttaacgacggctataaactgtcggggttctacaagataaagcccctccagagccctgctgagttttccgtttattgtgatatgtcagacggcgggggctggaccgtcatccagcggcgtagcgacgggagcgagaactttaatcgcggctggaaagactacgagaatggctttggtaactttgtgcaaaagcacggggagtactggctcggcaacaaaaatttgcatttcttgacgactcaggaggattataccctcaaaattgatctcgccgacttcgagaagaacagcagatacgctcagtataaaaatttcaaggttggggacgaaaagaatttctacgaattgaatatcggagagtacagtgggacggcaggcgactcactggcaggtaactttcaccccgaggtgcagtggtgggcgtcgcaccagcgtatgaagttctccacttgggatagggatcatgacaattatgagggaaattgcgcggaggaagatcagtctggctggtggtttaaccgctgccactccgccaacctgaatggagtctactatagcggtccgtacactgcaaagacagataacggaatcgtttggtatacctggcacggttggtggtacagcctgaagtctgtggtgatgaagattcgacccaatgattttattcccaacgtgatatag

SEQ ID NO: 146499 - DNA, 939 bp, Artificial Sequence
  derived and/or modified sequence
atggccaaggtgttcagcttcatcctggtgaccaccgccctgaccatgggaagagagatctccgcattagaggattgtgcccaggagcagatgcgattgagggctcaggtcaggctccttgagacaagggttaagcaacagcaggttaagatcaaacagctgttacaggaaaatgaagtgcagttcctggataaaggcgacgagaacactgtcatcgacctggggagcaagaggcagtacgcggactgctctgagatttttaatgacggatataagctaagtggattctacaagatcaagccattacagtctccggctgaattttccgtgtattgcgatatgtctgacggaggagggtggaccgtgatacagcggaggtcagacggatccgaaaattttaatagagggtggaaggattacgaaaacggcttcggtaacttcgtgcagaaacatggggagtattggctaggcaacaagaacttacatttcctaaccactcaggaagattatactttgaagatcgacctggcagacttcgagaaaaattctaggtatgcccaatacaagaattttaaagtcggagacgagaaaaatttttatgaactgaacatcggcgagtactccggcacagccggagactctttggcaggtaactttcatccggaggtgcaatggtgggcgtcgcatcaacgtatgaaattcagcacctgggacagggatcacgataattacgaaggtaactgtgccgaggaggatcaaagcggctggtggtttaacagatgtcatagcgccaatctgaacggagtgtactattccggtccttacaccgcaaagactgataatgggatcgtgtggtacacctggcatggttggtggtactctttgaagtcagtcgtgatgaagataaggcctaatgacttcataccaaacgtcatctag

SEQ ID NO: 146500 - DNA, 939 bp, Artificial Sequence
  derived and/or modified sequence
atggccaaggtgttcagcttcatcctggtgaccaccgccctgaccatgggcagagagattagcgctcttgaggactgcgcacaggaacagatgagattgagagcacaggtgaggttacttgagactagggtcaagcagcagcaggtcaagatcaagcagttgctgcaggagaatgaggtgcagttcctcgacaagggcgacgagaataccgttattgatctgggaagtaagcgccagtacgcagattgctcagagattttcaacgacgggtataagttatcagggttttataaaatcaaacccctgcagagccctgctgaatttagtgtctactgcgacatgtcagatggcgggggctggactgtcatccagcgccgttctgacggaagcgagaattttaaccgtggctggaaggattacgagaatggcttcggcaattttgtccagaagcatggagaatactggctgggcaataagaacctgcatttcctcacaactcaggaagactataccctcaaaattgacctggccgactttgagaagaactccagatacgcacagtataaaaatttcaaggtgggtgatgagaagaacttctatgagttaaatatcggagagtacagcggaactgcaggtgattctctggctgggaattttcatcccgaggttcagtggtgggcatctcaccagcgcatgaaatttagtacatgggatagagaccacgataattacgagggcaactgcgcagaggaggaccagtccggctggtggttcaacaggtgtcattctgcaaatctcaatggggtgtactactcaggtccttacaccgctaaaactgataacgggatagtctggtacacatggcatggctggtggtactctttgaagagcgtggtcatgaaaatccgccctaacgatttcataccaaatgttatctag

SEQ ID NO: 146501 - DNA, 939 bp, Artificial Sequence
  derived and/or modified sequence
atggccaaggtgttcagcttcatcctggtgaccaccgccctgaccatgggcagagaaatcagcgcattggaggattgcgctcaggagcaaatgcggttaagggcccaggttaggcttctcgaaacgcgggtcaaacaacagcaggtcaagatcaagcaactcctccaggagaatgaggtacagtttctagataagggcgacgaaaatactgtaattgaccttggctctaagagacagtacgccgactgtagtgagattttcaacgacggctataagctgtcggggttttacaagatcaagccccttcagtcgcccgcggagttctctgtttactgtgacatgtctgatggtggggggtggactgtgattcagcgccgaagtgacggctcagagaactttaatcgaggctggaaggactacgagaacggtttcggtaactttgtgcagaagcacggggagtactggctgggaaacaaaaatctgcatttccttaccacacaggaggattatactctgaagatcgacctggccgatttcgaaaagaactcccggtatgctcagtacaagaacttcaaggtgggcgacgaaaaaaatttctacgaacttaacataggagaatattcaggaacagcaggggactcccttgcagggaacttccatcctgaggtccagtggtgggcctcccatcaaaggatgaagttctcaacttgggaccgggatcatgataactacgaagggaactgcgccgaagaagaccaaagtgggtggtggttcaatcgttgccatagcgccaatctcaatggggtctattactctggtccttataccgccaagacagacaacgggatagtttggtatacctggcacggctggtggtattcactaaagtccgtggtcatgaagatcagaccgaacgacttcatcccgaatgtcatttag

SEQ ID NO: 146502 - DNA, 939 bp, Artificial Sequence
  derived and/or modified sequence
atggccaaggtgttcagcttcatcctggtgaccaccgccctgaccatggggcgcgagatcagtgctcttgaggactgtgcacaggaacagatgcgccttagggcccaggtgcgcctcctggaaacaagagtgaagcagcagcaggtgaagatcaaacagctgttacaagaaaacgaagtccagttcctggataaaggggatgagaatactgtgattgatcttggatcgaagcgccagtatgcagactgttccgagatctttaacgacggctataaactgtcagggttctacaagataaagccgttacagagcccggcagagttctcagtgtattgcgatatgtctgacggcggaggatggacggtgattcagcgcaggtcggacggatccgagaatttcaaccgcggctggaaagactacgagaatggttttggaaacttcgtgcagaaacacggggaatattggcttggaaacaaaaacctgcacttcttgacaacacaggaggattatactctgaagatagatctggcagacttcgagaagaacagtcggtatgctcagtacaagaatttcaaagtcggggacgaaaagaatttttacgaattgaacatcggggagtactcaggaacagcaggggattccctcgcggggaatttccacccagaggtgcagtggtgggctagccaccaaagaatgaagtttagtacctgggatagggatcacgataattacgagggcaactgcgccgaggaggaccagtcagggtggtggtttaatcgctgtcactccgccaatctgaatggagtttattattctggtccttacaccgccaagacggacaatggaattgtctggtacacttggcacggttggtggtactctttaaagagcgttgtgatgaagatccggccgaatgattttattcctaacgttatctag

SEQ ID NO: 146503 - DNA, 939 bp, Artificial Sequence
  derived and/or modified sequence
atggccaaggtgttcagcttcatcctggtgaccaccgccctgaccatgggaagggagatcagcgcacttgaggactgcgcccaggagcagatgcgtttgcgcgcacaagtgagactactggagactcgtgtcaaacagcagcaggtcaaaataaagcagttgctccaggaaaatgaagtgcagttcctggataagggggacgagaatacggtgatagacctgggatccaagcgtcaatatgctgactgttccgaaattttcaacgacgggtataagctgtccggcttctacaagattaaacctctccagagtccagccgaattctccgtatactgcgacatgtccgatggaggaggctggacagtcattcaacgccggtctgacggctccgagaatttcaaccggggctggaaggattatgagaacggtttcgggaacttcgtccaaaaacatggagaatactggctgggcaacaagaacctacacttcctgactactcaggaggactatactctgaaaatcgacctggcagacttcgaaaaaaacagtcggtacgcccaatataaaaactttaaagtcggggacgaaaaaaatttttatgaattgaacatcggtgagtattcgggaaccgcgggagatagcctagcaggtaactttcacccagaggtacaatggtgggcctctcaccagcggatgaaattttccacatgggatagagaccacgataattatgagggcaactgcgctgaggaggatcagtctggctggtggtttaaccgctgtcattctgcaaatcttaacggcgtgtattactctgggccctacaccgccaagactgataacggcatcgtatggtacacctggcacgggtggtggtattctctgaagtctgtagtgatgaagattcgccccaatgacttcattcccaatgttatctag

SEQ ID NO: 146504 - DNA, 849 bp, Artificial Sequence
  derived and/or modified sequence
atgcggctgcgggcccaggtgcggctgctggagacccgggtgaagcagcagcaggtaaaaataaaacagttactgcaggaaaatgaagtgcaatttctggataagggagacgaaaacactgtgattgacctgggatctaagagacaatatgctgactgctccgaaatcttcaacgacggctataaactgtctggcttttacaagataaagcccctgcagagtcccgccgagttttccgtgtattgtgatatgagtgatggaggcgggtggacagttatacagagaaggtccgatgggagtgaaaattttaaccgaggctggaaagactatgagaatggctttggaaatttcgtacagaaacatggcgaatactggctaggcaataagaacctgcactttctcactacacaggaggattacacactgaagattgacctggccgatttcgaaaaaaactctaggtacgctcagtataaaaatttcaaagttggtgacgaaaaaaacttttatgagctcaacatcggcgagtactcggggactgctggagatagtctggcaggaaacttccaccctgaggtgcaatggtgggcaagccatcagcggatgaagttttccacttgggatcgcgaccatgacaactacgaggggaattgcgctgaggaggatcaatcaggttggtggttcaatcgatgccacagcgccaatctcaacggcgtgtattatagcggaccttatacggcaaagacagacaacggtatcgtgtggtatacatggcacggttggtggtattcgctcaagtctgtggtgatgaaaattaggcccaatgatttcattcctaatgtaatctag

SEQ ID NO: 146505 - DNA, 939 bp, Artificial Sequence
  derived and/or modified sequence
atggccaaggtgttcagcttcatcctggtgaccaccgccctgaccatgggaagagaaataagtgcattagaggattgtgcacaggagcaaatgcgtctgcgcgcccaggttcgtctcctcgagactagggtgaaacagcaacaagttaagatcaaacagctgctccaggaaaacgaagtgcaattcttggataagggagacgaaaacactgtaattgatcttggatccaagcggcaatacgccgactgctctgagattttcaatgatggctataaactcagcggattttacaagattaagccactgcaaagcccagcagaattctcggtgtactgtgatatgtctgacggtggaggctggaccgttatacagaggcgcagtgatggctctgagaatttcaacaggggctggaaggattacgagaatggcttcggcaacttcgtgcagaaacacggcgagtactggctagggaacaaaaacctacacttcctgactacacaagaagattataccctgaaaatagacctggccgacttcgagaaaaatagccgctatgcccagtacaaaaattttaaagtcggggacgagaaaaatttttacgagttaaacatcggtgagtactctgggaccgccggagatagtcttgccgggaacttccacccagaagtacagtggtgggcatcccatcagagaatgaagttctccacatgggaccgggatcacgacaactatgaggggaactgcgccgaagaagaccagagtggctggtggttcaacaggtgtcactccgcaaacctgaacggggtctactactctggtccatacacggctaaaacagataatggcatagtgtggtacacatggcacgggtggtggtactccctgaagagcgtggtaatgaaaattaggccaaacgactttattccgaatgtcatttag

SEQ ID NO: 146506 - DNA, 939 bp, Artificial Sequence
  derived and/or modified sequence
atggcgaaggtttttagtttcatcctcgtcacaacggcattgaccatgggaagggagatctctgcgcttgaagattgcgcccaggaacagatgagactgcgagcacaggttcggctcctcgagaccagggtgaaacagcagcaagtcaagatcaaacaactgctccaggagaacgaggtccaattcctcgacaagggggacgagaataccgtcatcgatctggggtccaagaggcagtatgctgattgctccgagattttcaacgacggctacaagctcagtggattctataaaattaaaccacttcagagtccagctgagtttagtgtctactgcgatatgagcgatggcggaggctggactgtaattcaacgaagatcagacggctccgagaacttcaatcgcggatggaaagattacgaaaatggctttggcaatttcgtgcagaaacatggtgagtactggctgggcaataaaaatttgcattttctgacaacgcaggaggattacactctcaaaatcgatttggcagatttcgaaaaaaattcaaggtacgctcaatacaaaaacttcaaggtcggcgacgagaagaatttctacgaactgaacattggcgaatactccggcacagcaggggacagtctggccggtaacttccacccagaggtgcaatggtgggccagccaccagagaatgaagtttagcacctgggaccgagatcacgataactacgagggcaactgtgctgaagaggaccagtcaggttggtggttcaacaggtgtcattctgccaatttgaacggcgtctactatagcgggccatacaccgcaaagacagataatggcattgtgtggtatacttggcacggctggtggtactctctcaaatccgtcgtgatgaagattcggccaaacgatttcattcccaacgtcatctag

SEQ ID NO: 146507 - DNA, 939 bp, Artificial Sequence
  derived and/or modified sequence
atggccaaggtctttagctttattctggtgacaacagccctgactatgggcagagagatatcagcattagaagattgtgcccaggagcagatgcggttgcgcgctcaagtgcggctcttggagacacgcgtgaagcagcagcaggtgaaaataaaacagctgttacaggaaaatgaagtccagtttctggataaaggcgatgagaatactgtgattgatctggggtcgaaaaggcagtatgcagattgctcagagattttcaacgatgggtacaaattgagcggcttctataaaatcaaacccctccagtctccagcagagttctccgtatactgcgacatgtctgacggcggaggatggactgtcattcagaggcggtcggacggcagcgaaaatttcaacagagggtggaaggactacgagaatggcttcgggaatttcgtgcagaagcacggtgagtattggcttgggaacaagaacctgcacttcttgacgactcaagaagactacactttgaaaattgacttagccgatttcgaaaaaaattctcggtatgcacagtataagaatttcaaggtcggggacgaaaagaatttttatgagctaaacatcggggagtacagtggcacagctggtgactctctcgcgggaaactttcaccctgaggtccagtggtgggcttcccatcagagaatgaaattcagtacatgggacagagaccacgacaactacgaaggcaattgcgcggaagaggaccaatccggatggtggtttaatcgatgccatagcgccaatttaaatggagtgtactactcaggaccctataccgccaagaccgacaacggcattgtgtggtatacatggcatgggtggtggtactcactcaaaagcgtggtcatgaaaattcgccctaacgactttattccgaatgtaatttag

SEQ ID NO: 146508 - DNA, 939 bp, Artificial Sequence
  derived and/or modified sequence
atggccaaggtattcagtttcatactggtaactaccgcattaaccatgggcagagagatcagcgcactcgaagactgcgctcaggagcagatgagacttcgcgctcaagtacgtctcctggaaacccgcgtgaaacaacagcaggtaaaaatcaaacagttgctccaggagaatgaagtgcagtttctggacaagggcgatgagaataccgtgatagaccttggatcaaaacgccagtatgccgactgctccgaaatcttcaatgatggatacaagcttagcggcttctacaaaataaagccactgcagtccccggcagaattcagcgtttattgcgacatgagcgacggagggggttggaccgtcatacaacgcaggtcggatggaagcgagaattttaaccggggatggaaagactatgaaaatgggtttggcaactttgttcaaaaacatggggagtactggctgggaaataaaaatctccatttcctgacaacgcaggaagactacacattaaagatagatctggccgactttgaaaagaactctaggtacgcccagtataagaatttcaaggtgggtgacgaaaaaaacttttatgaactaaacatcggtgaatatagtggaactgctggcgattctttagcaggcaactttcaccccgaggtgcagtggtgggcttcccatcaaaggatgaagttctcaacctgggaccgcgaccatgataattacgagggcaactgtgccgaggaggatcagagcgggtggtggtttaaccgttgccattccgccaatttgaacggggtatactactccgggccatacactgccaagaccgataatggaattgtctggtacacttggcacggatggtggtacagtctcaaatctgttgtgatgaagataagacctaacgacttcatccctaatgtcatttag

SEQ ID NO: 146509 - DNA, 939 bp, Artificial Sequence
  derived and/or modified sequence
atggccaaggtcttctcatttattctggtgaccactgccctcactatgggaagagagatcagtgccctagaagattgtgcacaggagcaaatgaggttaagagctcaggtccggttgttggagactagggtgaagcagcagcaggtgaagattaagcagcttctgcaggagaacgaagtgcaatttctggacaagggcgacgagaacacggttattgacctaggatccaaaagacagtatgcggattgctccgagatctttaacgacggttataaactaagtggtttctataagattaagcctttacaaagtcctgcggaattctctgtatactgtgatatgagtgatggaggaggatggacagtaatacagcgacgttctgatgggtctgaaaatttcaatagaggatggaaagattacgaaaatgggtttggaaactttgtgcaaaagcatggcgagtactggctgggcaataagaacttgcactttttgacaacccaggaagactatactctgaaaatcgacctggccgacttcgagaagaactcccggtacgcccaatataagaattttaaggtcggagacgagaagaacttttacgaacttaacatcggcgagtacagcggaaccgctggcgactccctggcaggcaactttcaccccgaggtgcagtggtgggcctctcatcaacggatgaaatttagtacatgggatagagaccacgacaattatgaagggaactgcgctgaggaggaccaaagtggctggtggttcaatcggtgccatagcgcaaatcttaacggggtgtattactcaggcccatatactgctaaaacagacaacggaattgtctggtatacctggcacgggtggtggtactctctcaagtccgtggttatgaagatccggccaaacgacttcattcccaatgtcatatag

SEQ ID NO: 146510 - DNA, 939 bp, Artificial Sequence
  derived and/or modified sequence
atggcaaaggtcttctcttttatcctggtgacaaccgctcttactatgggtcgcgagatttccgctctggaggattgtgcccaggaacagatgcggctccgcgcacaggtgagattgctcgagacgagagttaaacagcagcaggttaaaataaaacagctgctgcaagaaaacgaagtacaattcttagacaaaggcgatgagaacaccgtgatcgatctgggctctaagcgccagtacgctgactgttcagaaatcttcaacgacggatataagctctccggcttctataagatcaaacccctgcaatctcccgctgagttctccgtgtactgtgatatgtccgatggagggggttggacagtcattcagcgcagaagcgacgggagcgaaaacttcaaccgtgggtggaaagactatgaaaatggttttggcaatttcgtgcaaaagcacggcgagtactggctcggaaacaagaatctacattttctgacaacgcaggaggactatactcttaagatcgacctggccgacttcgagaagaattccaggtacgcacagtacaaaaattttaaggtgggagatgagaagaatttttatgaactcaatattggcgaatacagtggcacggctggagactctctggctggtaattttcacccagaggtgcagtggtgggcgtcacatcaacgcatgaagtttagtacatgggaccgggaccacgataattacgaaggaaattgtgcagaagaagatcaaagtggctggtggtttaataggtgccactccgcaaacttaaatggcgtgtactacagcgggccttacaccgctaaaaccgataacgggattgtgtggtacacctggcatggctggtggtactctctcaagagtgtcgtcatgaaaatccggcctaacgacttcatacccaacgtcatctag

SEQ ID NO: 146511 - DNA, 939 bp, Artificial Sequence
  derived and/or modified sequence
atggccaaagtgttcagttttatattagtgacgactgccctcacgatgggtcgcgagatctccgctcttgaagactgcgctcaggaacagatgcggctgagggcccaggtcaggctgttggaaactagagtgaaacaacagcaggttaagatcaagcagctcctccaagagaatgaggtccaatttttggataagggggacgagaatactgtgatcgatctagggtctaagaggcaatacgctgactgttctgaaatctttaatgacggctacaagctgtcgggcttctacaaaattaagccactgcagtctcctgcagagttcagtgtatactgcgacatgtctgatggagggggttggacagtcattcagcggcgaagtgacggctcagaaaactttaacagggggtggaaagattacgagaacggatttggtaacttcgtgcagaaacatggggagtactggttgggcaataagaacctgcactttctgacaacccaggaggactacactctaaagatcgatctggcggatttcgaaaagaactcaaggtatgcgcagtataagaactttaaagtgggcgacgagaaaaatttttacgaactgaacattggcgagtattccggaaccgcgggtgattctctcgcaggaaacttccatccagaggtccagtggtgggcaagtcatcagcgcatgaagttctccacatgggacagggaccatgataactatgaaggaaactgtgcggaggaggaccagagtggttggtggtttaatagatgccactcggctaacctgaacggagtatattacagcggtccctataccgccaaaaccgataacggcattgtgtggtacacgtggcacgggtggtggtactccctgaagagcgtggtgatgaaaataagaccaaacgatttcattcctaatgttatttag

SEQ ID NO: 146512 - DNA, 849 bp, Artificial Sequence
  derived and/or modified sequence
atgaggttgcgcgctcaagtgcggctgttagaaaccagggtgaaacagcaacaagttaaaatcaagcagttactgcaagaaaatgaagtccagttcttggacaagggagatgaaaatacagtgattgacttaggatctaagcggcaatatgccgattgcagtgaaatcttcaatgacggctataaactgtccgggttctacaaaataaagccacttcagagtccagctgagttctcagtgtattgcgatatgtctgacgggggtgggtggactgtgatccaacgtcgaagcgacgggagtgagaattttaaccgcggttggaaagattacgaaaatggcttcggcaatttcgtgcaaaagcatggcgaatactggcttggcaataagaacctgcattttcttacaacgcaggaggattatacacttaagatagatcttgccgattttgaaaaaaatagtaggtatgcccaatacaaaaactttaaagtgggagatgagaaaaacttctacgagctgaatattggcgagtacagtgggacggccggtgacagtctggccggaaactttcaccccgaggtacagtggtgggctagtcaccagaggatgaaattctcaacttgggatagagaccatgataattacgagggcaattgtgccgaggaagatcaatccggctggtggtttaaccgatgtcactcagctaacttaaatggcgtttactattcaggcccatacaccgcgaaaacagacaatggaattgtgtggtatacatggcacggatggtggtacagcctaaaaagtgtggttatgaagatacgcccaaatgactttatcccaaacgtaatctag

SEQ ID NO: 146513 - DNA, 939 bp, Artificial Sequence
  derived and/or modified sequence
atggcgaaagtgttttcatttatactggtgaccaccgccctgacaatggggcgtgaaattagtgcccttgaggactgtgcgcaagaacagatgcgtcttcgcgcacaggttcgactgctcgaaacccgagtcaaacagcaacaggtcaaaataaagcagctgctccaggagaatgaagtgcagtttctggacaagggggacgagaataccgtaatcgacctgggctctaagcgccagtacgccgattgttctgaaattttcaatgacggctacaagctctccggcttctataaaatcaaacccctgcaaagccctgctgagttctccgtgtactgtgatatgtcagacggtggcggttggactgtcatacagcgacggtcagacggaagcgagaactttaatagaggttggaaagactacgaaaatggcttcggtaatttcgtacagaagcacggggaatactggctgggaaataaaaacctccattttctgacaacccaggaggattacacgctaaaaatcgacctggctgactttgagaagaattccaggtatgctcagtataaaaatttcaaggtaggtgatgagaagaatttttatgagcttaacattggggagtacagtgggactgccggagattcactcgcagggaattttcatccagaagtgcaatggtgggcttcccatcagagaatgaagttttcaacctgggatcgggatcatgataattacgaaggcaactgcgccgaggaggaccagagtggttggtggttcaatagatgtcactccgctaaccttaatggagtatactatagtggaccgtatacagcgaaaactgacaatgggatcgtgtggtatacgtggcatggatggtggtattccctgaagtccgttgtgatgaaaattcgcccaaacgactttattcccaacgtgatctag

SEQ ID NO: 146514 - DNA, 939 bp, Artificial Sequence
  derived and/or modified sequence
atggcaaaggtcttttcttttatcctcgtgacaactgccctcaccatggggagggagatcagtgccctggaagattgtgctcaggagcaaatgaggttgagagcacaggtgcgactgctcgagactcgtgtaaagcaacaacaggtaaagatcaagcaactcctgcaggaaaatgaggttcaatttttggacaagggagatgagaacaccgtgatcgatctgggatcgaaacgccagtatgccgactgtagcgaaattttcaatgacggatataagctctcaggcttttacaaaatcaagccacttcagagcccggctgaattttcggtgtattgtgatatgagcgacggcgggggatggacagtgatacaaagacgatcagatgggagcgaaaatttcaacagagggtggaaagactacgagaacggttttgggaatttcgtgcagaagcatggggaatactggctcggcaacaagaacctgcactttctcaccactcaagaggattatacccttaaaatagatctagctgacttcgaaaagaattcaaggtatgcacagtataagaacttcaaagtcggtgacgaaaaaaacttctacgagttgaacatcggtgagtattcaggcacagcaggagactccctcgctgggaattttcatcctgaagtgcagtggtgggctagtcaccagcgcatgaagttctccacctgggaccgcgatcatgacaactatgagggcaattgtgcagaagaagaccagagtggctggtggttcaacagatgccacagcgcgaatttaaacggcgtctattacagcggcccctacacagcaaagaccgataatggcatcgtttggtatacctggcatggttggtggtactctctcaaatcagtagtcatgaaaatccggcctaacgatttcattcctaacgtcatttag

SEQ ID NO: 146515 - DNA, 939 bp, Artificial Sequence
  derived and/or modified sequence
atggccaaagtatttagttttattctcgttaccacagcgcttaccatggggcgcgaaatctccgctctcgaagattgcgctcaggaacagatgcggctgcgagcccaagtccgtctgctcgagacccgtgtgaagcagcaacaggttaagataaaacaacttctgcaggaaaacgaagtccagttcctcgataaaggtgacgaaaacacagttattgatctcggatcaaaacggcagtacgctgattgcagcgaaatcttcaacgacgggtataagctctctggcttttacaagattaagcctttgcagagcccggcagaattctctgtgtactgtgatatgtcggatggcggtggatggacagttatacagaggcggtcggacgggagtgaaaacttcaatcgcggttggaaagactacgaaaacggctttggaaatttcgttcagaaacatggcgagtattggctgggcaacaagaatttacactttctgacaactcaggaggactacacactaaagatagaccttgctgacttcgaaaagaattcccgatacgcccaatataagaattttaaagtgggggatgaaaaaaatttctatgaactcaatatcggtgaatattccgggactgcaggagattcattggctggcaattttcatcctgaggtgcaatggtgggcttctcaccagaggatgaagtttagcacttgggacagagaccacgataactatgagggtaactgcgcagaggaagatcagtccggttggtggtttaataggtgtcatagcgctaaccttaatggtgtgtattatagcgggccatatacagctaagactgataacgggatcgtctggtacacatggcatgggtggtggtattcattgaaatcagttgtgatgaaaattcgacctaacgattttattcctaatgtaatttag

SEQ ID NO: 146516 - DNA, 939 bp, Artificial Sequence
  derived and/or modified sequence
atggccaaagtgttctcattcattttagtaacgacagccctcactatgggaagggaaatttcagccctcgaagattgcgcacaggagcagatgaggttacgagcacaggtacgtcttttggagactcgcgtgaaacagcaacaagtgaaaattaaacagttactgcaagagaacgaggtacaatttctggataagggcgatgagaacaccgttatcgatctgggaagcaagaggcagtacgcagattgcagtgagatcttcaacgatgggtacaagttgagtggattctataagatcaagcccttgcagtcacccgcagaattttccgtctattgtgacatgagcgacggcggcggatggactgtgatccagcggagatctgacggcagcgaaaactttaatcgaggctggaaggattatgagaatggctttgggaacttcgtgcagaagcacggcgaatactggttggggaataagaatcttcactttcttactacacaggaagattataccttgaaaatcgacctcgctgatttcgaaaagaattcgcgctatgcacagtacaaaaacttcaaggtgggggatgaaaaaaacttctatgaactaaacattggagagtattcaggaaccgcgggggactcattagccggtaatttccacccggaggtacaatggtgggcctcacatcagaggatgaagttctctacatgggatagggaccatgacaattacgagggcaactgcgccgaagaggatcagtccgggtggtggttcaaccgatgtcacagtgctaatctgaacggcgtctattattctggcccctacacagctaagaccgataacgggatcgtctggtacacttggcatggatggtggtactctcttaaatctgtggtcatgaagatccgtccgaacgactttatccccaatgtaatctag

SEQ ID NO: 146517 - DNA, 939 bp, Artificial Sequence
  derived and/or modified sequence
atggcgaaggttttctcttttattttagtgactacagccttgactatgggaagggaaatttcagcattggaggactgcgctcaagaacagatgcgcctgcgagctcaggtgagactgcttgaaacgcgcgtgaagcagcaacaagtcaaaataaaacaactgctccaggagaacgaggttcagtttctggacaagggcgacgagaacaccgtgattgacctagggagcaaacgacagtacgctgattgctcggaaatttttaacgacggctacaaacttagcggattttacaagattaagcctctccagagtccagccgaattcagtgtgtactgtgacatgtccgatgggggtggctggacagtcattcagcgccgcagcgacggttctgaaaattttaaccgcggttggaaggactacgagaacggttttggaaactttgtgcagaagcacggcgaatattggcttggtaataaaaacttgcacttcctgacaacccaggaggattatacccttaagatagatctggctgacttcgaaaagaatagccggtatgcccagtataagaattttaaggttggtgatgaaaagaatttttacgagttaaacattggcgaatattccggtacagcaggtgatagcttagctggcaactttcaccctgaggtgcaatggtgggcctcgcaccaaaggatgaaatttagtacttgggaccgcgaccacgataattatgaggggaactgtgcggaagaggaccaaagcggctggtggtttaatcgctgccattcggctaacctgaacggagtatactattccggcccctatacagcaaaaactgacaacggcattgtgtggtatacttggcacggttggtggtattccttgaaaagtgttgtcatgaagatacgccccaatgacttcattccaaatgtgatttag

SEQ ID NO: 146518 - DNA, 939 bp, Artificial Sequence
  derived and/or modified sequence
atggccaaggtcttctcttttattttagtcaccacagctctgacaatgggtagagaaatatccgcgttagaggactgtgctcaagaacagatgcgccttcgtgcgcaggtgcggctgttagaaactcgcgtaaaacagcagcaggtgaagataaagcagctccttcaggagaacgaagtgcagttcttagacaagggagacgaaaataccgtcatcgacctgggaagcaaaagacaatacgccgattgttcagagatattcaacgacgggtacaagttatccggattctacaaaattaaaccattacagtcccctgccgaattcagcgtatattgcgacatgtcagatggcggaggatggacagtgattcagaggagatccgatgggagcgagaactttaacagagggtggaaggattatgagaacggcttcggaaattttgttcaaaaacatggagaatactggttgggaaacaaaaatcttcacttcctgacgactcaagaagattataccctcaagatcgacctggctgacttcgagaaaaattccaggtatgcacaatacaagaacttcaaagtcggtgatgagaaaaacttctacgagcttaatataggcgagtactctggcactgctggagatagtctcgccggcaattttcatcctgaagtacagtggtgggcttcgcaccaacgcatgaaattttctacatgggatcgggaccatgataattatgagggcaattgtgcagaggaggaccagtccgggtggtggttcaatagatgtcatagcgctaatctcaatggcgtatattattctggtccatacacagctaagacggataacggcatagtctggtatacctggcacgggtggtggtactctcttaagtccgttgtgatgaaaatccggcccaacgacttcatccctaacgttatctag

SEQ ID NO: 146519 - DNA, 939 bp, Artificial Sequence
  derived and/or modified sequence
atggcaaaggtgttttcattcatcttggtgactaccgcgcttaccatggggcgcgagatatctgcactggaggattgcgctcaagagcaaatgagactgcgcgcgcaggtgaggttactggagacacgcgttaaacaacagcaggtcaagattaagcagttgttacaggaaaacgaggtgcagttcctggacaaaggggacgaaaacacagtcattgatcttgggagtaagcggcagtacgccgattgttcagaaatttttaacgacggctacaaactctccggcttctacaaaatcaagcccctgcagagccccgccgagttcagcgtatattgtgacatgtccgacggcggtggctggaccgtgatccaacgcaggtcagatgggtccgaaaactttaatagaggatggaaagattatgagaacgggtttggaaacttcgtacagaagcatggtgaatattggttgggcaacaagaatctacattttctgaccacccaggaagactacactttgaaaatagatctggccgatttcgagaaaaattccaggtatgcgcaatacaagaattttaaggttggcgatgaaaagaacttctatgagctcaatatcggagagtattccgggaccgccggagattcacttgccgggaactttcatccagaagtgcaatggtgggcttctcaccagcggatgaagttttcgacctgggaccgcgaccatgataattacgagggaaattgtgcagaagaagaccaatccggatggtggtttaatcgctgtcacagcgccaacttgaatggagtgtattattctgggccttataccgcaaagacagataacggaatcgtatggtacacatggcatgggtggtggtactcgctgaagagtgtcgtcatgaaaatcagaccaaacgacttcatacctaatgtgatctag

SEQ ID NO: 146520 - DNA, 849 bp, Artificial Sequence
  derived and/or modified sequence
atgagattacgggctcaggtgagattactcgaaactagggttaagcaacagcaggttaagatcaaacaactgttacaagagaacgaggtgcagttcttggataaaggcgacgaaaacaccgttattgacctggggtctaagagacagtatgcagattgctccgaaatttttaacgacggatacaagcttagtggtttttacaaaataaaacctctacagtcacctgcagaattttcggtatactgtgacatgtctgacggcggggggtggactgtgattcagagaaggtctgatggatcggaaaactttaaccgtgggtggaaagattacgaaaacggatttggcaactttgtgcagaaacacggagaatactggctcggcaataaaaacctgcatttcttaaccacccaggaggactatacactcaagattgacctggcggactttgagaaaaactcccgctacgcccaatacaaaaactttaaggtgggcgacgagaagaatttttacgagctgaacatcggtgaatattcgggaacagccggagatagtctggccggaaacttccacccagaggtgcagtggtgggcaagccatcagcggatgaagttttccacctgggatagagatcatgataactatgaggggaattgtgctgaagaagatcaatccggctggtggttcaataggtgtcactcagctaatctcaacggcgtctactattctggcccctatacggcaaaaaccgataatggcattgtctggtacacatggcacggctggtggtatagcctgaaaagtgtggtgatgaaaattaggcctaacgattttatcccaaacgtcatctag

SEQ ID NO: 146521 - DNA, 939 bp, Artificial Sequence
  derived and/or modified sequence
atggcaaaagtattctcatttatccttgtaaccacagcacttaccatgggccgagaaatttccgcccttgaggattgtgcccaggaacaaatgcgtctgcgtgcgcaagtacggctgctggaaactcgggtgaaacagcaacaggtaaaaattaaacagctgctgcaagagaacgaggtgcagttcctggataagggcgacgaaaacactgtcatagatctcggcagcaaaagacaatatgctgactgtagtgagatatttaatgatggctataagctgagcggattctataagatcaaacccctgcaaagcccggccgagttcagtgtgtactgtgacatgtccgacggagggggctggaccgttattcagcgccgcagtgacggatctgagaatttcaatcgcggctggaaggactacgaaaacgggtttggcaactttgtccaaaaacacggtgagtactggcttgggaacaaaaatctccatttccttaccacacaggaggattacaccctgaagatcgacctggccgactttgagaaaaatagtagatatgctcagtataagaattttaaagtcggtgatgaaaagaatttttacgaattaaacattggcgagtactctggaaccgctggtgattcattggctggaaacttccatcccgaggtacagtggtgggcaagtcatcagcgcatgaaattttcaacatgggaccgcgaccacgataattacgaaggaaactgcgccgaagaagatcaatccggctggtggttcaatagatgccactctgccaacctgaacggggtctattactcggggccgtatacagcaaagactgacaatggcattgtatggtatacctggcacggctggtggtattccctaaagagtgtcgtgatgaagattcgccctaacgatttcattccgaatgtcatctag

SEQ ID NO: 146522 - DNA, 939 bp, Artificial Sequence
  derived and/or modified sequence
atggcaaaagttttttcattcattttagtgaccactgcactgactatgggaagagagatcagtgcacttgaggactgtgcacaggagcagatgagactacgtgctcaggtccgtttattggaaactagggtaaagcaacagcaggtgaaaataaaacagctactgcaagaaaacgaggtacaatttctcgacaaaggcgatgaaaacactgtaatcgacctgggaagtaagcgccagtatgccgattgtagcgagatttttaatgacggctacaagctgagcgggttctataagattaaacctttacaatcacctgctgagttttccgtttactgtgatatgtctgacggcggcggatggactgtaatacagagaaggtcggacggcagcgagaatttcaataggggctggaaggattatgagaatggctttggcaattttgtgcagaaacatggtgagtattggcttggcaataagaacctccacttcttaactacacaggaggactataccctgaaaatagacctggcggacttcgagaaaaactcacgttacgctcaatacaagaattttaaggtcggggatgagaaaaatttttacgagttgaacataggcgagtatagtggtacggcaggcgattccctagcaggcaacttccaccccgaggtccagtggtgggcttctcatcaaagaatgaagttttcgacatgggatcgtgaccacgacaactatgagggaaactgcgctgaagaagatcagtccggctggtggttcaatagatgtcactctgcaaaccttaacggtgtctattattcaggtccatatacggccaaaactgacaacggaatcgtgtggtacacatggcatggatggtggtactccctcaagagcgtcgtaatgaagattagacctaacgactttattcccaacgtgatatag

SEQ ID NO: 146523 - DNA, 939 bp, Artificial Sequence
  derived and/or modified sequence
atggccaaagttttctccttcattttagtgaccacagcattaaccatggggcgcgaaatctcagctctcgaagactgtgcccaggaacagatgagactccgggctcaggtcagattgctcgaaacacgggtgaagcaacaacaggttaaaatcaagcaactcctgcaggagaacgaggtgcaatttcttgataagggcgatgagaatactgtaattgacctgggtagcaaaagacagtatgccgattgctcagaaattttcaacgacgggtataaactgagcggcttttacaaaatcaaaccccttcagagtccggccgaattctccgtgtattgtgacatgagcgatggaggcggctggacagtgattcagaggaggtctgatggctctgaaaactttaatagaggatggaaggactacgagaatgggttcggaaatttcgttcagaagcacggtgaatactggctcggcaataaaaacctgcactttctgacaacacaagaagattacacccttaaaatcgatttggcagactttgagaagaacagccgatacgcacaatacaagaacttcaaggttggggatgagaaaaacttttatgagctgaatataggagagtactctggcactgcaggcgattcgcttgccgggaactttcaccccgaggtacagtggtgggcctcccatcaacgaatgaaattctccacctgggacagagatcacgacaactatgagggaaattgcgccgaggaagatcaatctggttggtggttcaatagatgtcacagcgccaatctgaacggagtttattacagcggaccctatactgccaagaccgacaatggcattgtgtggtacacctggcacggctggtggtattcactgaaatcggtcgtaatgaagattagacccaacgacttcatcccaaatgtaatttag

SEQ ID NO: 146524 - DNA, 939 bp, Artificial Sequence
  derived and/or modified sequence
atggccaaagtgttctcattcattttagtaacgacagccctcactatgggaagggaaatttcagccctcgaagattgcgcacaggagcagatgaggttacgagcacaggtacgtcttttggagactcgcgtgaaacagcaacaagtgaaaattaaacagttactgcaagagaacgaggtacaatttctggataagggcgatgagaacaccgttatcgatctgggaagcaagaggcagtacgcagattgcagtgagatcttcaacgatgggtacaagttgagtggattctataagatcaagccactgcaaagcccagcagagttcagcgtctactgtgacatgtctgacggcgggggatggactgtgatccagagaaggtccgacggcagcgaaaatttcaacaggggctggaaggattacgagaacgggtttggtaatttcgttcaaaaacatggggagtactggctgggtaataagaatctacattttctgaccacacaagaagattataccctgaaaatcgatctggctgattttgaaaaaaactctcgttacgcacagtataaaaactttaaggttggagacgaaaagaatttctacgagctcaacattggtgaatatagtggaactgcaggtgacagtctggctggcaactttcacccagaggttcagtggtgggcatctcaccagcgcatgaagttctcaacctgggaccgtgaccatgacaactacgaaggaaactgcgccgaggaagaccagagtggctggtggttcaatagatgtcattcggccaatctcaacggagtttactatagtgggccctatactgccaaaactgacaatgggatcgtatggtacacttggcacgggtggtggtattctcttaaaagtgtagtgatgaaaatccgccccaatgatttcatcccaaacgttatctag

SEQ ID NO: 146525 - DNA, 939 bp, Artificial Sequence
  derived and/or modified sequence
atggcgaaggttttctcttttattttagtgactacagccttgactatgggaagggaaatttcagcattggaggactgcgctcaagaacagatgcgcctgcgagctcaggtgagactgcttgaaacgcgcgtgaagcagcaacaagtcaaaataaaacaactgctccaggagaacgaggttcagtttctggacaagggcgacgagaacaccgtgattgacctagggagcaaacgacagtacgctgattgctcggaaatttttaacgacggctacaaacttagcggattttacaagattaagcccctacaatctccagcagagttctctgtgtactgtgatatgagtgacggtggtggttggacagtcatccagaggcgatcagatgggtccgagaacttcaacaggggctggaaagactatgaaaacggtttcggaaactttgtccagaagcatggcgagtattggctgggcaacaagaacctccactttctaacaacccaagaggactacacgctgaaaatcgatctggcagatttcgagaagaatagtagatacgcgcaatataagaactttaaagtgggtgatgagaaaaacttctatgagttaaacattggcgaatattccggtacagcaggtgatagcttagctggcaactttcaccctgaggtgcaatggtgggcctcgcaccaaaggatgaaatttagtacttgggaccgcgaccacgataattatgaggggaactgtgcggaagaggaccaaagcggctggtggtttaatcgctgccattcggctaacctgaacggagtatactattccggcccctatacagcaaaaactgacaacggcattgtgtggtatacttggcacggttggtggtattccttgaaaagtgttgtcatgaaaatcaggcccaatgactttatcccaaatgtaatttag

SEQ ID NO: 146526 - DNA, 939 bp, Artificial Sequence
  derived and/or modified sequence
atggccaaagttttctcatttatactggtgaccaccgccctgaccatgggacgcgaaatttctgcactagaggattgcgcccaagaacagatgaggctccgggcccaggtgcgcctgttagaaactagagttaagcaacagcaagtgaagattaaacagctcttgcaggaaaacgaagtgcaattcctagataagggtgatgaaaatacggtgatcgatctcgggagcaagagacagtatgccgattgttctgaaatatttaatgatggctataaactgagtggcttctataagatcaagccgcttcagtcacccgccgagttcagcgtttattgtgacatgtccgacgggggggggtggacagtgattcaacggagatcagacgggagcgagaatttcaacagaggttggaaagattacgaaaatgggtttggaaacttcgttcagaagcatggggaatattggctgggtaacaaaaatctacatttcctgacgacgcaggaggactacaccctcaagatagatttagcagactttgagaagaattccagatacgctcaatacaaaaactttaaggtaggagatgagaaaaacttttacgaactcaacatcggagaatatagtggaactgctggagattcccttgccggcaactttcaccccgaagtgcaatggtgggcctcacaccagcgcatgaagtttagtacctgggatcgagaccatgacaattacgaaggcaactgtgcggaagaagaccaatccggttggtggttcaatcgatgtcatagcgcaaacctgaacggggtctactattccggaccttataccgcaaaaactgataatggcatcgtatggtatacctggcacggctggtggtactctctgaagtcagtagttatgaaaattaggcccaacgactttataccgaatgttatttag

SEQ ID NO: 146527 - DNA, 939 bp, Artificial Sequence
  derived and/or modified sequence
atggccaaggtattctcttttattcttgtaactaccgccctcaccatgggcagggagatcagtgccttagaggattgcgcccaggaacagatgcggttaagggcccaggtccgtttattagagacacgcgtcaagcaacagcaagtgaaaattaaacagttacttcaggaaaacgaggtgcaatttctcgacaaaggggacgagaatacagtcatagatctggggtctaagaggcagtatgctgattgctcagagatatttaacgacggatacaagctgtctggattctataagataaaacctctccagagccctgccgaattttcagtctactgcgatatgtcagacgggggggggtggaccgttatacagaggcggagtgatggtagtgagaatttcaatagagggtggaaggactacgagaatggattcggtaatttcgtccagaagcacggggaatactggctcggaaataaaaatttgcactttttaactactcaggaggactacacgctgaaaatcgaccttgctgattttgaaaaaaacagtagatacgcccagtacaagaattttaaggtaggggacgaaaaaaacttctatgagttgaacatcggcgagtatagcggcacagctggcgattctctcgctggcaattttcacccagaggtgcagtggtgggctagtcaccagaggatgaagttctccacttgggaccgcgaccacgataactacgaaggcaactgcgctgaagaagaccaaagcggatggtggtttaatagatgtcattctgccaatttgaacggggtatactactcaggtccctatacagccaaaacagacaacgggattgtatggtacacatggcatggttggtggtatagcctaaagtctgtcgtaatgaagattaggccaaacgactttataccgaatgttatatag

SEQ ID NO: 146528 - DNA, 849 bp, Artificial Sequence
  derived and/or modified sequence
atgagattacgggctcaggtgagattactcgaaactagggttaagcaacagcaggttaagatcaaacaactgttacaagagaacgaggtgcagttcttggataaaggcgacgaaaacaccgttattgacctggggtctaagagacagtatgcagattgctccgaaatttttaacgacggatacaagcttagtggtttttacaaaataaaacctctacagtcacctgcagaattttcggtatactgtgacatgtctgacggcggggggtggactgtgattcagagaaggtctgatggatcggagaactttaacagaggatggaaagattatgagaacggttttgggaatttcgtgcagaagcatggcgagtattggttgggcaataagaatctccactttctaacaactcaagaggattacacattaaagatcgatctggctgacttcgaaaagaactctagatatgcgcagtacaaaaattttaaagtgggagacgaaaagaacttctacgaactcaacattggtgaatattccggtaccgctggggattcactcgcagggaactttcacccggaagtccaatggtgggctagccaccagcggatgaaattctctacatgggacagggatcacgataactatgaaggtaactgcgctgaggaagaccagagcggttggtggttcaatcggtgtcactctgcaaacctgaatggagtttactactctggcccttataccgcgaagactgataatggcattgtttggtatacctggcatggatggtggtactctctgaaaagcgtggtaatgaaaattcgccctaacgattttatacctaacgtgatttag

SEQ ID NO: 146529 - DNA, 939 bp, Artificial Sequence
  derived and/or modified sequence
atggcaaaagtcttctcttttatactcgtgacgacagctctgactatgggaagagagatttcagcccttgaggattgtgcgcaggaacagatgcgacttcgtgctcaagtacgcctattggaaacgcgagtcaagcagcaacaagtgaagattaagcagctactccaagagaatgaggtccaattcttagacaagggggacgagaacacagttatcgacttgggatcgaaacggcagtacgccgactgctcagagatctttaatgatggttacaagctgagtgggttttacaagataaaaccattgcaaagccccgcagagttttccgtctattgtgacatgagcgacggcggcggatggacagtgattcagcgccgctccgatggatccgagaactttaacagaggatggaaggattacgagaatggattcggcaactttgtgcaaaaacatggggaatattggttgggtaataaaaatctccacttcctcacaacacaggaggattacacactgaaaattgacttggcagatttcgaaaagaactcacggtacgctcagtacaaaaacttcaaagtaggggacgaaaagaacttctacgaattaaacattggcgagtactctggaaccgctggtgattcattggctggaaacttccatcccgaggtacagtggtgggcaagtcatcagcgcatgaaattttcaacatgggaccgcgaccacgataattacgaaggaaactgcgccgaagaagatcaatccggctggtggttcaatagatgccactctgccaacctgaacggggtctattactcggggccgtatacagcaaagactgacaatggcattgtatggtatacctggcacggctggtggtattccctaaagagtgtcgtgatgaagattagaccaaacgatttcatcccaaatgttatttag

SEQ ID NO: 146530 - DNA, 849 bp, Artificial Sequence
  derived and/or modified sequence
atgagactgagagcccaggtgagactgctggagaccagagtgaagcagcagcaggtgaagatcaagcagctgctgcaggagaacgaggtgcagttcctggacaagggcgacgagaacaccgtgatcgacctgggcagcaagagacagtacgccgactgcagcgagatcttcaacgacggctacaagctgagcggcttctacaagatcaagcccctgcagagccccgccgagttcagcgtgtactgcgacatgagcgacggcggcggctggaccgtgatccagagaagaagcgacggcagcgagaacttcaacagaggctggaaggactacgagaacggcttcggcaacttcgtgcagaagcacggcgagtactggctgggcaacaagaacctgcacttcctgaccacccaggaggactacaccctgaagatcgacctggccgacttcgagaagaacagcagatacgcccagtacaagaacttcaaggtgggcgacgagaagaacttctacgagctgaacatcggcgagtacagcggcaccgccggcgacagcctggccggcaacttccaccccgaggtgcagtggtgggccagccaccagagaatgaagttcagcacctgggacagagaccacgacaactacgagggcaactgcgccgaggaggaccagagcggctggtggttcaacagatgccacagcgccaacctgaacggcgtgtactacagcggcccctacaccgccaagaccgacaacggcatcgtgtggtacacctggcacggctggtggtacagcctgaagagcgtggtgatgaagatcagacccaacgacttcatccccaacgtgatctag

SEQ ID NO: 146531 - RNA, 939 nt, Artificial Sequence
  derived and/or modified sequence
auggcuaaaguguuuucuuuuauacuggucacgacggcucugacuauggggcgggagauuucugcccuggaagauugugcacaggaacagaugaggcuucgugcccaaguucgcuuacuugaaacucgugucaaacagcagcaagugaagaucaagcagcuucuucaggaaaacgaagugcaauuccuugauaagggagacgaaaacaccgugauugaucugggcucuaagcggcaguacgccgauugcucugaaauuuuuaacgauggauauaagcugucugguuuuuacaaaaucaaaccacuccagucucccgcagaauuuucgguuuauugcgacaugagcgacgggggaggauggacaguuauccaaagacggagcgacggcuccgaaaauuuuaaucgaggcuggaaagacuacgaaaauggcuuuggaaauuuugugcagaaacacggggaguacuggcugggcaacaagaaccugcacuuccugacuacgcaagaagauuauacuuuaaaaauagaccuagcugacuuugaaaagaacagccguuacgcccaguauaaaaauuuuaaggugggagaugagaagaacuuuuaugaacugaauauuggggaauacucgggaaccgccggcgacagcuuagcugguaacuuucauccugaaguccaauggugggccucacaucagcguaugaaguucucuacaugggaccgggaccacgacaauuacgaaggaaacugcgccgaagaggaccagucaggguggugguucaacagaugccauagcgcuaaucuaaacggugucuacuauuccggucccuauacagcuaagacagacaauggcauaguaugguacacuuggcacgguuggugguauucccugaagucuguggucaugaaaauccgacccaacgacuuuaucccgaacgugaucuag

SEQ ID NO: 146532 - RNA, 939 nt, Artificial Sequence
  derived and/or modified sequence
auggcuaagguuuucuccuuuauacuugugacaaccgcacuuacuaugggccgugagaucucagcccuggaggauugugcgcaagaacaaaugagacugcgugcccaggucaggcugcuagagacaaggguaaaacaacagcaggugaagauuaagcaacuucuccaagaaaacgaaguucaauucuuagauaagggcgaugaaaacacaguuauugaccuaggaucuaaaaggcaauacgcugacuguuccgaaaucuucaacgacggauacaagcuuucuggauucuauaagaucaaaccacuccagaguccagccgaauuuucuguuuacugcgauaugagugauggaggcggauggaccguaauacagcgcagauccgacgggagcgagaauuucaaccgcggcuggaaggacuacgagaauggauucggaaauuuuguccagaagcacggagaauacuggcucggcaauaagaaccugcauuuccugacuacacaagaagauuauacucugaaaauugauuuagccgauuuugagaaaaauucucgguacgcccaguauaagaauuucaaggugggggaugagaagaauuucuacgaacugaauaucggcgaguauagcgguaccgcaggcgauucucuggcuggaaacuuucaccccgaaguucaguggugggcgucacaucaacggaugaaauuuucuacuugggauagggaucacgacaauuacgagggaaacugugcagaggaggaucaaucuggauggugguucaaccggugccauucugcgaaccuuaauggcguuuauuacuccggcccauacacugcgaaaacagauaaugguaucgugugguauacguggcacggguggugguauucucuuaaaaguguagugaugaaaauaaggcccaacgacuucauccccaacguaaucuag

SEQ ID NO: 146533 - protein, 354 aa, Artificial Sequence
  derived and/or modified sequence
MYREWVVVNVFMMLYVQLVQGSSNEHGPVKRSSQSTLERSEQQIRAASSLEELLRITHSEDWKLWRCRLRLKSFTSMDSRSASHRSTRFAATFYDIETLKVIDEEWQRTQCSPRETCVEVASELGKSTNTFFKPPCVNVFRCGGCCNEESLICMNTSTSYISKQLFEISVPLTSVPELVPVKVANHTGCKCLPTAPRHPYSIIRRSIQIPEEDRCSHSKKLCPIDMLWDSNKCKCVLQEENPLAGTEDHSHLQEPALCGPHMMFDEDRCECVCKTPCPKDLIQHPKNCSCFECKESLETCCQKHKLFHPDTCSCEDRCPFHTRPCASGKTACAKHCRFPKEKRAAQGPHSRKNP

SEQ ID NO: 146534 - DNA, 1065 bp, Artificial Sequence
  derived and/or modified sequence
atgtacagagagtgggtggtggtgaacgtgtttatgatgctgtatgtgcagttggtccagggcagtagtaatgagcacggaccagtgaagaggagcagccagagcactctggaaagatcagagcaacaaatcagagccgctagtagcctagaagaacttttgaggattacccactccgaggattggaagctgtggagatgcaggctgagactcaaaagcttcaccagcatggatagtcgatcagccagccatagaagcaccaggtttgcagccactttttatgatatcgaaacactgaaagtaattgacgaagagtggcagagaactcaatgcagcccgcgggaaacctgcgtggaggtggcatcggagctcggaaagtctacgaatactttcttcaagccaccctgtgtaaacgtgtttagatgcggcggctgctgtaacgaggaaagtctgatttgtatgaatactagcacaagttacatctctaagcagttgtttgagatctctgtaccgctcacctcagttccagagctggtccccgtgaaagtggccaaccacactggatgcaagtgtctgcctactgcacctcgtcacccatatagcattatccgccgaagcatccaaatcccagaagaagacagatgctcccatagtaaaaaactttgtccgatcgacatgttatgggactcgaacaaatgcaagtgtgttctgcaagaggagaacccgttagccggtactgaggatcactcacacctgcaagaacctgcattatgtgggccacacatgatgttcgacgaagacagatgcgaatgtgtgtgtaagacgccttgccccaaagatcttatccagcacccaaaaaactgttcatgcttcgagtgcaaggaaagcctcgagacttgctgccagaaacacaaactgtttcaccctgacacctgttcatgcgaggacaggtgcccatttcataccagaccgtgtgcctccgggaaaaccgcgtgtgccaaacactgccgtttccccaaggagaaacgggctgcgcagggccctcatagcaggaagaacccctag

SEQ ID NO: 146535 - DNA, 1065 bp, Artificial Sequence
  derived and/or modified sequence
atgtaccgggagtgggtggtggtgaatgtgttcatgatgctgtatgtgcagctggtgcagggcagcagcaatgagcacggccctgtgaagaggagcagccagagcaccctggagaggtctgagcagcagatccgggccgccagcagcctggaggagctgctgcgcatcacccacagcgaggactggaagctgtggcgctgccgcctgcggctgaagagcttcacctccatggacagccgcagcgccagccacaggagcaccaggtttgctgccaccttctatgacatcgagaccctgaaggtgattgatgaggagtggcagaggacccagtgcagcccccgggagacctgtgtggaggtggccagcgagctgggcaagagcaccaacaccttcttcaagccaccctgtgtgaatgtgttccgctgtggcggctgctgcaatgaggagagcctcatctgcatgaacaccagcaccagctacatcagcaagcagctgtttgagatctctgtgcccctgacctctgtgcctgagctggtgcctgtgaaggtggccaaccacacaggctgcaagtgcctgcccacagcccccaggcacccctacagcatcatccgccgcagcatccagatccctgaggaggaccgctgcagccacagcaagaagctgtgccccatcgacatgctgtgggacagcaacaagtgcaagtgtgtgctgcaggaggagaaccccctggccggcacagaggaccacagccacctgcaggagcccgccctgtgtggcccccacatgatgtttgatgaggacagatgtgaatgtgtgtgcaagaccccctgccccaaggacctgatccagcaccccaagaactgcagctgctttgagtgcaaggagagcctggagacctgctgccagaagcacaagctgttccacccagacacctgcagctgtgaagatcgctgccccttccacacccggccctgtgccagcggcaagacagcctgtgccaagcactgccgcttccccaaggagaagagagctgcccagggcccccacagcaggaagaacccctag

SEQ ID NO: 146536 - DNA, 1065 bp, Artificial Sequence
  derived and/or modified sequence
atgtaccgggagtgggtggtggtgaacgtgttcatgatgctgtacgtccagcttgtgcaggggtcatctaacgagcacgggccagtgaaacgctctagtcagtccaccctcgagagatctgaacagcagatccgcgccgctagcagcctggaagagctattacgcatcacccattccgaagattggaagctctggcgctgccggttgcgactgaaaagcttcaccagcatggacagccgatctgccagtcataggtcaactaggtttgccgccacgttctatgatatcgaaaccctgaaagtgattgatgaggaatggcaaaggactcagtgcagccctcgagaaacatgcgtggaggtggcctccgagctaggcaagtctacgaacaccttcttcaagccaccctgcgtcaacgtttttcgatgcggaggatgttgcaacgaggagtcactaatatgcatgaacacgtcaacatcctatataagcaaacagctattcgaaatcagcgtacccctcacgtctgtgccagaactcgttcccgtcaaagtggccaatcacaccgggtgtaaatgtctgccaacagcacctcggcacccttactccatcatccggaggtccatccagatccccgaagaggacaggtgttcccattctaagaagttatgtcccatcgacatgctgtgggactccaacaagtgcaagtgcgtgcttcaggaggaaaatcctctagccggcacagaagaccattcccatctccaggaacctgctctctgcgggccacacatgatgtttgacgaggacaggtgcgagtgtgtgtgtaagacaccctgtcctaaagatttaatccaacatccaaaaaattgttcctgctttgagtgtaaagagagcctggagacctgttgccagaagcacaagcttttccaccccgacacctgtagctgcgaggatcgttgtccttttcacaccaggccttgtgcctctggcaagacagcctgcgccaagcattgccgctttccgaaagaaaagagggccgcgcaggggccacacagtcggaagaacccttag

SEQ ID NO: 146537 - DNA, 1065 bp, Artificial Sequence
  derived and/or modified sequence
atgtatagagagtgggtggtcgtaaatgtattcatgatgttgtacgtgcagttggtccaggggtcctccaacgagcacggccctgtgaaacgctcatctcagtctaccctagaacggagtgagcagcagatcagagccgcatcctcactggaggagctgctccgcatcactcactctgaagattggaaactttggcgctgccgcctgagactgaagtcattcacctctatggacagccgctctgcctcccaccgatctacaaggttcgccgcaaccttttacgacatcgagacactaaaggtgattgacgaggagtggcagcggacacagtgtagtccacgagagacctgtgtggaagtagcttctgagctcggcaaatcaacaaacaccttctttaaacccccttgcgtgaatgtgttcagatgcggagggtgttgcaacgaagagtccctaatctgtatgaacaccagcacctcttacatctctaagcagctttttgagattagtgtacccctgacttccgtgccagagctagtacctgtgaaggtcgctaaccataccggttgcaagtgcctgccaactgcccctcggcacccttactcgatcatcaggaggtcaattcagataccggaggaggatagatgttcacatagcaagaaattgtgccccatagatatgttgtgggacagcaataagtgcaaatgtgtcttgcaggaagaaaaccctctggcaggaaccgaagatcacagccaccttcaggagccagctctttgtggtccacatatgatgtttgacgaagacaggtgtgaatgcgtgtgcaagacaccttgccctaaagacctcatacaacacccaaaaaactgtagctgtttcgagtgtaaagaaagccttgaaacttgctgtcaaaaacataaattatttcatcccgacacgtgctcttgtgaggaccggtgtccatttcacacgagaccctgcgcaagtgggaaaaccgcctgtgccaagcattgtcgcttccccaaagagaagcgggcagcgcaaggccctcactcgagaaaaaacccctag

SEQ ID NO: 146538 - DNA, 2037 bp, Artificial Sequence
  derived and/or modified sequence
caaaaaagtttcaatccagagttgggttccagctttctgtagctgtaagcattggtggccacaccacctccttacaaagcaactagaacctgcggcatacattggagagatttttttaattttctggacatgaagtaaatttagagtgctttctaatttcaggtagaagacatgtccaccttctgattatttttggagaacattttgatttttttcatctctctctccccacccctaagattgtgcaaaaaaagcgtaccttgcctaattgaaataatttcattggattttgatcagaactgattatttggttttctgtgtgaagttttgaggtttcaaactttccttctggagaatgccttttgaaacaattttctctagctgcctgatgtcaactgcttagtaatcagtggatattgaaatattcaaaatgtacagagagtgggtagtggtgaatgttttcatgatgttgtacgtccagctggtgcagggctccagtaatgaacatggaccagtgaagcgatcatctcagtccacattggaacgatctgaacagcagatcagggctgcttctagtttggaggaactacttcgaattactcactctgaggactggaagctgtggagatgcaggctgaggctcaaaagttttaccagtatggactctcgctcagcatcccatcggtccactaggtttgcggcaactttctatgacattgaaacactaaaagttatagatgaagaatggcaaagaactcagtgcagccctagagaaacgtgcgtggaggtggccagtgagctggggaagagtaccaacacattcttcaagcccccttgtgtgaacgtgttccgatgtggtggctgttgcaatgaagagagccttatctgtatgaacaccagcacctcgtacatttccaaacagctctttgagatatcagtgcctttgacatcagtacctgaattagtgcctgttaaagttgccaatcatacaggttgtaagtgcttgccaacagccccccgccatccatactcaattatcagaagatccatccagatccctgaagaagatcgctgttcccattccaagaaactctgtcctattgacatgctatgggatagcaacaaatgtaaatgtgttttgcaggaggaaaatccacttgctggaacagaagaccactctcatctccaggaaccagctctctgtgggccacacatgatgtttgacgaagatcgttgcgagtgtgtctgtaaaacaccatgtcccaaagatctaatccagcaccccaaaaactgcagttgctttgagtgcaaagaaagtctggagacctgctgccagaagcacaagctatttcacccagacacctgcagctgtgaggacagatgcccctttcataccagaccatgtgcaagtggcaaaacagcatgtgcaaagcattgccgctttccaaaggagaaaagggctgcccaggggccccacagccgaaagaatccttgattcagcgttccaagttccccatccctgtcatttttaacagcatgctgctttgccaagttgctgtcactgtttttttcccaggtgttaaaaaaaaaatccattttacacagcaccacagtgaatccagaccaaccttccattcacaccagctaaggagtccctggttcattgatggatgtcttctagctgcagatgcctctgcgcaccaaggaatggagaggaggggacccatgtaatccttttgtttagttttgtttttgttttttggtgaatgagaaaggtgtgctggtcatggaatggcaggtgtcatatgactgattactcagagcagatgaggaaaactgtagtctctgagtcctttgctaatcgcaactcttgtgaattattctgattcttttttatgcagaatttgattcgtatgatcagtactgactttctgattactgtccagcttatagtcttccagtttaatgaactaccatctgatgtttcatatttaagtgtatttaaagaaaataaacaccattattcaagccatataa

SEQ ID NO: 146539 - DNA, 1065 bp, Artificial Sequence
  derived and/or modified sequence
atgtacagagagtgggtggtggtgaacgtgttcatgatgctgtacgtgcagctggtgcagggcagcagcaacgagcacggccccgtgaagagaagcagccagagcaccctggagagaagcgagcagcagatcagagccgccagcagcctggaggagctgctgagaatcacccacagcgaggactggaagctgtggagatgcagactgagactgaagagcttcaccagcatggacagcagaagcgccagccacagaagcaccagattcgccgccaccttctacgacatcgagaccctgaaggtgatcgacgaggagtggcagagaacccagtgcagccccagagagacctgcgtggaggtggccagcgagctgggcaagagcaccaacaccttcttcaagcccccctgcgtgaacgtgttcagatgcggcggctgctgcaacgaggagagcctgatctgcatgaacaccagcaccagctacatcagcaagcagctgttcgagatcagcgtgcccctgaccagcgtgcccgagctggtgcccgtgaaggtggccaaccacaccggctgcaagtgcctgcccaccgcccccagacacccctacagcatcatcagaagaagcatccagatccccgaggaggacagatgcagccacagcaagaagctgtgccccatcgacatgctgtgggacagcaacaagtgcaagtgcgtgctgcaggaggagaaccccctggccggcaccgaggaccacagccacctgcaggagcccgccctgtgcggcccccacatgatgttcgacgaggacagatgcgagtgcgtgtgcaagaccccctgccccaaggacctgatccagcaccccaagaactgcagctgcttcgagtgcaaggagagcctggagacctgctgccagaagcacaagctgttccaccccgacacctgcagctgcgaggacagatgccccttccacaccagaccctgcgccagcggcaagaccgcctgcgccaagcactgcagattccccaaggagaagagagccgcccagggcccccacagcagaaagaacccctag

SEQ ID NO: 146540 - protein, 142 aa, Artificial Sequence
  derived and/or modified sequence
MRLSWFRVLTVLSICLSAVATATGAEGKRKLQIGVKKRVDHCPIKSRKGDVLHMHYTGKLEDGTEFDSSLPQNQPFVFSLGTGQVIKGWDQGLLGMCEGEKRKLVIPSELGYGERGAPPKIPGGATLVFEVELLKIERRTEL

SEQ ID NO: 146541 - protein, 102 aa, Artificial Sequence
  derived and/or modified sequence
MRLSWFRVLTVLSICLSAVATATGAEGKRKLQIGVKKRVDHCPIKSRKGDVLHMHYTGKLEDGTEFDSSLPQNQPFVFSLGTGQVIKGWDQGLLGMCEGEKR

SEQ ID NO: 146542 - DNA, 657 bp, Artificial Sequence
  derived and/or modified sequence
ggcgtgtggccgcgggtttcgcacggtccaataagggagggcggcgtggcccggcctggtagcgacgaggacgcgcctgcgcagaggcggcagcaccaccggggttgactccgggggcgcggcgaggagagacatgaggctgagctggttccgggtcctgacagtactgtccatctgcctgagcgccgtggccacggccacgggggccgagggcaaaaggaagctgcagatcggggtcaagaagcgggtggaccactgtcccatcaaatcgcgcaaaggggatgtcctgcacatgcactacacggggaagctggaagatgggacagagtttgacagcagcctgccccagaaccagccctttgtcttctcccttggcacaggccaggtcatcaagggctgggaccaggggctgctggggatgtgtgagggggaaaagcgcaagctggtgatcccatccgagctagggtatggagagcggggagctcccccaaagattccaggtggtgcaaccctggtgttcgaggtggagctgctcaaaatagagcgacgaactgagctgtaaccagactggggaggggcagggggagaggcccccatcagggaccagactgttccaaaaaaaaaacaaaaaacaaaaacaaacaaaaaaacacttaa

SEQ ID NO: 146543 - DNA, 1002 bp, Artificial Sequence
  derived and/or modified sequence
gtggtgtgggtggagcgggctcggcggccagcagacacagggccagtctgggtgccccggagacccccaagggctcagagttggggcggcgccccgggcggaagcacagggccaggctggggggtatctcccgaggacccgggctcctcggagccacccagtggggatgtgtgggtgcctcggggccggccccctgcagcggccgcagaggtgttggtgtgctggaccgggggcagctgggtgtggcgtgagtggggccgcccagtcggggcaactgcagtgcagccagatagggtctggactttgcgtaaagggacaggcgggaactgaagagcggaggtggggactgggagggagggaaggtatgggggtgagcaaaggggcgggtccctggctgctgtggcctcccctgaccccctccccccgctgctggggtcctcggccaagcccccttctcactggactgagacatgaggctgagctggttccgggtcctgacagtactgtccatctgcctgagcgccgtggccacggccacgggggccgagggcaaaaggaagctgcagatcggggtcaagaagcgggtggaccactgtcccatcaaatcgcgcaaaggggatgtcctgcacatgcactacacggggaagctggaagatgggacagagtttgacagcagcctgccccagaaccagccctttgtcttctcccttggcacaggccaggtcatcaagggctgggaccaggggctgctggggatgtgtgagggggaaaagcgcaagctggtgatcccatccgagctagggtatggagagcggggagctcccccaaagattccaggtggtgcaaccctggtgttcgaggtggagctgctcaaaatagagcgacgaactgagctgtaaccagactggggaggggcagggggagaggcccccatcagggaccagactgttccaaaaaaaaaacaaaaaacaaaaacaaacaaaaaaacacttaaaagcccaa

SEQ ID NO: 146544 - DNA, 613 bp, Artificial Sequence
  derived and/or modified sequence
ctggggggagccggggtgcaagagggcaggctggatcaggccgggcagaagcggaccgggctccgagtgtcaacgagagctagagacatgaggctgagctggttccgggtcctgacagtactgtccatctgcctgagcgccgtggccacggccacgggggccgagggcaaaaggaagctgcagatcggggtcaagaagcgggtggaccactgtcccatcaaatcgcgcaaaggggatgtcctgcacatgcactacacggggaagctggaagatgggacagagtttgacagcagcctgccccagaaccagccctttgtcttctcccttggcacaggccaggtcatcaagggctgggaccaggggctgctggggatgtgtgagggggaaaagcgcaagctggtgatcccatccgagctagggtatggagagcggggagctcccccaaagattccaggtggtgcaaccctggtgttcgaggtggagctgctcaaaatagagcgacgaactgagctgtaaccagactggggaggggcagggggagaggcccccatcagggaccagactgttccaaaaaaaaaacaaaaaacaaaaacaaacaaaaaaacacttaaaa

SEQ ID NO: 146545 - DNA, 639 bp, Artificial Sequence
  derived and/or modified sequence
tggccccgggcgtcctcgcgggggtggtctccgtggtggccgggcttggggacgccgtaggccgagaactccaccgggagaggtggtgtgggtggagcgggctcggcggccagcagacacagggccagtctgggtgccccggagacccccaagggctcagagttggggcggcgccccgggcggaagcacagggccaggctggggggtatctcccgaggacccgggctcctcggagccacccagtggggatgtgtgggtgcctcggggccggccccctgcagcggccgcagaggtgttggtgtgctggaccgggggcagctgggtgtggcagacatgaggctgagctggttccgggtcctgacagtactgtccatctgcctgagcgccgtggccacggccacgggggccgagggcaaaaggaagctgcagatcggggtcaagaagcgggtggaccactgtcccatcaaatcgcgcaaaggggatgtcctgcacatgcactacacggggaagctggaagatgggacagagtttgacagcagcctgccccagaaccagccctttgtcttctcccttggcacaggccaggtcatcaagggctgggaccaggggctgctggggatgtgtgagggggaaaagcgc

SEQ ID NO: 146546 - DNA, 429 bp, Artificial Sequence
  derived and/or modified sequence
atgcggctgtcttggtttcgagtgctcactgtactgtccatttgtctgagcgccgtcgccaccgctacaggggcagagggcaaacgtaagctgcagataggggtgaaaaaaagagtggaccattgtcccattaaatctcgaaagggagatgtgctacacatgcactacaccgggaaactggaagatggtacagagttcgatagctccctgccccagaatcaaccttttgtcttttcgttaggaacaggtcaagtcatcaaaggatgggatcagggactactgggaatgtgtgagggtgagaagcggaagctggtgataccatccgagctcggatacggtgaaagaggggcccctcccaaaatcccagggggcgcgactctggtgttcgaagtggaacttctgaaaatcgaaaggaggaccgagctatag

SEQ ID NO: 146547 - DNA, 429 bp, Artificial Sequence
  derived and/or modified sequence
atgcgcctgtcatggttcagggtgctgactgtgttgtctatctgtctgtccgccgtggccaccgctacaggggcagaaggcaagcgcaaactgcagatcggcgtaaagaagagagtggatcattgccctattaaatctcgtaaaggggacgtcctacacatgcactacactggcaaactggaggacggcacagaattcgactcgtctctgccccagaatcaacccttcgtgttttccttgggaacagggcaggtaataaagggttgggatcagggattgctgggtatgtgcgagggtgaaaaacgtaaactggtgatccctagcgaactgggttacggagagaggggggctcctcccaaaattcccggcggggctactctcgtgttcgaggttgagctgttgaagattgaacgacgcaccgagctctag

SEQ ID NO: 146548 - DNA, 429 bp, Artificial Sequence
  derived and/or modified sequence
atgagactcagctggtttagggtgctgacggtgttgtcaatatgtttaagcgctgtggccactgcgacgggcgccgagggcaaacggaagctgcaaatcggtgtaaagaagcgggtagaccattgtccaattaaatcacgcaaaggtgatgtgctccacatgcattataccggtaaacttgaggacggtaccgaatttgactcatctctgccacagaaccaaccctttgtgttcagcctcggtactggacaagtcatcaagggctgggatcagggattgctaggaatgtgtgaaggggaaaagagaaaacttgtgatacctagtgaactgggctatggggagcgaggcgcacctccgaagattcccggaggcgcaacgctggtgttcgaagtcgaactcctcaaaatcgagcggcggacagaattgtag

SEQ ID NO: 146549 - DNA, 309 bp, Artificial Sequence
  derived and/or modified sequence
atgagactttcttggttccgtgttttaaccgtgctgagcatctgcttgtcagctgttgcgaccgccaccggagcagaaggcaagcgcaaacttcagatcggcgttaaaaaacgagttgaccattgtccaatcaaatccagaaagggcgacgtgcttcacatgcattatacaggtaagctagaggatggtaccgagttcgatagctcactgccgcagaaccaaccatttgtattttctttgggtaccggccaggttatcaaggggtgggatcagggattgctagggatgtgcgaaggcgaaaaacgctag

SEQ ID NO: 146550 - DNA, 429 bp, Artificial Sequence
  derived and/or modified sequence
atgaggctgtcctggttccgggtgctgactgtgctgagcatctgcctgtctgctgtggccacagccactggagctgagggcaagaggaagctgcagattggagtgaagaagagggtggaccactgccccatcaagagcaggaaaggagatgtgctgcacatgcactacacaggcaagctggaggatggaacagaatttgacagcagcctgccccagaaccagccctttgtgttcagcctgggcaccggccaggtgatcaagggctgggaccagggcctgctgggcatgtgtgagggggagaagaggaagctggtgatccccagcgagctgggctacggggagcggggggccccacccaagatccctgggggcgccaccctggtgtttgaggtggagctgctgaagattgaaagaagaacagagctgtag

SEQ ID NO: 146551 - DNA, 309 bp, Artificial Sequence
  derived and/or modified sequence
atgaggctgtcctggttccgggtgctgactgtgctgagcatctgcctgtctgctgtggccacagccactggagctgagggcaagaggaagctgcagattggagtgaagaagagggtggaccactgccccatcaagagcaggaaaggagatgtgctgcacatgcactacacaggcaagctggaggatggaacagaatttgacagcagcctgccccagaaccagccctttgtgttcagcctgggcaccggccaggtgatcaagggctgggaccagggcctgctgggcatgtgtgagggggagaagaggtag

SEQ ID NO: 146552 - DNA, 429 bp, Artificial Sequence
  derived and/or modified sequence
atgcggctgagctggttccgggtgctgaccgtgctgagcatctgcctgtccgcagtcgcaactgcaaccggagccgagggaaagagaaagttgcaaatcggagttaaaaagcgggttgaccactgtcccataaagagccggaagggggacgtcctccacatgcactacaccggcaagctcgaagatggcaccgagtttgattcgtctttaccccaaaaccagcccttcgtgttttccttgggcactggccaggtcatcaaaggatgggatcagggccttttaggcatgtgcgaaggcgagaaaagaaaactggtaatcccaagcgagcttggatacggagaacgcggtgctcctcctaaaatcccaggcggggctactctggtcttcgaggtggaactgctgaagatcgaacggagaactgagctctag

SEQ ID NO: 146553 - DNA, 429 bp, Artificial Sequence
  derived and/or modified sequence
atgcggctgagctggttccgggtgctgaccgtgctgagcatctgcctgtcagctgtagcgacggccactggcgctgagggcaaaaggaagctgcagatcggtgtcaagaagcgggtggatcattgtccaattaagtctagaaaaggcgatgtgctgcacatgcactacactggcaagctggaagatggaacagagttcgactccagcctgccacagaaccaacccttcgttttctctctcgggactggccaggtcatcaaaggatgggaccaggggcttttggggatgtgcgagggagaaaagcggaagctggtgatccctagcgagctcggctatggcgaaaggggggcaccacccaagataccaggaggcgccacacttgtgtttgaagttgaactactgaagattgaaagaagaaccgagctgtag

SEQ ID NO: 146554 - DNA, 429 bp, Artificial Sequence
  derived and/or modified sequence
atgcggctgagctggttccgggtgctgaccgtgctgagcatctgcttgagcgccgttgctacagctacaggcgccgagggaaaacgtaaattgcaaattggcgtgaaaaagagggtggaccattgtccaatcaaaagccgcaagggcgatgtgctgcatatgcactacactggaaagttggaagatggtactgaatttgactcttccttgccacagaaccagcctttcgtttttagtctcggcaccggccaggttattaagggttgggaccagggcttactcggaatgtgcgaaggagagaagaggaaactggttatccctagtgaactgggatacggtgaacggggtgctccccctaaaatcccgggaggggccactttggtgtttgaggtagaacttttgaagatcgagaggaggacggaactgtag

SEQ ID NO: 146555 - DNA, 309 bp, Artificial Sequence
  derived and/or modified sequence
atgcggctgagctggttccgggtgctgaccgtgctgagcatctgcttgtctgcagttgctaccgcgacaggcgcggaagggaagagaaagctccagatcggcgtgaagaaaagagtcgaccactgccctattaagtccaggaaaggagacgtgcttcatatgcattatacaggaaaactcgaagatgggacagagttcgactctagcctgccccagaaccagcccttcgtgttttccctgggtacaggccaggttattaaaggatgggaccagggactgctggggatgtgcgaaggagaaaagcgctag

SEQ ID NO: 146556 - DNA, 429 bp, Artificial Sequence
  derived and/or modified sequence
atgagactctcatggtttcgggtgttgacagtcttaagcatctgtctcagtgcggttgcgacagcaacaggagccgagggaaagcgaaaattgcagataggagtaaagaaaagagtcgaccattgcccaattaaatcccgtaaaggagatgtgcttcatatgcactatacagggaagctggaggacggcacagaatttgactcctcactgcctcaaaaccagccctttgtatttagtctgggtactggccaagttatcaaaggatgggaccaaggcttgctgggcatgtgcgaaggtgaaaaacgcaagcttgtgataccaagcgagctggggtacggagaacgtggtgccccacctaaaatcccaggtggcgctaccctcgtctttgaggttgagctgctcaagatcgaacggagaacagagctctag

SEQ ID NO: 146557 - DNA, 429 bp, Artificial Sequence
  derived and/or modified sequence
atgagattgtcctggtttagagtgcttaccgtactctccatttgcctgagcgcagtagcaacagcgacaggtgctgagggaaaacggaagttacaaatcggtgtaaaaaagagggtcgatcactgcccaatcaagtctcggaaaggcgacgtgcttcacatgcactataccggaaaattggaagatggcacagagttcgactcctcactcccacaaaaccaaccttttgtgttcagtctgggaaccgggcaggtaattaagggctgggatcagggattgcttgggatgtgcgaaggagagaagaggaagctggtaatcccgagtgaactggggtacggcgaaaggggcgctccaccaaagatccccggaggcgctactctcgtctttgaagttgagctgttaaaaattgagcggagaactgagttatag

SEQ ID NO: 146558 - DNA, 429 bp, Artificial Sequence
  derived and/or modified sequence
atgaggcttagttggttcagggtgctgacagtgctgtctatttgtttatccgccgtggccacggcgacaggcgctgagggtaagcggaagctgcagatcggagtcaaaaagagagtggaccactgtcccatcaagtcgagaaagggagacgtgctccatatgcattacaccggcaagctggaggatggtaccgagttcgactcctccctaccacagaaccagcctttcgtcttctcactggggacagggcaggtgattaaaggctgggatcaggggttactggggatgtgtgaaggagaaaaacggaagctggttatcccttccgaactaggatatggagagcgcggagcccctcctaaaattcccggtggtgccaccctcgtatttgaggtggaactgttaaaaatcgagcgacgcaccgagctttag

SEQ ID NO: 146559 - DNA, 309 bp, Artificial Sequence
  derived and/or modified sequence
atgcgtctgtcttggttccgcgtgctcacggttctgagtatctgcctttccgccgtagcgacagctaccggggctgaaggaaaaaggaagttacagatcggtgtcaaaaagcgagtagaccattgtccaatcaaaagcaggaaaggcgacgtccttcacatgcattataccggaaaactcgaggatggtacagaattcgacagttccctgcctcagaatcaacctttcgtgttttctctcggcactggccaggtgatcaaaggatgggatcagggactcctggggatgtgcgagggcgaaaagcggtag

SEQ ID NO: 146560 - DNA, 429 bp, Artificial Sequence
  derived and/or modified sequence
atgagactgagctggttcagagtgctgaccgtgctgagcatctgcctgagcgccgtggccaccgccaccggcgccgagggcaagagaaagctgcagatcggcgtgaagaagagagtggaccactgccccatcaagagcagaaagggcgacgtgctgcacatgcactacaccggcaagctggaggacggcaccgagttcgacagcagcctgccccagaaccagcccttcgtgttcagcctgggcaccggccaggtgatcaagggctgggaccagggcctgctgggcatgtgcgagggcgagaagagaaagctggtgatccccagcgagctgggctacggcgagagaggcgccccccccaagatccccggcggcgccaccctggtgttcgaggtggagctgctgaagatcgagagaagaaccgagctgtag

SEQ ID NO: 146561 - DNA, 309 bp, Artificial Sequence
  derived and/or modified sequence
atgagactgagctggttcagagtgctgaccgtgctgagcatctgcctgagcgccgtggccaccgccaccggcgccgagggcaagagaaagctgcagatcggcgtgaagaagagagtggaccactgccccatcaagagcagaaagggcgacgtgctgcacatgcactacaccggcaagctggaggacggcaccgagttcgacagcagcctgccccagaaccagcccttcgtgttcagcctgggcaccggccaggtgatcaagggctgggaccagggcctgctgggcatgtgcgagggcgagaagagatag

SEQ ID NO: 146562 - protein, 459 aa, Artificial Sequence
  derived and/or modified sequence
MTLSTEMSDASGLAEETDIDVVGEGEDEEDEEEEDDDEGGGGGPRLAVPAQRRRRRRSYAGEDELEDLEEEEDDDDILLAPPAGGSPAPPGPAPAAGAGAGGGGGGGGAGGGGSAGSGAKNPLVKPPYSYIALITMAILQSPKKRLTLSEICEFISGRFPYYREKFPAWQNSIRHNLSLNDCFVKIPREPGNPGKGNYWTLDPESADMFDNGSFLRRRKRFKRQPLLPPNAAAAESLLLRGAGAAGGAGDPAAAAALFPPAPPPPPHAYGYGPYGCGYGLQLPPYAPPSALFAAAARRRRRRLPPALAPAAPATARRGRRAGPDRLRLPAAPARRRPTRPPAGLRGQGGRPGRLSAGALALLHREHHRGQLGPGRRCRRRRAGRRRRSGLALALAGGGAASSRIQRRRLRGAGGRGPGGRAHPIPRGRRGRRRLLSLLVRRLGDSAPRDCPVQCRELYC

SEQ ID NO: 146563 - DNA, 1380 bp, Artificial Sequence
  derived and/or modified sequence
atgaccctgagcaccgagatgagcgacgccagcggcctggccgaggagaccgacatcgacgtggtgggcgagggcgaggacgaggaggacgaggaggaggaggacgacgacgagggcggcggcggcggccccagactggccgtgcccgcccagagaagaagaagaagaagaagctacgccggcgaggacgagctggaggacctggaggaggaggaggacgacgacgacatcctgctggccccccccgccggcggcagccccgccccccccggccccgcccccgccgccggcgccggcgccggcggcggcggcggcggcggcggcgccggcggcggcggcagcgccggcagcggcgccaagaaccccctggtgaagcccccctacagctacatcgccctgatcaccatggccatcctgcagagccccaagaagagactgaccctgagcgagatctgcgagttcatcagcggcagattcccctactacagagagaagttccccgcctggcagaacagcatcagacacaacctgagcctgaacgactgcttcgtgaagatccccagagagcccggcaaccccggcaagggcaactactggaccctggaccccgagagcgccgacatgttcgacaacggcagcttcctgagaagaagaaagagattcaagagacagcccctgctgccccccaacgccgccgccgccgagagcctgctgctgagaggcgccggcgccgccggcggcgccggcgaccccgccgccgccgccgccctgttcccccccgccccccccccccccccccacgcctacggctacggcccctacggctgcggctacggcctgcagctgcccccctacgccccccccagcgccctgttcgccgccgccgccagaagaagaagaagaagactgccccccgccctggcccccgccgcccccgccaccgccagaagaggcagaagagccggccccgacagactgagactgcccgccgcccccgccagaagaagacccaccagaccccccgccggcctgagaggccagggcggcagacccggcagactgagcgccggcgccctggccctgctgcacagagagcaccacagaggccagctgggccccggcagaagatgcagaagaagaagagccggcagaagaagaagaagcggcctggccctggccctggccggcggcggcgccgccagcagcagaatccagagaagaagactgagaggcgccggcggcagaggccccggcggcagagcccaccccatccccagaggcagaagaggcagaagaagactgctgagcctgctggtgagaagactgggcgacagcgcccccagagactgccccgtgcagtgcagagagctgtactgctag

SEQ ID NO: 146564 - DNA, 1254 bp, Artificial Sequence
  derived and/or modified sequence
atggccttcgctgtcatcagagctcagtctagggtaggatccagaggcctctacaaacctcgcgcatggccgcctcgcggtcgcaggcgacagcaaaggaggcgggctccccgaagcgccgcagagcagcgcccgcccagcccagtcccccctgacgggagtgctcggcctcccgctttaccgaggagcgcaggtcccggaccaagaggaccaccaccgccccggtctagatttgggtcccctgctcgccgggccccagggtgttgtttacctggcgggcccggcgctgccgcagctctaggagaacccaggcggcctgccgctcggccacggcgccgccgccgtcggcacggccggcaggcacgtagagcggacggccatcttctacagctgcctgggggcgacgctgctctgagggttcccggacgaagggtcccggccgcgagagcagcacgacaagcggcacagggaccaggccccgcggcagccgcagcgcctgtgtcacttcaggatgcagcaggcgacctaaggagagacccaggagggggtggagggggcggtgtgcctcacggtggcggcgaggggcaggaggttgtgccagctgaaccgggcgtgcccgccccccagcatgcggagcccgtagccgctgcaggggctgcccaacagctccagactgaggagcagcccggactccagcggttgcggctggggcctgtccggggtgccgcaagggggggcgatgccagggtccgcggcccccgcggagacaggcgagtaaaccccgaatccgctagagccctgctgcctggtgatccgcagggccctggcacggcagcacccagagctctcggcctgccgcctcggtgtgagccggtgggcgctccactggcagccttagccctggctagggaaagaagggagcggggcaggtttccgaggccatgcaagtgcttgtttttcaactccagtcagtgcgagttgtgttgtgagtgtgtgcggggcggcgcccctgcgctgagcagacgcagggtggccaccccttgtccctgtcctatggtgtgcaactcagactttgcccatcggtcgaccgttcccccctccgcccaccctttcaccctcacccccacactttccttgaacacatttatcattgtgagaaggggacggtgggactttgggcggtcggctgcagccactgcgagcgggggcctgatctttatcttcgccctgcgctggctgaaggcctttatatag

SEQ ID NO: 146565 - DNA, 1380 bp, Artificial Sequence
  derived and/or modified sequence
atgaccctttccactgagatgagtgatgcgagcggtctggccgaagagacggacattgatgtagtaggcgaaggcgaagacgaagaagacgaggaggaagaggatgacgacgaagggggcggcggaggaccccggttggcggtaccagcacagcggagacgtcgacgccgatcttatgctggagaggatgaacttgaagatctcgaggaagaggaggatgatgacgatatactcctggctccaccggcaggcggcagcccggcacctccaggaccggccccagccgccggcgctggagcaggaggaggagggggggggggtggcgccggcggcggaggctctgccggcagcggtgccaagaaccccctggtgaaacccccttactcttacattgccctaatcacaatggctattcttcagtctcccaaaaaaagacttacgttgtccgagatctgtgagttcattagcggaagattcccttactaccgggaaaagtttcccgcatggcaaaacagcattaggcacaacctgtccctgaacgactgcttcgtgaaaatcccacgggagccaggcaaccccggaaaggggaactactggaccctggacccagaaagtgctgacatgttcgataacggttcctttttgaggcgccggaaacgcttcaagaggcagccactgttaccacctaatgctgccgccgccgagtccctgctgctgaggggggctggggctgcaggaggcgctggcgatccagccgccgctgcggcgttgttccctccagcgcccccccctccccctcacgcatacggttacggaccctatggctgtggatacggcctgcagctgcctccttatgcgcctccttccgccttattcgctgccgctgcacgccgaagacgacggcggctgccgccggccttggcacccgctgccccagccacagcaagaaggggtcgccgagcaggacctgaccgactgcggttaccggctgcacccgcccggcggcggccaacccgtcctcccgctggcctacgggggcagggcggccggcccggcaggctttcagctggggccctcgctcttctccaccgtgaacatcataggggccagctcggtcccggccgacggtgtaggcgccgacgggcagggcgaaggcggcgaagcggtctggccctcgccctggcaggcggtggggcagctagctcacgcatccagaggcgccggttaaggggcgccggcggcagaggtcccggcggccgcgcccacccaatacctcgcggtcggcggggtcgaagacggctacttagcctgctggtccggagactgggtgactctgccccaagagactgcccggtgcaatgtagagagctgtactgctag

SEQ ID NO: 146566 - DNA, 2270 bp, Artificial Sequence
  derived and/or modified sequence
cgccgccacccggcagccccggcgcagctccggcagccgcagtcgcagcgcccccagcgtggcgccccccggccgggcctgccgcccgggacccgggctggggcgcagagggagcccggagcccggcgcccccatgcgccgccccgccgccgccgcgccacagctatgaccctgagcactgagatgtccgatgcctctggcctcgccgaggaaacagacatcgacgtggtgggggagggcgaggacgaagaagacgaggaagaggaggacgacgacgagggcggcggtggcgggccccggctggctgtccccgcgcagcggcggcggcggcggcgctcgtacgccggggaggacgagctggaggatctggaggaggaggaggacgacgatgacatcctgctggccccgcctgctgggggctccccggcgcccccgggcccggccccggcggcgggggcaggagccggtgggggcggcggcggcggcggcgcgggcggcggcgggagcgcgggtagcggcgccaagaacccgctggtgaagccgccctactcgtatatcgcgctcatcactatggccatcctgcagagccccaagaagcggctgacgctgagcgagatctgtgagttcatcagcggccgcttcccctactaccgggagaagttccccgcctggcagaacagcatccgccacaacctctcgctcaacgactgcttcgtcaagatcccccgcgagcccggcaacccgggcaagggcaactactggacgctggacccggagtccgccgacatgttcgacaacggcagcttcctgcgccggaggaagcgcttcaagcggcagccgctgctcccacccaacgccgcggccgccgagtctctgctgctgcgcggcgcgggagccgcagggggcgcgggcgacccggcagccgccgccgcgctcttcccgcccgcgcccccgccgcccccgcatgcctacggctacggcccctacggctgcggctacggcctgcagctgccgccttacgcgccgccctcggccctcttcgccgccgcagcgcgccgccgccgccgccgccttccacccgcactcgcccccgccgcccccgccaccgcacggcgcggccgccgagctggcccggaccgccttcggctaccggccgcacccgctcggcgccgccctacccggccccctgccggcctccgcggccaaggcgggcggcccgggcgcctcagcgctggcgcgctcgcccttctccatcgagagcatcatcgggggcagcttgggcccggccgccgctgccgccgccgccgcgcaggccgccgccgccgctcaggcctcgccctcgccctcgccggtggcggcgccgccagctcccggatccagcggaggaggctgcgcggcgcaggcggccgtgggcccggcggccgcgctcacccgatccctcgtggccgccgcggccgccgccgcctcctcagtctcctcgtccgccgccttggggactctgcaccaagggactgccctgtccagtgtcgagaactttactgctaggatttccaattgttaataacgctatgttagcgcgctcgaggaagaaggtaggaatcccggctccttttctcgtcttggtggttcggtgttttgttcgctcctccaggcgcggcccctctcgacctcgcgcgcccattttcgccgctgcgaattctcggacaaaactgtcaacagcccgggcgcgccttttggctctgcgggtccctctatttatgcaaagccgacctatgctacagccccccaacccccgacctggggtagggaggaagagggtgccggggaagggagtccgccctgtccaggcactagaggctcccttgacgtttggcagatgaaaaacaactaagcctttttgaggtgtagagattctcaggtccaggcgttaaaaaataatggtcaaaagaataatacaaaaatagtaaaggtcttgaagaatgccagcgaagcaattcttttttatttgaggacacttgtctggtgtactttttcatgaaaaggaaaaatggttaacatgtttacacaagaaaaaaagtcaaaattatcatttatttcaacctgtgttttgtatcataacagacgtgtggatttttttgtacttactgcgtattctttacaaggagtattgtaaattttactggcaattattattgtactattctaaatgtaagatttttacactttttcagaaataaaaatgcttaattttcaaagaaaattcaccaaaa

SEQ ID NO: 146567 - DNA, 1380 bp, Artificial Sequence
  derived and/or modified sequence
atgaccctgagcacagagatgtctgatgccagcggcctggccgaggagacagacattgatgtggtgggggagggggaggatgaagaagatgaggaggaggaggatgatgatgaaggaggcggcggcggcccccggctggccgtgcctgcccagaggagaagaagaagaagaagctatgctggggaggatgagctggaggacctggaggaggaggaggatgatgatgacatcctgctggcccctcctgctgggggcagccctgcccctcctggccctgccccagctgctggggccggggccggcggcggcggcggcggcggcggggccggcggcggcggcagcgctggcagcggggccaagaaccccctggtgaagccaccctacagctacatcgccctgatcaccatggccatcctgcagagccccaagaagaggctgaccctgtctgagatctgtgagttcatcagcggccgcttcccctactaccgggagaagtttcctgcctggcagaacagcatccgccacaacctgagcctgaatgactgctttgtgaagatcccccgggagcccggcaaccctggaaaaggaaactactggaccctggaccctgagagcgctgacatgtttgacaatggcagcttcctgcggcggaggaagcgcttcaagaggcagcccctgctgcccccaaatgctgctgctgctgagagcctgctgctgcggggggccggggctgctggaggagctggggaccctgctgctgctgctgccctcttccccccagcccctcctcctcctcctcatgcctacggctacggcccctacggctgcggctacggcctgcagctgcccccctatgcccctccttctgccctgtttgctgctgctgccaggagaagaagaagaaggctgcccccagccctggccccagctgccccagccacagcccggcggggcagaagagctggccctgaccggctgcggctgcctgctgccccagccaggagaagacccacccggcccccagctggcctgcggggccagggcggccggcccggccgcctgtctgctggggccctggccctgctgcaccgggagcaccaccggggccagctgggccctggaagacgctgcagaagaagaagagctggaagaagaagaagaagtggcctggccctggccctggccggcggcggggccgccagcagccgcatccagaggcggcggctgcggggggccggcggccggggccctgggggccgggcccaccccatcccccggggccggcggggcagaagaaggctgctgagcctgctggtgcggcggctgggggacagcgccccccgggactgccctgtgcagtgccgggagctgtactgctag

SEQ ID NO: 146568 - DNA, 1380 bp, Artificial Sequence
  derived and/or modified sequence
atgaccctgagcaccgagatgagcgacgccagcggcctggccgaggaaacagacattgacgttgttggagaaggtgaagacgaggaggatgaggaggaggaggatgacgatgagggagggggggggggtccgcgactcgctgtccctgcccagcggcgcaggcgaaggagatcttatgctggcgaggatgagctagaagaccttgaagaggaagaagatgacgacgacattttgttagccccgcccgccgggggctcccccgcgccaccaggtccagccccagctgcaggcgccggtgctggcggtggcggtggcggcggtggcgctggtggagggggtagcgctgggtctggcgccaagaaccccctcgtgaaaccaccttactcttatatcgcactcatcacaatggcgattctacagtcaccaaaaaagcggctgacactgtcggaaatctgcgagttcatcagtggtcgctttccatattacagagagaaattccccgcctggcagaattctatacgacacaacctatcactaaacgactgcttcgtcaaaatcccaagagagcccggaaaccctggcaaagggaattattggactcttgacccggagtcagccgacatgttcgataacggttccttcttgaggcgccgaaagcgttttaaacgccagcccctgcttcctcccaatgccgctgctgcagagtctttgctgctacgaggagccggggctgctggtggcgccggggacccagcagcggccgccgcgctcttccctccagctcctccccccccccctcatgcctacgggtacgggccgtacgggtgcggctacggactgcagttaccgccttatgcccctcccagcgcactttttgctgccgctgcgagacgcagacggcggaggcttccgccagcattagctccagctgctccagcgacagccaggcggggacgccgcgccgggcctgacagactgcggctcccagctgcccctgctaggcgtcgaccgacccgtcccccagccgggttgcggggacaaggtggacgacccggacgactcagcgctggcgccctagctctacttcatagagagcatcacagaggacagctggggcctggcaggcgctgcagaagaaggagagctggccggagaagaagatcaggtctggctcttgctctcgctggtggcggggcagcctcatccagaatccagaggagaaggctccgcggtgcaggggggcgcggacccggcggcagggcacacccgattcccagaggtcgcagggggcggcgacgtctcctttctctgttggtgcgtcgcctgggcgatagcgcacctcgtgactgtcccgttcagtgccgtgaactgtattgctag

SEQ ID NO: 146569 - DNA, 1380 bp, Artificial Sequence
  derived and/or modified sequence
atgacactgagcaccgagatgtccgatgcgagcggtcttgcagaagagacggatattgacgtggtgggcgagggcgaggacgaagaagacgaggaggaggaggacgacgatgaagggggaggaggcggaccgaggctagcggtgccggcacagcgtaggcgccgaagacggtcctacgccggagaggatgaacttgaggacctcgaggaggaggaggacgacgacgatatcctgttggcccctcctgcgggaggaagccccgctcctcctggtcctgcgcctgcagctggcgcaggagcagggggtggcggtggcggtgggggagcaggagggggagggtcagcaggaagcggcgcaaaaaacccgctggtgaagcccccttatagttatatcgcactgatcaccatggcaatcctgcagagtccaaagaagcggctgacactgagtgaaatatgtgagttcatatctggtaggtttccatactatcgcgaaaaatttccagcctggcagaacagcattcgccacaacctatctctaaatgactgctttgtcaaaatccccagggagcctggcaaccccggaaaaggcaactactggaccctcgaccctgaaagcgcagatatgttcgataatggaagcttcctacggagaaggaagagattcaaaagacagccccttcttcctccaaatgccgctgccgctgagagcctgctcctacgaggggcaggtgccgctggcggagccggagacccagcagccgcagccgcactgtttccaccagctcccccacccccaccccacgcatatgggtacggcccttatggatgcggatacggactgcaacttccaccttacgccccaccctcagccttgtttgctgccgcagcgaggcgacgccgaaggcggttgccaccggctttggcacccgctgctccggctacagcccgaagagggaggcgggctgggcctgacagactgcgcctacctgcagctcctgcgcgtagacggcctacccgccctcccgctggattgcgaggacaggggggacgacccggacggttgagtgcaggggctcttgccctgttgcatcgcgaacatcaccgcggacagttgggtcccggtcggagatgtaggaggaggagagccggaagaaggaggcgtagcgggctcgccctggccctggccggaggcggagcggcatcctctaggattcagaggcgccgacttaggggcgctggcggacgaggcccagggggacgcgctcatcccataccacgcggacggagggggaggcgacgcctcctctctcttctagtgcggcgtctgggcgactcagcacctcgggactgtcccgtgcagtgcagagagctgtattgttag

SEQ ID NO: 146570 - protein, 373 aa, Artificial Sequence
  derived and/or modified sequence
MTAESGPPPPQPEVLATVKEERGETAAGAGVPGEATGRGAGGRRRKRPLQRGKPPYSYIALIAMAIAHAPERRLTLGGIYKFITERFPFYRDNPKKWQNSIRHNLTLNDCFLKIPREAGRPGKGNYWALDPNAEDMFESGSFLRRRKRFKRSDLSTYPAYMHDAAAAAAAAAAAAAAAAIFPGAVPAARPPYPGAVYAGYAPPSLAAPPPVYYPAASPGPCRVFGLVPERPLSPELGPAPSGPGGSCAFASAGAPATTTGYQPAGCTGARPANPSAYAAAYAGPDGAYPQGAGSAIFAAAGRLAGPASPPAGGSSGGVETTVDFYGRTSPGQFGALGACYNPGGQLGGASAGAYHARHAAAYPGGIDRFVSAM

SEQ ID NO: 146571 - DNA, 3575 bp, Artificial Sequence
  derived and/or modified sequence
gaattcctagactcccgagtcttggaatcttagaattacagggtcgcaggatcgcaggatcgcattctttagatttatggaatcacgttagccccgtcgtccagaatttaaaatctagatatctgaatctcagaatcttgaaagttactgagagccacgaaatcccgtattaaaaggtgcctataatataatccagttaaaaattttaaaatttgaagtttttcctcctttgtaaaaacgaaacagacgaaatctgggcgttttgcttctccattacttgggaagaaggaaaccaggagttttgtttagcgagtgtaaagcccctctcccttcgttcgaccaaccctctaccgcagaaggttgtcaagcaaagcctttgagcgtttccacacaccgggtcgacggagcaaggatctgggctttgctcgctcttccgaagcagctgccaacgcttggccgggcttagctgccctcagctcaccgccacgaagaacgcgactaaaaccctccaagcatgccacccgttaccggccagaacctctcgtcttgggatctcccacactcacctggcaccaccctcccgctctcacccacagccccgcccgcccccccccccccacaccggaaagctgcgtccgggctggagcactggaacccgcgcccaaggggggaatcctatgcgtcaggggcctcggagatcagcacacgcccaccagctatttaacagagtagaaccctgaggccctgcgaggggacaaggacaggccctggatctcccagtgaatggccagggaacgaacccggcgagaggggcgcgcgcaggatctcaggttaaggaccaagttccggctcagggacagcaggaaaggaactcagaaattggacaccatgaagcaaacgtgtgtcccgactgcccgccccttcccccggagacgcccacccggccaccgttctcttcccactcccccattacccacagccctcactcccctgcggaaggggtgcttggctgcctctgggggcttcagagctaccctggtcccgggggattggaggaggaggttacctctcctgcgtcgttctttcaatccgtgcaccactatccatcaaatagagacagatcctgggcctctcaaagacggatgattgggggtggtgattggcctatccctaaatatctaccacgcaaggactcttgagagatccagaccccggtacagtcgagggacctggggcccaaaaagsggaaagcggctacctcttaccacacagttgggaagcgcagtcctaaaggagacgcaggttggagactccgctaagcggagaagccgcagtggggccatggaaagtcaccttccctttcggttctaggaattactcattcgaaagatggggggactggagtgccgagtggctgtggcagccacgattggggtttggaaaccatcctgaaaggcccggggagccagtctcctggaacttctccctccctattcccacaaaaaccaagcgccctctcggccaattctcaccctctcaggacaaaaaagtgagatgagcccgtcctttcacctgcgatccaagcccttggcagaggcctgaaaagtccgaaaactccgagttcgggcggtgaggtctcccgagccggttcctgaactctccgggcctcagtcgatcggggtgggacccccccccccccgcccatctccaagcgccctccccaccctgacgttgtggggctcctaccgggcgccacagctgctcctacctggggaggtgcgccgggccccaggggggcggacaagtcggggggcgggcagggaaccggttccgccccacgcttcgtgtgcccctttaaggaggggaagccggccgagggaggagccggtccagtgtgtgcaggggagcgcctcgccagcggtccgcggggctggagaccacgccgtggagaggaccagcctcaggtcgccccgcctggggccgggtcccacctcactgccccgcctcgcctctctgcccgtggcgttaccgccaccttgcctcgggggcagggcatgggcggccccgccagatcgcccagcgccagtactaactgcctgctctgccttcgagccccgaagcctcttctgcgcgcgcacaacctaggcagtaatcctaaactagcgggcaccacagaccagctgcagccaccccaacccagggatcacttccggacccctcgaccgcccggcaccagcgcgcaagggacccttcagccggagaccagagtccagtccggtcgcgaggccaccgcgctgcccgcctcgagaagcacaacgcgggctgagccgtcggctagcgggtcactcccgagcctctgtctgcaccgcgccagccccagaccacggacgctgagcctccagcgcgcgccagcctgggccgctgggctctccgggacagcccgtgacgatcccctgagctctccgcagaagggccgagcgtccgttccggggacgccaggcccgcccccgccccccgacagcgtggggatccagagcccgggggtgtgggacgcccgcgccatgactgtcgagagggccgtcgtcgcgaagccggaggtgtggtaccgtgaaggaagagcgggcgcgccagcgccccctgcagcgcggaagccgccctacagctacattcggcgtcatgccatggccatcggcagcccgaggctcacgctgggcggcatctacaagttcatcaccgagggcttccccttctacccggacaaccccaaaaagtggcagaacagcatccgccacaacctcacaatcaacgactgcttcctcaagatcccgcgcgaggccggccgccgccgtaagggcaactactgggcgctcgaccccaacgcggaggacatgttcgagagcggcagcttcctgcgccgccgcaaggcttcaagcgtcggactctccacctacccggcttacatgcaggacgcggcggctgccgccgccgccgccgccgccgccgccatcttcccaggggcggtcccgccgcgcgccccccctaacagggctccgtctattcaggctaagcgcgccgccgtcgctggccgcccgcctcatctactacccgcggagtcgcccggccatttccgcgtcttcggcctggttcctgagcggccgctcaagcaagaattggggcccgcaccgtgggggcccggcggctctttcgccttttcctccgatggcgcccccgctaccaccaacggctaccaaccacgacaggcttcaccgggacccgtccggccaaccccctcctatgcggctgcctacgcgggccccgacggaagtacccccagggagaaggcagtgcgatactttgccgatgctgggcgggtcgggggcaccccttgcccccagcgggcggcagcagtggcgggtggagaccacggtggacttctacggcgcacgtcgcccggccagttcggagcgctggagcctgctacaactggcgggcagctcggagggccagtgcaggcgcctaccatgctcgccatgctgccgcttatcccggtgggatagatcggttcgagggaattc

SEQ ID NO: 146572 - DNA, 180 bp, Artificial Sequence
  derived and/or modified sequence
atgaccagcgtgagcacccagctgagcctggtgctgatgagcctgttattggtactgccagtggttgaggctgttgaagcaggagacgccattgccctcttactcggggtcgtgttgtccatcactggcatctgcgcatgcctgggcgtttacgcccggaaacgcaacgggcagatgtag

SEQ ID NO: 146573 - DNA, 3451 bp, Artificial Sequence
  derived and/or modified sequence
cctcgccagcggtccgcagggctggagacccacgccgtggagaggaccagcctcaggtcgccccgcctgggcccgcgccccgacctcgctgcccccgcctcgcctctctgcccgtggcgcttacggccaccttggcctcgggggcagggcatgggcggcccccgccagatcgcccagcgccagtactaactgccctcgctctggccttcgagcccgaagcctcttctgcgcgcacaacctaggcagtaatcctaaactagcgggcaccacagaccagctgcagccaccccaacccagggatcacttccggacccctcgaccgcccggcaccagcgcgcaagggacccttcagccggagaccagagtccagtcccggtcacgaggccaccgccgctgcccgcctcgagaagcaccacgcgggctgagccgtcggctagcgggtcactcccgagcctctgtctgcaccgcgccagccccagaccacggacgctgagcctccagcgcgtgccagcctgggccgctgggctctcggggccagcccgcgacgatcccctgagctctccgcagaagggccgagcgtccgttccggggacgccaggcccgcccccgccccccgacagccgcggggatccagagcccgggggtgcgggacgcccgcgccatgactgccgagagcgggccgccgccgccgcagccggaggtgctggctaccgtgaaggaagagcgcggcgagacggcagcaggggccggggtcccaggggaggccacgggccgcggggcgggcgggcggcgccgcaagcgccccctgcagcgcgggaagccgccctacagctacatcgcgctcatcgccatggccatcgcgcacgcgcccgagcgccgcctcacgctgggcggcatctacaagttcatcaccgagcgcttccccttctaccgcgacaaccccaaaaagtggcagaacagcatccgccacaacctcacactcaacgactgcttcctcaagatcccgcgcgaggccggccgcccgggtaagggcaactactgggcgcttgaccccaacgcggaggacatgttcgagagcggcagcttcctgcgccgccgcaagcgcttcaagcgctcggacctctccacctacccggcttacatgcacgacgcggcggctgccgcagccgccgccgccgccgccgccgccgccgccgccatcttcccaggcgcggtgcccgccgcgcgccccccctacccgggcgccgtctatgcaggctacgcgccgccgtcgctggccgcgccgcctccagtctactaccccgcggcgtcgcccggcccttgccgcgtcttcggcctggttcctgagcggccgctcagcccagagctggggcccgcaccgtcggggcccggcggctcttgcgcctttgcctccgccggcgcccccgctaccaccaccggctaccagcccgcaggctgcaccggggcccggccggccaacccctccgcctatgcggctgcctacgcgggccccgacggcgcgtacccgcagggcgccggcagtgcgatctttgccgctgctggccgcctggcgggacccgcttcgcccccagcgggcggcagcagtggcggcgtggagaccacggtggacttctacgggcgcacgtcgcccggccagttcggagcgctgggagcctgctacaaccctggcgggcagctcggaggggccagtgcaggcgcctaccatgctcgccatgctgccgcttatcccggtgggatagatcggttcgtgtccgccatgtgagccagcgtagggacgaaaactcatagacacatcggctgttcacacgttccccgcaatctgagaacgaacaggaatggagagaggactcaactgggacccacgtggaaaagaccgagcaggccacagaggctcggtctccccgcgcacagcgtaggcacccggtgtactctgtaaacgggaggaggtggggcgaggcagccagagcccttggactggcacagggaccctcgatggagcgaagccctcaaacgggatgctttctggtattctatcggggagggtccttggcggtaaccagagggcagcgtagtgtcaacaccagagaccaggatccaaattgtggggaatcagtttcagccttccatgtgctgccggaactcgggcctttttacgcggttcgtcctctagtgcctttaactgcgttactacaataaaaggctgcggcagcgcctttcttcttaaagtgaggaggacaaatttgcaaaagaaataggcttttcttcttttttaaattggagaaatctctgctctggttgacctgggctggttttccctgtctctgagaacttgagacctagctccgagttgaactgtgcgtcagcactccagtcccatcacctgaaccttcagtctcccccatctgttacactagagggctgcaggactctatccaccgcccccgggttatcattcagggccccatcatcttggatgctgccctgcgtatttggcagcaatggtgggccacccagggcctctgagtagccacccaaagcctagccgctgttctagggaacggaaaagagttcatggccaagcgtctaacctaaagtcccaggattggctccaggcagcaattatatcataacttattgaacttttgagcaggacgtgctggtaatttcatggctgttactgcccagtcataaatctgcttttccattataaggcagagagaagtacattcgttcatttgtccactgtttcttgtcatcacgcagccctggacccaaagggtgaactaaagtttaaggagatgagaggattcaaggagcccgttggtgacgcctttcagtagctggggagggctcttccatccccagcaccccctgctacacctcagcagcctcccccatgcaaaaaggaaagagaaaaattaagttagggcagtcagtaaagtgagctttagaaagaaactggaattttaacttcattttgtatcttgcttaagtagcaggctcactaaaattagagaaagtccaataactctccccctttcccttgagaaatctttaagtttcgattctggagcaaaaactttcagcattaaatatttcagaggctccattcacagctttcagataaactggagtgttcagatggactgttttaataaaaatctttgagcaagtgagttatggcaagagaaactcagcctctttctgtataaacttaacagggaagggctggggtgtgaaaaagaagattgtatgaaaaccattggtaatttttattttttatttttgggactgcactatcctgttcacgaagacatgtgaacttggttcagtccaaatggggatttgtataaaccagtgctctccattagaaatatggtgcaagccacatatgtaattttaaatattctagtagccacattaataaagt

SEQ ID NO: 146574 - DNA, 1122 bp, Artificial Sequence
  derived and/or modified sequence
atgactgcagagtccggcccaccaccaccacagcctgaggtgctggccacagtgaaagaggagagaggcgaaaccgcagcaggagccggggttccaggagaagctacgggcaggggagccggcggccgcagaagaaagaggccactgcaacggggaaaacctccttacagctatatcgctttaatcgcgatggcaatcgcacatgcaccagagcgcaggctgaccttgggagggatttacaaattcataactgagcgcttcccgttttatcgagataaccctaagaagtggcagaatagcattagacataaccttactctcaatgattgttttctgaaaattcctcgtgaggccgggcggcctggtaaaggcaactactgggcactcgacccaaacgccgaggacatgtttgaatccggcagtttccttaggcgcaggaaacggttcaaacgcagcgatttaagtacttacccagcttacatgcacgacgcagccgctgccgctgccgccgcggccgccgctgccgccgccgcggccattttccctggtgctgtaccagccgcacgacccccatacccaggggccgtttatgcaggctatgctcccccaagcctggctgcacccccccccgtttactatccagctgctagcccaggtccgtgccgggtgtttggcctagtgcctgagaggccattgagccctgaactggggcccgctccctccggcccaggtgggagttgtgcattcgcaagcgcaggcgctccagctacaacaactggctatcaaccagccggatgtacaggagcgcggcctgccaaccccagcgcctacgccgcagcatatgccgggccagacggggcttacccccagggcgcgggatcagcaatatttgctgctgcggggcggttggcaggtccagcatccccacctgcggggggaagctctggcggcgtggagaccacggttgatttctatggtcgtacatcccccggacagttcggggccctgggtgcatgttacaatcccgggggccagctcgggggggcgagtgccggcgcttaccatgctcggcatgcagccgcttatccgggaggaattgaccgctttgtgtctgctatgtag

SEQ ID NO: 146575 - DNA, 1122 bp, Artificial Sequence
  derived and/or modified sequence
atgacagctgagagcggccccccaccaccccagcctgaggtgctggccaccgtgaaggaggagcggggggagacagctgctggagctggggtgcctggagaggccaccggccgcggggccggcggcagaagaaggaagaggcccctgcagaggggcaagccaccctacagctacatcgccctgattgccatggccatcgcccacgcccctgagcggcggctgaccctgggcggcatctacaagttcatcacagagcgcttccccttctacagagacaaccccaagaagtggcagaacagcatccgccacaacctgaccctgaatgactgcttcctgaagatcccccgggaggccggccggcctggaaaaggaaactactgggccctggaccccaatgctgaggacatgtttgaaagtggcagcttcctgcggcggaggaagcgcttcaagagaagtgacctgagcacctacccagcctacatgcatgatgctgctgctgctgctgctgctgctgctgctgctgctgctgctgctgccatcttccctggagctgtgcctgctgcccggcccccctacccaggagctgtgtatgccggctacgccccacccagcctggccgcccctcctcctgtgtactacccagctgccagccctggcccctgccgggtgtttggcctggtgcctgagcggcccctgagccctgagctgggccctgcccccagcggccctgggggcagctgtgcctttgccagcgctggggccccagccaccaccaccggctaccagcctgctggctgcacaggagcccggcctgccaaccccagcgcctatgctgctgcctatgccggcccagatggagcctacccccagggcgccggcagcgccatctttgctgctgctggccgcctggccggccctgccagccccccagctgggggcagcagtggaggagtggagaccaccgtggacttctacggccgcaccagccctggccagtttggagccctgggcgcctgctacaaccctgggggccagctgggcggggccagcgctggggcctaccacgcccggcatgctgctgcctacccaggcggcatcgacagatttgtgtctgccatgtag

SEQ ID NO: 146576 - DNA, 1122 bp, Artificial Sequence
  derived and/or modified sequence
atgaccgccgagagcggccccccccccccccagcccgaggtgctggccacagtgaaagaggaacggggagagacagccgctggtgcaggcgtgcccggggaagctaccggcaggggcgccggtggtagaaggaggaagcgtcctctccagcgagggaagcccccgtattcttatattgctcttatagcaatggccatcgctcacgcccccgaacgaaggctcaccctggggggcatatacaaattcataactgagcgctttccattttaccgtgacaaccccaaaaaatggcagaacagtattcggcataatcttactctgaacgattgctttctgaaaatccctcgggaggccggaaggccgggtaaaggaaactactgggccctcgacccaaacgcagaggacatgtttgagagcgggagctttctgcgcaggcgcaaaagattcaaacgctccgacctaagcacttaccccgcatacatgcatgatgctgccgccgctgcagccgctgcggcagcggcagccgcagccgcagcaattttccctggcgcagttcccgctgctagacctccatatccaggcgcagtctacgcaggatatgctcccccttctctagccgctcccccccccgtttactaccctgctgcctctccaggtccttgcagagtgttcggcctggtacccgagcgacctctaagccccgaacttggtcctgctccatctggcccaggcgggtcctgtgctttcgcaagtgctggggcccccgctactactacggggtatcagccggctgggtgcacaggcgcgaggcccgccaacccctcggcctatgctgccgcatatgctggccccgatggagcatacccacagggtgctggttcggcaatttttgcagcggctggaagattggctggcccagcaagccccccagccggtggaagctcaggcggcgtagagacaacagttgacttctacgggcgcaccagtccagggcagttcggagctcttggcgcatgctataatcccggtggacaactgggaggggcatccgcaggtgcatatcatgctaggcacgccgccgcatatccgggcggaatcgatcggttcgtgagcgccatgtag

SEQ ID NO: 146577 - DNA, 1122 bp, Artificial Sequence
  derived and/or modified sequence
atgaccgcagaaagcggcccaccaccaccccaaccggaagttttggctaccgttaaggaggaacgcggagagactgcagccggagccggtgtcccgggtgaggctacaggaagaggcgcaggcggtagacggagaaagaggccgctccagcgcggaaagcccccttacagttacatcgcattgatagccatggcaattgcccacgccccagagcgtagattgaccctgggcggtatctacaaattcataacagagaggtttccattctatcgggacaacccgaaaaagtggcagaacagcataagacacaatttgaccctgaatgactgcttcttaaaaatcccaagagaagccggtaggcctggtaaggggaattattgggcattagatccgaacgctgaagatatgtttgagagtggcagctttctcaggcggaggaaaaggtttaagagatcagacttgagcacttatcctgcttacatgcacgacgccgcagccgctgctgccgctgccgcagccgctgctgccgctgctgcaatattccccggtgctgttcctgctgcgagacctccgtaccctggggcagtgtacgctgggtatgcccctcccagccttgctgcgcctccgccagtgtattacccagccgcttcacctgggccatgtcgcgtgttcggcctggtgcccgaaaggcccctgagcccagagcttggaccagccccatctgggcctgggggaagctgtgcatttgcgtccgcaggcgcaccagcaactacgaccggttatcaaccagccggatgtacgggtgcgcgacccgctaatccttctgcgtatgctgcagcttacgcgggtccggatggagcttacccccaaggggctggctcagccatttttgctgctgcaggcagattggcaggaccggcttcacctcctgccggtggctccagcggaggcgttgagaccacagtcgacttttacggacggaccagccccggtcagtttggagcccttggagcctgctacaaccccggaggccaactcgggggtgcatctgccggtgcgtatcacgctcggcacgcagcagcctatcccggtggcattgacagattcgttagcgccatgtag

SEQ ID NO: 146578 - DNA, 1122 bp, Artificial Sequence
  derived and/or modified sequence
atgaccgccgagagcggccccccccccccccagcccgaggtgctggccaccgtgaaggaggagagaggcgagaccgccgccggcgccggcgtgcccggcgaggccaccggcagaggcgccggcggcagaagaagaaagagacccctgcagagaggcaagcccccctacagctacatcgccctgatcgccatggccatcgcccacgcccccgagagaagactgaccctgggcggcatctacaagttcatcaccgagagattccccttctacagagacaaccccaagaagtggcagaacagcatcagacacaacctgaccctgaacgactgcttcctgaagatccccagagaggccggcagacccggcaagggcaactactgggccctggaccccaacgccgaggacatgttcgagagcggcagcttcctgagaagaagaaagagattcaagagaagcgacctgagcacctaccccgcctacatgcacgacgccgccgccgccgccgccgccgccgccgccgccgccgccgccgccgccatcttccccggcgccgtgcccgccgccagacccccctaccccggcgccgtgtacgccggctacgccccccccagcctggccgcccccccccccgtgtactaccccgccgccagccccggcccctgcagagtgttcggcctggtgcccgagagacccctgagccccgagctgggccccgcccccagcggccccggcggcagctgcgccttcgccagcgccggcgcccccgccaccaccaccggctaccagcccgccggctgcaccggcgccagacccgccaaccccagcgcctacgccgccgcctacgccggccccgacggcgcctacccccagggcgccggcagcgccatcttcgccgccgccggcagactggccggccccgccagcccccccgccggcggcagcagcggcggcgtggagaccaccgtggacttctacggcagaaccagccccggccagttcggcgccctgggcgcctgctacaaccccggcggccagctgggcggcgccagcgccggcgcctaccacgccagacacgccgccgcctaccccggcggcatcgacagattcgtgagcgccatgtag

SEQ ID NO: 146579 - protein, 483 aa, Artificial Sequence
  derived and/or modified sequence
MGNCHTVGPNEALVVSGGCCGSDYKQYVFGGWAWAWWCISDTQRLSLEVMTILCRCENIETSEGVPLFVTGVAQVPCPCLLDCKWGNSKGFWKLCQVCQISLEIMTLQPRCEDVETAEGVALTVTGVAQVKIMTEKELLAVACEQFLGKNVQDIKNVVLQTLEGHLRSILGTLTVEQIYQDRDQFAKLVREVAAPDVGRMGIEILSFTIKDVYDKVDYLSSLGKTQTAVVQRDADIGVAEAERDAGIREAECKKEMLDVKFMADTKIADSKRAFELQKSAFSEEVNIKTAEAQLAYELQGAREQQKIRQEEIEIEVVQRKKQIAVEAQEILRTDKELIATVRRPAEAEAHRIQQIAEGEKVKQVLLAQAEAEKIRKIGEAEAAVIEAMGKAEAERMKLKAEAYQKYGDAAKMALVLEALPQIAAKIAAPLTKVDEIVVLSGDNSKVTSEVNRLLAELPASVHALTGVDLSKIPLIKKATGVQV

SEQ ID NO: 146580 - protein, 428 aa, Artificial Sequence
  derived and/or modified sequence
MGNCHTVGPNEALVVSGGCCGSDYKQYVFGGWAWAWWCISDTQRISLEIMTLQPRCEDVETAEGVALTVTGVAQVKIMTEKELLAVACEQFLGKNVQDIKNVVLQTLEGHLRSILGTLTVEQIYQDRDQFAKLVREVAAPDVGRMGIEILSFTIKDVYDKVDYLSSLGKTQTAVVQRDADIGVAEAERDAGIREAECKKEMLDVKFMADTKIADSKRAFELQKSAFSEEVNIKTAEAQLAYELQGAREQQKIRQEEIEIEVVQRKKQIAVEAQEILRTDKELIATVRRPAEAEAHRIQQIAEGEKVKQVLLAQAEAEKIRKIGEAEAAVIEAMGKAEAERMKLKAEAYQKYGDAAKMALVLEALPQIAAKIAAPLTKVDEIVVLSGDNSKVTSEVNRLLAELPASVHALTGVDLSKIPLIKKATGVQV

SEQ ID NO: 146581 - DNA, 2713 bp, Artificial Sequence
  derived and/or modified sequence
gtgcggtcccgagggccctccgtgccgccggcgccatgggcaattgccacacggtggggcccaacgaggcgctggtggtttcagggggctgttgtggttccgactataaacagtacgtgtttggcggctgggcctgggcctggtggtgtatctccgacactcagagactgtctctggaggttatgaccatcctgtgtcgctgtgagaatattgagacgtcggagggggttccactattcgtaacaggggttgcacaggtcccttgcccttgcctattggactgcaagtggggaaacagcaagggattctggaagctctgccaagtctgccagatttccctagagattatgacgttgcagccccgctgcgaggacgtagagacggccgagggggtagctttaactgtgacgggtgtcgcccaggtgaagatcatgacggagaaggaactcctggccgtggcttgtgagcagtttctgggtaagaatgtgcaggacatcaaaaacgtcgtcctgcagaccctggagggacatctgcgctccatcctcgggaccctgacagtggagcagatttatcaggaccgggaccagtttgccaagctggtgcgggaggtggcagcccctgatgttggccgcatgggcattgagatcctcagcttcaccatcaaggacgtgtatgacaaagtggactatctgagctccctgggcaagacgcagactgccgtggtgcagagagatgctgacattggcgtggccgaggctgaacgggacgcaggcatccgggaagctgagtgcaagaaggagatgctggatgtgaagttcatggcagacaccaagattgctgactctaagcgagccttcgagctgcaaaagtcagccttcagtgaggaggttaacatcaagacagctgaggcccagttggcctatgagctgcagggggcccgtgaacagcagaagatccggcaggaagagattgagattgaggttgtgcagcgcaagaaacagattgccgtggaggcacaggagatcctgcgtacggacaaggagctcatcgctacagtgcgccggcctgccgaggccgaggcccaccgcatccagcagattgccgagggtgaaaaggtgaagcaggtcctcttggcacaggcagaggctgagaagatccgcaaaatcggggaggcggaagcggcagtcatcgaggcgatgggcaaggcagaggctgagcggatgaagctcaaggcagaagcctaccagaaatacggggatgcagccaagatggccttggtgctagaggccctgccccagattgctgccaaaatcgctgccccacttaccaaggtcgatgagattgtggtcctcagtggagacaacagtaaggtcacatcagaagtgaaccgactgctggccgagctgcctgcctctgtgcatgccctcacaggcgtggacctgtctaagatacccctgatcaagaaggccactggtgtgcaggtgtgaggctcctgcaggcccactctcttcagcagccacccggccctccctccagcacccgttttaatcccacagaacaacgggaacgttactgactctggtgccttatctcgaagggaccagaagtgctgcgtgttcaggccatctctggctgtcttcctgtctctcctgtctgtccacctcctcctcttcctctcctttaccccactttcactgccactttcatcaggtttgtgtctcatctccctgcgtgtcttttcctttgtctgtctttttctttcccccatgcacatcatgtagattaagctgaagatgtttattacaatcactctctgtggggggtggccctgctgctcctcagaatcctggtgccttgaagttctctgtgcatctgtccatcctccctatggccctggccagagctcagcatgggcaggggttctgggtaggacggtcactgtcctctctcctggactggtcttcccagccctaaaccctgccccaggaagcccacagcctcacctgctgctgcccctctaggtctgggcagccatgacctgcagggcccagagacactgtccttcccctcatccacccaaggccccagccagcgctcataccctgtcctttctccctgaccccaagggcacagaggcaaggcctcctgtctacagcagcttcctcagtttcctactgccttaggaggcccctgcttgtgctcagggaaggcctcttcatgggcatgttcctgctggggcggtgcggtttggtcccaactctgctaagttttctgagatgagggtctagccctgttggggacagaaaagtgtgtagaccttcttcctgctagggctgcactgtcctgggtgttgggcccttctggtggacaaggctgtgccaaccctgtacagaatcgagtgctgtagcctggccagaccccagagcccttgtgccatctttcttcctggccagagtgatggggttccagccatggggaagcaacccaatcctctgtctccttgctccaatggaggcagaagagcccaggacccaagcgtcttggcaggggtgctgtgaatgtccagtggtcccagctccccaccctggccctgccccagcctgtgtagctcttcctgcatgtggatgctgcatgtctggtctggggcttggatgttgcactgccccactgcctgtcccttctggtaaaataaagaactcttaatgcccacccc

SEQ ID NO: 146582 - DNA, 2548 bp, Artificial Sequence
  derived and/or modified sequence
gtgcggtcccgagggccctccgtgccgccggcgccatgggcaattgccacacggtggggcccaacgaggcgctggtggtttcagggggctgttgtggttccgactataaacagtacgtgtttggcggctgggcctgggcctggtggtgtatctccgacactcagaggatttccctagagattatgacgttgcagccccgctgcgaggacgtagagacggccgagggggtagctttaactgtgacgggtgtcgcccaggtgaagatcatgacggagaaggaactcctggccgtggcttgtgagcagtttctgggtaagaatgtgcaggacatcaaaaacgtcgtcctgcagaccctggagggacatctgcgctccatcctcgggaccctgacagtggagcagatttatcaggaccgggaccagtttgccaagctggtgcgggaggtggcagcccctgatgttggccgcatgggcattgagatcctcagcttcaccatcaaggacgtgtatgacaaagtggactatctgagctccctgggcaagacgcagactgccgtggtgcagagagatgctgacattggcgtggccgaggctgaacgggacgcaggcatccgggaagctgagtgcaagaaggagatgctggatgtgaagttcatggcagacaccaagattgctgactctaagcgagccttcgagctgcaaaagtcagccttcagtgaggaggttaacatcaagacagctgaggcccagttggcctatgagctgcagggggcccgtgaacagcagaagatccggcaggaagagattgagattgaggttgtgcagcgcaagaaacagattgccgtggaggcacaggagatcctgcgtacggacaaggagctcatcgctacagtgcgccggcctgccgaggccgaggcccaccgcatccagcagattgccgagggtgaaaaggtgaagcaggtcctcttggcacaggcagaggctgagaagatccgcaaaatcggggaggcggaagcggcagtcatcgaggcgatgggcaaggcagaggctgagcggatgaagctcaaggcagaagcctaccagaaatacggggatgcagccaagatggccttggtgctagaggccctgccccagattgctgccaaaatcgctgccccacttaccaaggtcgatgagattgtggtcctcagtggagacaacagtaaggtcacatcagaagtgaaccgactgctggccgagctgcctgcctctgtgcatgccctcacaggcgtggacctgtctaagatacccctgatcaagaaggccactggtgtgcaggtgtgaggctcctgcaggcccactctcttcagcagccacccggccctccctccagcacccgttttaatcccacagaacaacgggaacgttactgactctggtgccttatctcgaagggaccagaagtgctgcgtgttcaggccatctctggctgtcttcctgtctctcctgtctgtccacctcctcctcttcctctcctttaccccactttcactgccactttcatcaggtttgtgtctcatctccctgcgtgtcttttcctttgtctgtctttttctttcccccatgcacatcatgtagattaagctgaagatgtttattacaatcactctctgtggggggtggccctgctgctcctcagaatcctggtgccttgaagttctctgtgcatctgtccatcctccctatggccctggccagagctcagcatgggcaggggttctgggtaggacggtcactgtcctctctcctggactggtcttcccagccctaaaccctgccccaggaagcccacagcctcacctgctgctgcccctctaggtctgggcagccatgacctgcagggcccagagacactgtccttcccctcatccacccaaggccccagccagcgctcataccctgtcctttctccctgaccccaagggcacagaggcaaggcctcctgtctacagcagcttcctcagtttcctactgccttaggaggcccctgcttgtgctcagggaaggcctcttcatgggcatgttcctgctggggcggtgcggtttggtcccaactctgctaagttttctgagatgagggtctagccctgttggggacagaaaagtgtgtagaccttcttcctgctagggctgcactgtcctgggtgttgggcccttctggtggacaaggctgtgccaaccctgtacagaatcgagtgctgtagcctggccagaccccagagcccttgtgccatctttcttcctggccagagtgatggggttccagccatggggaagcaacccaatcctctgtctccttgctccaatggaggcagaagagcccaggacccaagcgtcttggcaggggtgctgtgaatgtccagtggtcccagctccccaccctggccctgccccagcctgtgtagctcttcctgcatgtggatgctgcatgtctggtctggggcttggatgttgcactgccccactgcctgtcccttctggtaaaataaagaactcttaatgcccacccc

SEQ ID NO: 146583 - DNA, 1452 bp, Artificial Sequence
  derived and/or modified sequence
atggggaattgtcacacagtggggcccaacgaagcgctggtggtcagcggcggttgctgtgggtcagactacaagcagtatgtgtttggggggtgggcctgggcctggtggtgtatttcagatacccagagattatcgctggaagtcatgaccatcttgtgcagatgcgaaaacatcgaaactagcgaaggcgtcccgctcttcgtcactggagtggctcaggtcccttgtccctgcctgctggactgcaagtggggtaactccaagggcttttggaaactttgccaagtgtgccaaattagcttggagattatgacactccagccccggtgtgaggacgtggaaaccgcagagggggtcgccctcaccgtcactggggtcgcacaggtgaaaatcatgaccgagaaggagctcctggccgtggcctgcgaacaattcttgggcaagaatgtccaggacatcaagaacgtggttttgcagacactggaaggccacctgcgcagtatacttggaaccttgaccgtcgaacagatctaccaggacagagatcagttcgccaaattagtgagagaggtggcagcgcccgacgtcgggagaatgggcatagagattctgtccttcaccatcaaggatgtgtacgataaggttgactatttatcttcattaggcaagacccaaactgctgtggtccagcgcgacgctgacattggcgttgccgaggccgagcgcgacgctggaatccgagaggccgagtgcaaaaaggagatgctggacgtcaaattcatggctgacacaaagattgctgactcaaagagggccttcgaattgcagaaatcagccttttcagaagaagtaaatattaagacggccgaagcgcagctagcttatgaactccagggcgcccgtgagcaacagaaaatcaggcaagaagagatagagatcgaagttgtgcagcgaaaaaaacagatcgccgtcgaagctcaggagatcctgcgaaccgacaaggagctgattgccaccgtgaggcggcctgccgaagctgaagcccacagaatccagcagattgccgaaggggagaaagtcaaacaagtgctgttggcccaagccgaggcggagaaaataaggaagataggagaggccgaagctgctgtgattgaggccatggggaaagccgaggccgagcgcatgaagctgaaggcggaagcataccagaaatatggagacgctgcaaaaatggccctggtactagaggcacttccgcaaatcgctgcgaagattgccgctcccctaaccaaggtggacgagatcgtggttctttctggcgacaactctaaggtcacttcagaggtcaaccgtctcctcgccgagctcccggcttcagtccacgccctgaccggggtagatctgagcaagatccctctgattaaaaaagccacaggggttcaggtttag

SEQ ID NO: 146584 - DNA, 1287 bp, Artificial Sequence
  derived and/or modified sequence
atgggtaattgccataccgtggggccgaacgaggccttggtagttagcgggggttgctgtggcagcgattacaaacaatacgtttttgggggatgggcatgggcttggtggtgtatatctgatacacagcggatcagcttagagataatgacgttacagcctcgttgtgaagatgtggagacggccgaaggcgtggccctaaccgtgaccggagtcgcccaagttaagataatgacggagaaagaactgcttgcggtggcttgcgagcaatttctcggaaaaaacgtgcaggatatcaagaacgtggtgctgcagacattggagggacaccttcgcagtatcctgggcaccctcaccgtggaacagatctaccaggaccgcgaccagtttgctaaactcgtccgagaagtggccgcacctgatgtgggaagaatgggcattgaaatcttatctttcacgatcaaggatgtttatgataaagtggattacctgtcttctctgggtaaaacacagaccgccgtggtgcagcgggacgcagatattggcgtggccgaagcggaacgtgacgcaggaatacgggaagccgagtgcaagaaagagatgctcgatgtcaaattcatggcagacactaagatagcggatagcaaacgggccttcgaactccagaaatccgcgttctctgaggaggtgaatataaagaccgccgaggcacaactagcgtacgagctacaaggtgcccgcgaacagcagaaaatacgacaagaggaaatagagatcgaggtcgtccagaggaagaaacagattgctgtggaggctcaggaaattctccgcaccgacaaggaattgattgctacggtccgaagacctgccgaggcagaggcccatcggatacagcagatagcagagggagagaaagtgaaacaggtgctcctggctcaggcagaggcagagaaaatacgtaagattggtgaggcagaggcagctgtaattgaagctatgggcaaagctgaagccgagcgtatgaaactcaaggctgaggcctatcagaaatacggcgatgccgcaaagatggctctggtattagaagcgctgccacagattgcagccaagatagcagccccattaaccaaagttgatgagatagtcgtattaagcggagacaacagtaaggtgacttctgaagttaatagactcctggccgagctcccggcctccgtgcacgctctgaccggggtggatctgagtaagattcccctcatcaaaaaggcgaccggggtgcaggtgtag

SEQ ID NO: 146585 - DNA, 1452 bp, Artificial Sequence
  derived and/or modified sequence
atgggcaactgccacacagtgggccccaatgaggccctggtggtgtctgggggctgctgcggcagtgactacaagcagtatgtgtttggaggctgggcctgggcctggtggtgcatcagtgacacccagaggctgagcctggaggtgatgaccatcctgtgccgctgtgaaaatattgagaccagcgagggcgtgcccctgtttgtgactggagtggcccaggtgccctgcccctgcctgctggactgcaagtggggcaacagcaagggcttctggaagctgtgccaggtgtgccagatcagcctggagatcatgaccctgcagccccgctgtgaagatgtggagacagctgagggcgtggccctgactgtgactggagtggcccaggtgaagatcatgacagagaaggagctgctggccgtggcctgtgagcagttcctgggcaagaatgtgcaggacatcaagaatgtggtgctgcagaccctggagggccacctgcggagcatcctgggcaccctgactgtggagcagatctaccaggaccgggaccagtttgccaagctggtgcgggaggtggccgccccagatgtgggccgcatgggcatcgagatcctgtccttcaccatcaaggatgtgtatgacaaggtggactacctgagcagcctgggcaagacccagacagctgtggtgcagagagatgctgacatcggcgtggccgaggccgagagagatgctggcatccgggaggccgagtgcaagaaggagatgctggatgtgaagttcatggctgacaccaagattgctgacagcaagagggcctttgagctgcagaagagcgccttcagcgaggaggtgaacatcaagacagctgaggcccagctggcctatgagctgcagggcgcccgggagcagcagaagatccggcaggaggagattgaaattgaggtggtgcagaggaagaagcagattgctgtggaggcccaggagatcctgaggacagacaaggagctgattgccaccgtgcggcggcctgctgaggccgaggcccaccgcatccagcagattgctgagggggagaaggtgaagcaggtgctgctggcccaggccgaggccgagaagatcaggaagattggagaggccgaggccgctgtgattgaggccatgggcaaggccgaggccgagaggatgaagctgaaggccgaggcctaccagaagtatggagatgctgccaagatggccctggtgctggaggccctgccccagattgctgccaagattgctgcccccctgaccaaggtggatgagatcgtggtgctgagcggggacaacagcaaggtgaccagcgaggtgaaccggctgctggccgagctgcctgcctctgtgcacgccctgactggagtggacctgagcaagatccccctcatcaagaaggccactggagtgcaggtgtag

SEQ ID NO: 146586 - DNA, 1287 bp, Artificial Sequence
  derived and/or modified sequence
atgggcaactgccacacagtgggccccaatgaggccctggtggtgtctgggggctgctgcggcagtgactacaagcagtatgtgtttggaggctgggcctgggcctggtggtgcatcagtgacacccagaggatcagcctggagatcatgaccctgcagccccgctgtgaagatgtggagacagctgagggcgtggccctgactgtgactggagtggcccaggtgaagatcatgacagagaaggagctgctggccgtggcctgtgagcagttcctgggcaagaatgtgcaggacatcaagaatgtggtgctgcagaccctggagggccacctgcggagcatcctgggcaccctgactgtggagcagatctaccaggaccgggaccagtttgccaagctggtgcgggaggtggccgccccagatgtgggccgcatgggcatcgagatcctgtccttcaccatcaaggatgtgtatgacaaggtggactacctgagcagcctgggcaagacccagacagctgtggtgcagagagatgctgacattggagtggccgaggccgagagagatgctggcatccgggaggccgagtgcaagaaggagatgctggatgtgaagttcatggctgacaccaagattgctgacagcaagagggcctttgagctgcagaagagcgccttcagcgaggaggtgaacatcaagacagctgaggcccagctggcctatgagctgcagggcgcccgggagcagcagaagatccggcaggaggagattgaaattgaggtggtgcagaggaagaagcagattgctgtggaggcccaggagatcctgaggacagacaaggagctgattgccaccgtgagaagacctgctgaggccgaggcccaccgcatccagcagattgctgagggggagaaggtgaagcaggtgctgctggcccaggccgaggccgagaagatcaggaagatcggggaggccgaggccgccgtcatcgaggccatgggcaaggccgaggccgagaggatgaagctgaaggccgaggcctaccagaagtatggagatgctgccaagatggccctggtgctggaggccctgccccagattgctgccaagattgctgcccccctgaccaaggtggatgaaattgtggtgctgagcggggacaacagcaaggtgaccagcgaggtgaaccggctgctggccgagctgcctgcctctgtgcacgccctgactggagtggacctgagcaagatccccctcatcaagaaggccaccggggtgcaggtgtag

SEQ ID NO: 146587 - DNA, 1452 bp, Artificial Sequence
  derived and/or modified sequence
atgggcaactgccacaccgtgggccccaacgaggccctggtggtgtctggaggttgttgtggaagcgactataagcagtatgtctttggaggctgggcctgggcttggtggtgcatctccgacacccagcggctgagcctggaggtcatgaccatcctgtgcagatgtgaaaatatcgagacctcggagggtgtccccttgtttgtgacaggtgtggcccaggttccctgtccttgtctgctagactgcaagtggggaaatagcaagggcttttggaagctctgccaagtctgtcagataagcctggagatcatgaccctacagccacgctgtgaggatgtggagactgccgaaggtgttgctctgaccgttactggggtggcacaggttaaaatcatgacagagaaagaactgctggcagtcgcatgtgaacagttcctggggaaaaacgttcaggatatcaagaacgtggtgcttcagaccctggaaggacatcttaggtccatactgggcaccctcacagtggagcagatatatcaggaccgcgatcagttcgctaaacttgttagggaagtggctgctccagatgttggcagaatgggcatcgaaatcctgagcttcaccattaaggacgtgtacgataaagtggactatctgtcgtcactgggaaaaacccagaccgctgtggtgcagcgggacgctgatattggtgttgctgaggcagagcgcgacgctggtattagggaagcggaatgcaaaaaagagatgctcgacgtgaagttcatggcagatactaaaatcgcggattccaaacgcgcatttgaactgcagaagtctgcctttagtgaggaagttaacatcaaaacagcagaagcccagctggcttacgaactccagggcgctagggagcagcagaagattagacaggaggagattgagattgaagttgtacagaggaagaagcagatcgccgtggaggcccaggagattcttcgcactgataaggaactgattgctaccgtccggcggcccgccgaggcagaggcccaccgcattcagcagattgcagagggtgaaaaggtcaagcaggtgctcttggcccaggccgaagccgaaaaaataaggaagatcggggaggcagaggcagccgtgatcgaggcaatgggcaaagcggaggcagagcggatgaagctgaaagcagaggcttaccagaagtacggcgatgcagctaagatggcgctcgtcctggaggctctcccacagatcgctgcaaagattgctgctccactcacaaaagtggacgagattgtggtgttgagcggagacaactcaaaggtgacaagcgaggtgaaccgcctgcttgcagaattgcccgcgtccgtgcacgccctcacaggcgtagatctttctaaaatcccacttattaagaaagcaaccggtgttcaagtgtag

SEQ ID NO: 146588 - DNA, 1287 bp, Artificial Sequence
  derived and/or modified sequence
atgggcaactgccacaccgtgggccccaacgaggccctggtggtgtcagggggatgctgtgggtctgattacaaacagtacgtttttggagggtgggcctgggcctggtggtgtatctccgatacccagaggatcagcctagagattatgacccttcagcctagatgcgaggatgttgaaaccgcggagggggttgcactcaccgttactggagtggctcaggttaaaataatgaccgagaaggaactgctggccgttgcctgcgagcagtttctcggtaaaaacgtgcaggacattaaaaacgtggtgttacagacattagaagggcatctaaggagtatacttgggacccttaccgtggagcagatttatcaggaccgcgaccagtttgccaaactcgtgcgagaagtggccgcgccagacgtcgggagaatgggtattgagattttgagcttcaccattaaagatgtctatgacaaggtcgactatctgtcctccttgggcaaaacccagacggcagtcgtgcagcgtgacgctgatattggagtggcggaagctgaaagggatgccggcattcgagaggccgagtgcaagaaggaaatgttagatgtgaagttcatggccgacacaaaaatcgccgattcaaagagagcattcgagttgcagaaatccgccttttccgaggaggtgaacatcaaaaccgccgaggctcagctggcatatgagctgcagggcgcaagggagcagcagaaaattcgccaggaggaaatagagattgaagtcgtacagagaaaaaaacagatagccgtagaggctcaggaaatcctccgcactgacaaagaactcatcgcaacagtcaggcgccccgcagaagccgaggcacacaggatccagcagatcgccgaaggagagaaagtcaagcaggtgctgctggctcaggctgaagctgagaaaattcggaaaatcggagaagcagaggccgcagtcatcgaggcaatgggaaaggctgaagcagaacgtatgaaactgaaagcagaggcctaccagaagtacggagatgcagctaaaatggcgctcgtgctggaggcattgccacaaattgctgctaagatcgcagcccccctcaccaaggtggatgagattgtagtgctttcaggtgacaactctaaggtgaccagtgaggtgaaccgactgctcgccgagcttccagcttccgttcatgccctgactggagtggacctgtcaaaaataccgctaattaagaaggcgactggggtacaagtctag

SEQ ID NO: 146589 - DNA, 1452 bp, Artificial Sequence
  derived and/or modified sequence
atgggcaactgtcatactgtgggtcctaatgaggccttggtggtctcaggcggatgttgcgggtccgactataagcagtacgtttttggcggatgggcttgggcatggtggtgcatatcagacacccaacgcttgagtctggaagtgatgaccatactgtgcagatgcgaaaatattgagacttcggaaggcgtgcctctatttgtcacaggcgtggctcaggtgccgtgtccctgtctgctcgattgtaagtgggggaactccaaaggtttctggaagctgtgccaggtgtgccaaatctcactggaaatcatgactcttcagcccaggtgcgaggatgtagaaacagctgaaggtgtggcacttactgtgaccggcgtagctcaggtcaagattatgactgagaaagagcttttggccgtggcatgtgaacagtttctgggcaaaaacgtgcaggacattaagaacgttgttcttcagacactggagggccatctgagaagcatcctgggcacgctgacggtcgagcagatatatcaggaccgggatcagtttgcaaaactggtgagggaagtggctgccccagacgtaggaaggatgggtatcgagatcctgagtttcactatcaaggacgtgtatgataaagtggactatctctcaagccttggcaagactcaaaccgctgtcgtacagagggatgccgatatcggagtggctgaagccgagagggatgccggtatccgcgaggcagaatgcaagaaagaaatgcttgacgttaaattcatggccgataccaaaattgctgactcaaagcgcgctttcgagttacagaagagtgcattcagtgaggaggtcaatattaaaaccgccgaagcacagttggcatacgaattgcaaggagcacgagaacaacaaaaaataagacaagaagagattgagatcgaagttgtgcagcgcaaaaagcagattgcagtcgaggcccaggaaattctgcggactgataaagaactgatagcgaccgtgaggcgtccagcagaggccgaagcgcatcggattcaacagattgctgagggagaaaaggttaagcaggtcttgctggcccaggcagaggccgagaagattagaaagattggggaggcagaggccgcagttatcgaggccatgggcaaagcagaggccgaacgcatgaagctgaaagcggaagcctaccagaaatacggggacgcagctaaaatggcccttgttttagaggcacttcctcagatcgcagcaaagatagccgcacccttgacaaaggtggatgaaattgtggtgctgtccggggataattctaaagtaacatctgaagtcaaccgacttctggccgagctccctgcctccgttcacgcactaacaggggttgacctgtcaaagatacccctaataaagaaagctacaggtgtacaggtttag

SEQ ID NO: 146590 - DNA, 1287 bp, Artificial Sequence
  derived and/or modified sequence
atgggcaactgccacacggtgggtcccaatgaggccctggttgtgtcagggggatgttgtggctcggactacaagcagtacgttttcggaggctgggcatgggcctggtggtgcatcagcgacacccaaagaatctccctagaaattatgacactacagcccaggtgcgaagatgtggagaccgctgagggcgtggcccttactgtgaccggtgtggctcaggtgaagattatgacagagaaagagctgctggctgtggcttgcgagcagtttctcgggaaaaacgtgcaggacatcaagaacgtcgtgctgcagacactggaaggacacttacggtccattttgggtaccctcactgtagaacagatctatcaggaccgggaccaatttgccaagctagttcgggaggtggctgcccctgacgttggtcgaatgggtatcgaaatcctgagcttcaccattaaagacgtgtacgataaagtcgattacttgagcagtttagggaaaactcagacagcggtggttcagcgggacgcggatattggtgtggctgaggccgagagggacgcgggaatcagagaggccgagtgtaaaaaggaaatgctcgacgttaaatttatggctgacaccaagattgccgactcaaaaagggctttcgaacttcagaagagtgccttcagcgaggaggtaaatattaaaacagctgaggcacagttggcctatgaactgcagggagctagagagcagcaaaagatccggcaggaggaaatcgagattgaggttgttcaacgtaagaaacagatcgccgtcgaagcacaggagattctccgcaccgacaaagagctgatcgccactgtccgccgtcccgcagaggctgaagcccacagaattcagcagatcgctgagggggagaaagtaaagcaggtgcttctggcacaagccgaggccgaaaagatccgcaaaattggggaagccgaagctgctgtgattgaggccatgggcaaggccgaggccgagcgcatgaagcttaaggctgaagcatatcagaagtatggcgacgctgccaaaatggccttagtactggaggccctgccccagatcgcagccaaaatcgctgctcccctgaccaaagtggatgagattgttgttctctctggcgacaatagcaaagtcacttccgaagtgaaccgcctcctggcggagctacctgcctcggtgcatgccctgaccggagtggatttgagtaagatcccactgataaagaaggccacaggtgttcaggtgtag

SEQ ID NO: 146591 - DNA, 1452 bp, Artificial Sequence
  derived and/or modified sequence
atgggcaactgccacaccgtgggccccaacgaggccctggtggtgagcggcggctgctgcggcagcgactacaagcagtacgtgttcggcggctgggcctgggcctggtggtgcatcagcgacacccagagactgagcctggaggtgatgaccatcctgtgcagatgcgagaacatcgagaccagcgagggcgtgcccctgttcgtgaccggcgtggcccaggtgccctgcccctgcctgctggactgcaagtggggcaacagcaagggcttctggaagctgtgccaggtgtgccagatcagcctggagatcatgaccctgcagcccagatgcgaggacgtggagaccgccgagggcgtggccctgaccgtgaccggcgtggcccaggtgaagatcatgaccgagaaggagctgctggccgtggcctgcgagcagttcctgggcaagaacgtgcaggacatcaagaacgtggtgctgcagaccctggagggccacctgagaagcatcctgggcaccctgaccgtggagcagatctaccaggacagagaccagttcgccaagctggtgagagaggtggccgcccccgacgtgggcagaatgggcatcgagatcctgagcttcaccatcaaggacgtgtacgacaaggtggactacctgagcagcctgggcaagacccagaccgccgtggtgcagagagacgccgacatcggcgtggccgaggccgagagagacgccggcatcagagaggccgagtgcaagaaggagatgctggacgtgaagttcatggccgacaccaagatcgccgacagcaagagagccttcgagctgcagaagagcgccttcagcgaggaggtgaacatcaagaccgccgaggcccagctggcctacgagctgcagggcgccagagagcagcagaagatcagacaggaggagatcgagatcgaggtggtgcagagaaagaagcagatcgccgtggaggcccaggagatcctgagaaccgacaaggagctgatcgccaccgtgagaagacccgccgaggccgaggcccacagaatccagcagatcgccgagggcgagaaggtgaagcaggtgctgctggcccaggccgaggccgagaagatcagaaagatcggcgaggccgaggccgccgtgatcgaggccatgggcaaggccgaggccgagagaatgaagctgaaggccgaggcctaccagaagtacggcgacgccgccaagatggccctggtgctggaggccctgccccagatcgccgccaagatcgccgcccccctgaccaaggtggacgagatcgtggtgctgagcggcgacaacagcaaggtgaccagcgaggtgaacagactgctggccgagctgcccgccagcgtgcacgccctgaccggcgtggacctgagcaagatccccctgatcaagaaggccaccggcgtgcaggtgtag

SEQ ID NO: 146592 - DNA, 1287 bp, Artificial Sequence
  derived and/or modified sequence
atgggcaactgccacaccgtgggccccaacgaggccctggtggtgagcggcggctgctgcggcagcgactacaagcagtacgtgttcggcggctgggcctgggcctggtggtgcatcagcgacacccagagaatcagcctggagatcatgaccctgcagcccagatgcgaggacgtggagaccgccgagggcgtggccctgaccgtgaccggcgtggcccaggtgaagatcatgaccgagaaggagctgctggccgtggcctgcgagcagttcctgggcaagaacgtgcaggacatcaagaacgtggtgctgcagaccctggagggccacctgagaagcatcctgggcaccctgaccgtggagcagatctaccaggacagagaccagttcgccaagctggtgagagaggtggccgcccccgacgtgggcagaatgggcatcgagatcctgagcttcaccatcaaggacgtgtacgacaaggtggactacctgagcagcctgggcaagacccagaccgccgtggtgcagagagacgccgacatcggcgtggccgaggccgagagagacgccggcatcagagaggccgagtgcaagaaggagatgctggacgtgaagttcatggccgacaccaagatcgccgacagcaagagagccttcgagctgcagaagagcgccttcagcgaggaggtgaacatcaagaccgccgaggcccagctggcctacgagctgcagggcgccagagagcagcagaagatcagacaggaggagatcgagatcgaggtggtgcagagaaagaagcagatcgccgtggaggcccaggagatcctgagaaccgacaaggagctgatcgccaccgtgagaagacccgccgaggccgaggcccacagaatccagcagatcgccgagggcgagaaggtgaagcaggtgctgctggcccaggccgaggccgagaagatcagaaagatcggcgaggccgaggccgccgtgatcgaggccatgggcaaggccgaggccgagagaatgaagctgaaggccgaggcctaccagaagtacggcgacgccgccaagatggccctggtgctggaggccctgccccagatcgccgccaagatcgccgcccccctgaccaaggtggacgagatcgtggtgctgagcggcgacaacagcaaggtgaccagcgaggtgaacagactgctggccgagctgcccgccagcgtgcacgccctgaccggcgtggacctgagcaagatccccctgatcaagaaggccaccggcgtgcaggtgtag

SEQ ID NO: 146593 - protein, 750 aa, Artificial Sequence
  derived and/or modified sequence
MWNLLHETDSAVATARRPRWLCAGALVLAGGFFLLGFLFGWFIKSSNEATNITPKHNMKAFLDELKAENIKKFLYNFTQIPHLAGTEQNFQLAKQIQSQWKEFGLDSVELAHYDVLLSYPNKTHPNYISIINEDGNEIFNTSLFEPPPPGYENVSDIVPPFSAFSPQGMPEGDLVYVNYARTEDFFKLERDMKINCSGKIVIARYGKVFRGNKVKNAQLAGAKGVILYSDPADYFAPGVKSYPDGWNLPGGGVQRGNILNLNGAGDPLTPGYPANEYAYRRGIAEAVGLPSIPVHPIGYYDAQKLLEKMGGSAPPDSSWRGSLKVPYNVGPGFTGNFSTQKVKMHIHSTNEVTRIYNVIGTLRGAVEPDRYVILGGHRDSWVFGGIDPQSGAAVVHEIVRSFGTLKKEGWRPRRTILFASWDAEEFGLLGSTEWAEENSRLLQERGVAYINADSSIEGNYTLRVDCTPLMYSLVHNLTKELKSPDEGFEGKSLYESWTKKSPSPEFSGMPRISKLGSGNDFEVFFQRLGIASGRARYTKNWETNKFSGYPLYHSVYETYELVEKFYDPMFKYHLTVAQVRGGMVFELANSIVLPFDCRDYAVVLRKYADKIYSISMKHPQEMKTYSVSFDSLFSAVKNFTEIASKFSERLQDFDKSNPIVLRMMNDQLMFLERAFIDPLGLPDRPFYRHVIYAPSSHNKYAGESFPGIYDALFDIESKVDPSKAWGEVKRQIYVAAFTVQAAAETLSEVA

SEQ ID NO: 146594 - DNA, 2635 bp, Artificial Sequence
  derived and/or modified sequence
ctcaaaaggggccggatttccttctcctggaggcagatgttgcctctctctctcgctcggattggttcagtgcactctagaaacactgctgtggtggagaaactggaccccaggtctggagcgaattccagcctgcagggctgataagcgaggcattagtgagattgagagagactttaccccgccgtggtggttggagggcgcgcagtagagcagcagcacaggcgcgggtcccgggaggccggctctgctcgcgccgagatgtggaatctccttcacgaaaccgactcggctgtggccaccgcgcgccgcccgcgctggctgtgcgctggggcgctggtgctggcgggtggcttctttctcctcggcttcctcttcgggtggtttataaaatcctccaatgaagctactaacattactccaaagcataatatgaaagcatttttggatgaattgaaagctgagaacatcaagaagttcttatataattttacacagataccacatttagcaggaacagaacaaaactttcagcttgcaaagcaaattcaatcccagtggaaagaatttggcctggattctgttgagctagcacattatgatgtcctgttgtcctacccaaataagactcatcccaactacatctcaataattaatgaagatggaaatgagattttcaacacatcattatttgaaccacctcctccaggatatgaaaatgtttcggatattgtaccacctttcagtgctttctctcctcaaggaatgccagagggcgatctagtgtatgttaactatgcacgaactgaagacttctttaaattggaacgggacatgaaaatcaattgctctgggaaaattgtaattgccagatatgggaaagttttcagaggaaataaggttaaaaatgcccagctggcaggggccaaaggagtcattctctactccgaccctgctgactactttgctcctggggtgaagtcctatccagatggttggaatcttcctggaggtggtgtccagcgtggaaatatcctaaatctgaatggtgcaggagaccctctcacaccaggttacccagcaaatgaatatgcttataggcgtggaattgcagaggctgttggtcttccaagtattcctgttcatccaattggatactatgatgcacagaagctcctagaaaaaatgggtggctcagcaccaccagatagcagctggagaggaagtctcaaagtgccctacaatgttggacctggctttactggaaacttttctacacaaaaagtcaagatgcacatccactctaccaatgaagtgacaagaatttacaatgtgataggtactctcagaggagcagtggaaccagacagatatgtcattctgggaggtcaccgggactcatgggtgtttggtggtattgaccctcagagtggagcagctgttgttcatgaaattgtgaggagctttggaacactgaaaaaggaagggtggagacctagaagaacaattttgtttgcaagctgggatgcagaagaatttggtcttcttggttctactgagtgggcagaggagaattcaagactccttcaagagcgtggcgtggcttatattaatgctgactcatctatagaaggaaactacactctgagagttgattgtacaccgctgatgtacagcttggtacacaacctaacaaaagagctgaaaagccctgatgaaggctttgaaggcaaatctctttatgaaagttggactaaaaaaagtccttccccagagttcagtggcatgcccaggataagcaaattgggatctggaaatgattttgaggtgttcttccaacgacttggaattgcttcaggcagagcacggtatactaaaaattgggaaacaaacaaattcagcggctatccactgtatcacagtgtctatgaaacatatgagttggtggaaaagttttatgatccaatgtttaaatatcacctcactgtggcccaggttcgaggagggatggtgtttgagctagccaattccatagtgctcccttttgattgtcgagattatgctgtagttttaagaaagtatgctgacaaaatctacagtatttctatgaaacatccacaggaaatgaagacatacagtgtatcatttgattcacttttttctgcagtaaagaattttacagaaattgcttccaagttcagtgagagactccaggactttgacaaaagcaacccaatagtattaagaatgatgaatgatcaactcatgtttctggaaagagcatttattgatccattagggttaccagacaggcctttttataggcatgtcatctatgctccaagcagccacaacaagtatgcaggggagtcattcccaggaatttatgatgctctgtttgatattgaaagcaaagtggacccttccaaggcctggggagaagtgaagagacagatttatgttgcagccttcacagtgcaggcagctgcagagactttgagtgaagtagcctaagaggattctttagagaatccgtattgaatttgtgtggtatgtcactcagaaagaatcgtaatgggtatattgataaattttaaaattggtatatttgaaataaagttgaatattatatata

SEQ ID NO: 146595 - DNA, 2192 bp, Artificial Sequence
  derived and/or modified sequence
agtgcactctagaaacactgctgtggtggagaaactggaccccaggtctggagcgaattccagcctgcagggctgataagcgaggcattagtgagattgagagagactttaccccgccgtggtggttggagggcgcgcagtagagcagcagcacaggcgcgggtcccgggaggccggctctgctcgcgccgagatgtggaatctccttcacgaaaccgactcggctgtggccaccgcgcgccgcccgcgctggctgtgcgctggggcgctggtgctggcgggtggcttctttctcctcggcttcctcttcgggtggtttataaaatcctccaatgaagctactaacattactccaaagcataatatgaaagcatttttggatgaattgaaagctgagaacatcaagaagttcttataattttcaacacatcattatttgaaccacctcctccaggatatgaaaatgtttcggatattgtaccacctttcagtgctttctctcctcaaggaatgccagagggcgatctagtgtatgttaactatgcacgaactgaagacttctttaaattggaacgggacatgaaaatcaattgctctgggaaaattgtaattgccagatatgggaaagttttcagaggaaataagaatatgcttataggcgtggaattgcagaggctgttggtcttccaagtattcctgttcatccaattggatactatgatgcacagaagctcctagaaaaaatgggtggctcagcaccaccagatagcagctggagaggaagtctcaaagtgccctacaatgttggacctggctttactggaaacttttctacacaaaaagtcaagatgcacatccactctaccaatgaagtgacaagaatttacaatgtgataggtactctcagaggagcagtggaaccagacagatatgtcattctgggaggtcaccgggactcatgggtgtttggtggtattgaccctcagagtggagcagctgttgttcatgaaattgtgaggagctttggaacactgaaaaaggaagggtggagacctagaagaacaattttgtttgcaagctgggatgcagaagaatttggtcttcttggttctactgagtgggcagaggagaattcaagactccttcaagagcgtggcgtggcttatattaatgctgactcatctatagaaggaaactacactctgagagttgattgtacaccgctgatgtacagcttggtacacaacctaacaaaagagctgaaaagccctgatgaaggctttgaaggcaaatctctttatgaaagttggactaaaaaaagtccttccccagagttcagtggcatgcccaggataagcaaattgggatctggaaatgattttgaggtgttcttccaacgacttggaattgcttcaggcagagcacggtatactaaaaattgggaaacaaacaaattcagcggctatccactgtatcacagtgtctatgaaacatatgagttggtggaaaagttttatgatccaatgtttaaatatcacctcactgtggcccaggttcgaggagggatggtgtttgagctagccaattccatagtgctcccttttgattgtcgagattatgctgtagttttaagaaagtatgctgacaaaatctacagtatttctatgaaacatccacaggaaatgaagacatacagtgtatcatttgattcacttttttctgcagtaaagaattttacagaaattgcttccaagttcagtgagagactccaggactttgacaaaagcaacccaatagtattaagaatgatgaatgatcaactcatgtttctggaaagagcatttattgatccattagggttaccagacaggcctttttataggcatgtcatctatgctccaagcagccacaacaagtatgcaggggagtcattcccaggaatttatgatgctctgtttgatattgaaagcaaagtggacccttccaaggcctggggagaagtgaagagacagatttatgttgcagccttcacagtgcaggcagctgcagagactttgagtgaagtagcctaagaggattctttagagaatccgtattgaatttgtgtggtatgtcactcagaaagaatcgtaatgggtatattgataaattttaaaattggtatatttgaaataaagttgaatattatatat

SEQ ID NO: 146596 - DNA, 1896 bp, Artificial Sequence
  derived and/or modified sequence
ctcaaaaggggccggatttccttctcctggaggcagatgttgcctctctctctcgctcggattggttcagtgcactctagaaacactgctgtggtggagaaactggaccccaggtctggagcgaattccagcctgcagggctgataagcgaggcattagtgagattgagagagactttaccccgccgtggtggttggagggcgcgcagtagagcagcagcacaggcgcgggtcccgggaggccggctctgctcgcgccgagatgtggaatctccttcacgaaaccgactcggctgtggccaccgcgcgccgcccgcgctggctgtgcgctggggcgctggtgctggcgggtggcttctttctcctcggcttcctcttcgggtggtttataaaatcctccaatgaagctactaacattactccaaagcataatatgaaagcatttttggatgaattgaaagctgagaacatcaagaagttcttatataattttacacagataccacatttagcaggaacagaacaaaactttcagcttgcaaagcaaattcaatcccagtggaaagaatttggcctggattctgttgagctagcacattatgatgtcctgttgtcctacccaaataagactcatcccaactacatctcaataattaatgaagatggaaatgagattttcaacacatcattatttgaaccacctcctccaggatatgaaaatgtttcggatattgtaccacctttcagtgctttctctcctcaaggaatgccagagggcgatctagtgtatgttaactatgcacgaactgaagacttctttaaattggaacgggacatgaaaatcaattgctctgggaaaattgtaattgccagatatgggaaagttttcagaggaaataaggttaaaaatgcccagctggcaggggccaaaggagtcattctctactccgaccctgctgactactttgctcctggggtgaagtcctatccagatggttggaatcttcctggaggtggtgtccagcgtggaaatatcctaaatctgaatggtgcaggagaccctctcacaccaggttacccagcaaatgaatatgcttataggcgtggaattgcagaggctgttggtcttccaagtattcctgttcatccaattggatactatgatgcacagaagctcctagaaaaaatgggtggctcagcaccaccagatagcagctggagaggaagtctcaaagtgccctacaatgttggacctggctttactggaaacttttctacacagaaagtcaagatgcacatccactctaccaatgaagtgacaagaatttacaatgtgataggtactctcagaggagcagtggaaccagacagatatgtcattctgggaggtcaccgggactcatgggtgtttggtggtattgaccctcagagtggagcagctgttgttcatgaaattgtgaggagctttggaacactgaaaaaggaagacattttagggtggagacctagaagaacaattttgtttgcaagctgggatgcagaagaatttggtcttcttggttctactgagtgggcagaggagaattcaagactccttcaagagcgtggcgtggcttatattaatgctgactcatctatagaaggaaactacactctgagagttgattgtacaccgctgatgtacagcttggtacacaacctaacaaaagagctgaaaagccctgatgaaggctttgaaggcaaatctctttatgaaagttggactaaaaaaagtccttccccagagttcagtggcatgcccaggataagcaaattgggatctggaaatgattttgaggtgttcttccaacgacttggaattgcttcaggcagagcacggtatactaaaaaaaagaaa

SEQ ID NO: 146597 - DNA, 2253 bp, Artificial Sequence
  derived and/or modified sequence
atgtggaatctgctgcatgaaactgatagtgccgttgcgacagccaggagacctcgctggctgtgcgcaggggcactggtgctggccggcgggttttttctgctggggtttctttttggctggtttataaagagttccaacgaagccacaaatattactcctaaacataacatgaaagcctttttagacgaattgaaggccgagaacattaagaaatttctctacaatttcacacagataccccatctagctggaaccgagcagaacttccaattggcaaagcagattcagtcccagtggaaagagtttggactcgactccgtggagctcgctcactacgacgtgcttctgtcctaccctaataagacccatcccaactatatttctatcatcaatgaggacggcaacgaaatctttaacaccagcctgttcgagcctccaccacctggatatgagaacgtatcggacattgtgccaccattctctgcatttagcccacagggaatgcccgagggagaccttgtatatgtcaactatgctcggactgaggacttcttcaaattggagagggacatgaagattaattgctcagggaagatcgtgattgccaggtatggaaaagtttttaggggcaacaaagtcaaaaacgctcaactggctggagccaaaggggtaattctctacagtgacccagccgactatttcgcccccggggtgaaatcttaccccgacgggtggaacctcccagggggcggtgttcagcggggaaatatcctgaacctcaatggcgccggggaccctttaacacccggatatccagcaaatgaatatgcttatcgcaggggaattgccgaggcagttgggctaccttcaatcccagtgcacccaattggttactatgacgctcagaaactccttgagaagatgggggggagcgccccaccggactcatcttggaggggatccttgaaggttccctacaacgttgggccagggtttacaggcaatttttcgactcagaaggtcaaaatgcatatccattcaacgaacgaagtgacccggatttataacgtgatagggacactgcgcggtgcagttgagcccgatagatatgtcatactgggtggccatagagatagttgggtgttcggaggcatcgatccacagtccggtgcggccgtggtccacgaaatagtccgaagtttcggcaccttaaagaaggagggttggaggcctagaagaaccattctgttcgcctcctgggatgccgaggagttcggcctcctcggttccaccgagtgggccgaggaaaattccaggttgctccaggaacgaggagtcgcatatatcaatgcggattcttctatagaaggtaattacactctaagggtggactgtacccccctgatgtactccctggtgcataaccttacgaaggaattgaaaagtcccgatgaaggttttgaaggaaagtccttgtatgaaagttggaccaagaagtccccatcgccagaattttctggaatgcccagaatctccaagctcgggagcggcaatgatttcgaagtgtttttccagcgactgggaatagccagtggacgcgctaggtacaccaaaaattgggagaccaacaaattctccgggtacccgctgtaccactccgtgtacgagacctacgagctggtggagaagttctatgaccccatgtttaagtatcaccttaccgtggcacaggtgcgtggggggatggttttcgagcttgcaaatagcatcgtactgcccttcgactgcagagactatgctgtggtcttgcgcaaatacgccgacaaaatctattctatttccatgaagcatccacaagaaatgaaaacttacagtgtctcttttgactcactgttttcagcagtgaagaattttaccgagatcgcaagtaaatttagcgagagactgcaggacttcgataagtccaaccccatcgttctcagaatgatgaacgaccagcttatgtttttagaacgagcttttatcgatcccctagggctgccagaccgacctttttaccgtcacgtgatatacgccccaagctctcacaataagtatgccggcgaatccttcccaggcatttatgacgctctgttcgatatagaatctaaagtggacccttctaaagcctggggtgaggtaaagagacaaatctacgtcgctgcctttacggtgcaggccgcagcggaaacactgtccgaggtagcatag

SEQ ID NO: 146598 - DNA, 1329 bp, Artificial Sequence
  derived and/or modified sequence
atggggggctcggcccccccagattcaagctggaggggatctctgaaagtgccttacaacgtgggtcctgggttcaccggtaatttttctactcagaaagtcaagatgcatatccatagtaccaacgaagtaacaaggatctataacgtcattgggactttgcgcggagcagtcgagcctgaccgctatgtgattctgggcggccaccgcgactcatgggtcttcggagggatcgacccacagtcaggggccgccgtcgtacatgaaatcgtaagaagtttcggcactctcaagaaggaaggctggagaccccggcggactatcctttttgcttcctgggatgctgaggagtttgggttactggggtctacggagtgggccgaggaaaactcccggctgctgcaagaacgcggggtcgcctacattaatgccgacagcagcattgaaggcaattatacattgcgtgtagattgcaccccactgatgtatagcctggtacataacctaactaaggagctcaagtctccagatgagggcttcgaagggaaatccctatacgaaagctggacgaagaaatccccctccccagagttctctggcatgccacgcatcagcaagctcggatccgggaatgatttcgaggtattctttcagcgcctgggcatcgcttcgggcagggccagatataccaaaaactgggagaccaataaatttagcggctacccactctatcattccgtgtatgagacatatgagctcgtggagaaattttacgatcctatgttcaagtaccacctgacggtagcacaagttcgcggtgggatggtgttcgagctggcgaattctattgtgctgcctttcgactgcagggattacgcagtggttctgcggaagtacgcagacaagatctactctatcagcatgaaacacccacaagagatgaagacttactctgtgtcatttgactctctgttctccgctgtgaaaaactttaccgagatcgcgtccaagttctccgagaggctgcaggattttgataaatctaatcctattgtgttaagaatgatgaatgaccagctaatgttccttgaacgcgcattcattgatccccttggcctacctgatagacctttctaccggcacgtgatttacgcaccatcttcacacaataagtatgccggagaatcatttcccgggatctatgacgcgctgttcgacattgagagcaaggtcgatcctagcaaggcctggggagaggtcaaacgccaaatctatgtggctgcctttaccgtccaagctgctgcggagaccctcagcgaggtggcctag

SEQ ID NO: 146599 - DNA, 1638 bp, Artificial Sequence
  derived and/or modified sequence
atgtggaacctgctccacgaaacagatagtgcggtggccacagcgcgtagaccccgttggctctgtgctggcgctctggtcctcgcagggggcttcttcctcctagggtttcttttcggctggttcatcaaaagctcaaatgaggccactaacatcacaccgaagcacaacatgaaagccttcttggatgaacttaaggctgaaaatataaaaaagttcctgtacaactttacccagatcccccatttagccggtaccgagcagaactttcagctagcaaagcagatccagtcccagtggaaagaatttggtctcgactcagtggagctggctcattacgatgtgctgctaagctatcccaataagactcaccctaactatatatcaatcattaacgaggacggcaacgagatctttaatacgagtcttttcgagccccccccacccggatacgaaaatgtgagtgacatcgttccacctttttcagctttttctcctcagggaatgccggagggcgacctcgtttacgtcaactatgcccggacagaggacttttttaagctggagcgggacatgaaaatcaactgttcaggcaaaattgtcatcgcacgctatggcaaggtgtttaggggaaataaggtgaagaacgctcagctggccggcgctaagggggtgattttgtatagtgatccggccgactacttcgctccgggagtgaaatcgtaccctgatggatggaatctacctgggggaggcgttcagcgtggaaatatattgaatttgaacggggctggggaccctttgactccaggctatcccgctaacgaatacgcttatcgccgagggattgccgaggctgtgggactgccaagtattcctgttcaccctattgggtattacgacgcccagaaactacttgaaaaaatgggagggtctgctcccccagacagcagttggagagggtccctcaaggtcccttataatgtgggcccaggcttcacagggaacttctcaactcagaaagtcaaaatgcacatccacagcaccaatgaagtgacccgcatatacaacgtcatcggcaccctgcgtggagctgtggagcccgacagatacgtgattctgggcggacatagggactcatgggtgttcggggggattgacccccagtccggcgcagccgtcgtccacgaaatcgtccgctcattcggaactctgaagaaagaagatatattagggtggagaccccgccgtactattctgttcgcttcgtgggatgcggaggaatttgggttactgggatcaacggaatgggcagaggagaatagtagactgcttcaagagcgcggcgtggcttacatcaatgcagactctagtattgaaggtaactatacacttcgtgtggactgcacgcctctcatgtactctctggtacacaacctcacaaaggagctgaaaagcccggatgagggttttgaggggaagagtctctacgagtcttggactaagaagtccccctcacccgagttctccggaatgccccgaatcagtaagttaggctccgggaatgatttcgaagttttcttccagcggctgggtattgcgtccggacgggcccgttatacaaaaaagaaaaagtag

SEQ ID NO: 146600 - DNA, 2253 bp, Artificial Sequence
  derived and/or modified sequence
atgtggaacctgctgcacgagacagacagcgctgtggccacagcccggcggccccgctggctgtgtgccggggccctggtgctggccggcggcttcttcctgctgggcttcctgtttggctggttcatcaagagcagcaatgaggccaccaacatcacccccaagcacaacatgaaggccttcctggatgagctgaaggccgagaacatcaagaagttcctgtacaacttcacccagatcccccacctggccggcacagagcagaacttccagctggccaagcagatccagagccagtggaaggagtttggcctggacagcgtggagctggcccactatgatgtgctgctgagctaccccaacaagacccaccccaactacatcagcatcatcaatgaagatggaaatgagatcttcaacaccagcctgtttgagcccccacctcctggctatgaaaatgtgtctgacatcgtgccccccttcagcgccttcagcccccagggcatgcctgagggggacctggtgtatgtgaactatgccaggacagaggacttcttcaagctggagcgggacatgaagatcaactgcagcggcaagatcgtcatcgcccgctatggcaaggtgttccggggcaacaaggtgaagaatgcccagctggccggggccaagggcgtcatcctgtacagcgaccctgctgactactttgcccctggggtgaagagctacccagatggctggaacctgcccggcggcggcgtgcagaggggcaacatcctgaacctgaatggagctggggaccccctgaccccaggctacccagccaatgaatatgcctaccgccggggcattgctgaggccgtgggcctgcccagcatccctgtgcaccccatcggctactatgatgcccagaagctgctggagaagatgggcggcagcgcccccccagacagctcctggaggggcagcctgaaggtgccctacaacgtgggccctggcttcaccggcaacttcagcacccagaaggtgaagatgcacatccacagcaccaatgaggtgacccgcatctacaacgtgattggcaccctgcggggagctgtggagccagacagatatgtgatcctgggcggccaccgggacagctgggtgtttggaggcatcgacccccagagcggggctgctgtggtgcatgagatcgtgcgcagctttggcaccctgaagaaggagggctggaggcccaggaggaccatcctgtttgcctcctgggatgctgaggagtttggcctgctgggcagcacagagtgggccgaggagaacagccggctgctgcaggagcggggcgtggcctacatcaatgctgacagcagcattgagggcaactacaccctgcgggtggactgcacccccctgatgtacagcctggtgcacaacctgaccaaggagctgaagagcccagatgagggctttgagggcaagagcctgtatgagagctggaccaagaagagccccagccctgagttcagcggcatgccccgcatcagcaagctgggcagcggaaatgactttgaggtgttcttccagaggctgggcatcgccagcggccgggcccgctacaccaagaactgggagaccaacaagttcagcggctaccccctgtaccacagcgtgtatgagacctatgagctggtggagaagttctatgaccccatgttcaagtaccacctgactgtggcccaggtgcggggcggcatggtgtttgagctggccaacagcatcgtgctgccctttgactgccgggactatgctgtggtgctgaggaaatatgctgacaagatctacagcatctccatgaagcacccccaggagatgaagacctacagcgtgtcctttgacagcctcttctctgctgtgaagaacttcacagagatcgccagcaagttcagcgagcggctgcaggactttgacaagagcaaccccatcgtgctgaggatgatgaatgaccagctgatgttcctggagcgggccttcatcgaccccctgggcctgcctgaccggcccttctacagacatgtgatctatgcccccagcagccacaacaagtatgctggggagagcttccctggcatctatgatgccctgtttgatattgagagcaaggtggaccccagcaaggcctggggcgaggtgaagaggcagatctacgtggccgccttcaccgtgcaggccgctgctgagaccctgtctgaggtggcctag

SEQ ID NO: 146601 - DNA, 1329 bp, Artificial Sequence
  derived and/or modified sequence
atgggcggcagcgcccccccagacagctcctggaggggcagcctgaaggtgccctacaacgtgggccctggcttcaccggcaacttcagcacccagaaggtgaagatgcacatccacagcaccaatgaggtgacccgcatctacaacgtgattggcaccctgcggggagctgtggagccagacagatatgtgatcctgggcggccaccgggacagctgggtgtttggaggcatcgacccccagagcggggctgctgtggtgcatgagatcgtgcgcagctttggcaccctgaagaaggagggctggaggcccaggaggaccatcctgtttgcctcctgggatgctgaggagtttggcctgctgggcagcacagagtgggccgaggagaacagccggctgctgcaggagcggggcgtggcctacatcaatgctgacagcagcattgagggcaactacaccctgcgggtggactgcacccccctgatgtacagcctggtgcacaacctgaccaaggagctgaagagcccagatgagggctttgagggcaagagcctgtatgagagctggaccaagaagagccccagccctgagttcagcggcatgccccgcatcagcaagctgggcagcggaaatgactttgaggtgttcttccagaggctgggcatcgccagcggccgggcccgctacaccaagaactgggagaccaacaagttcagcggctaccccctgtaccacagcgtgtatgagacctatgagctggtggagaagttctatgaccccatgttcaagtaccacctgactgtggcccaggtgcggggcggcatggtgtttgagctggccaacagcatcgtgctgccctttgactgccgggactatgctgtggtgctgaggaaatatgctgacaagatctacagcatctccatgaagcacccccaggagatgaagacctacagcgtgtcctttgacagcctcttctctgctgtgaagaacttcacagagatcgccagcaagttcagcgagcggctgcaggactttgacaagagcaaccccatcgtgctgaggatgatgaatgaccagctgatgttcctggagcgggccttcatcgaccccctgggcctgcctgaccggcccttctacagacatgtgatctatgcccccagcagccacaacaagtatgctggggagagcttccctggcatctatgatgccctgtttgatattgagagcaaggtggaccccagcaaggcctggggcgaggtgaagaggcagatctacgtggccgccttcaccgtgcaggccgctgctgagaccctgtctgaggtggcctag

SEQ ID NO: 146602 - DNA, 1638 bp, Artificial Sequence
  derived and/or modified sequence
atgtggaacctgctgcacgagacagacagcgctgtggccacagcccggcggccccgctggctgtgtgccggggccctggtgctggccggcggcttcttcctgctgggcttcctgtttggctggttcatcaagagcagcaatgaggccaccaacatcacccccaagcacaacatgaaggccttcctggatgagctgaaggccgagaacatcaagaagttcctgtacaacttcacccagatcccccacctggccggcacagagcagaacttccagctggccaagcagatccagagccagtggaaggagtttggcctggacagcgtggagctggcccactatgatgtgctgctgagctaccccaacaagacccaccccaactacatcagcatcatcaatgaagatggaaatgagatcttcaacaccagcctgtttgagcccccacctcctggctatgaaaatgtgtctgacatcgtgccccccttcagcgccttcagcccccagggcatgcctgagggggacctggtgtatgtgaactatgccaggacagaggacttcttcaagctggagcgggacatgaagatcaactgcagcggcaagatcgtcatcgcccgctatggcaaggtgttccggggcaacaaggtgaagaatgcccagctggccggggccaagggcgtcatcctgtacagcgaccctgctgactactttgcccctggggtgaagagctacccagatggctggaacctgcccggcggcggcgtgcagaggggcaacatcctgaacctgaatggagctggggaccccctgaccccaggctacccagccaatgaatatgcctaccgccggggcattgctgaggccgtgggcctgcccagcatccctgtgcaccccatcggctactatgatgcccagaagctgctggagaagatgggcggcagcgcccccccagacagctcctggaggggcagcctgaaggtgccctacaacgtgggccctggcttcaccggcaacttcagcacccagaaggtgaagatgcacatccacagcaccaatgaggtgacccgcatctacaacgtgattggcaccctgcggggagctgtggagccagacagatatgtgatcctgggcggccaccgggacagctgggtgtttggaggcatcgacccccagagcggggctgctgtggtgcatgagatcgtgcgcagctttggcaccctgaagaaggaggacatcctgggctggaggcccaggaggaccatcctgtttgcctcctgggatgctgaggagtttggcctgctgggcagcacagagtgggccgaggagaacagccggctgctgcaggagcggggcgtggcctacatcaatgctgacagcagcattgagggcaactacaccctgcgggtggactgcacccccctgatgtacagcctggtgcacaacctgaccaaggagctgaagagcccagatgagggctttgagggcaagagcctgtatgaatcctggaccaagaagagccccagccctgagttcagcggcatgccccgcatcagcaagctgggcagcggaaatgactttgaggtgttcttccagaggctgggcatcgccagcggccgggcccgctacaccaagaagaagaagtag

SEQ ID NO: 146603 - DNA, 2253 bp, Artificial Sequence
  derived and/or modified sequence
atgtggaacctgctgcacgagaccgacagcgccgtggccaccgccaggcgtccgcgctggctctgcgccggggcactggtactggccggcggatttttcttgctagggttcttgttcgggtggtttatcaaaagctcgaacgaagccacaaacataaccccgaagcacaacatgaaggccttcctggacgagctaaaagccgagaatataaagaagtttctctataacttcacacaaattccacacctggctggcactgaacagaacttccagctggcgaagcagattcagagccagtggaaggaatttggactcgactccgtggagcttgctcattacgatgtactgctcagttaccccaataagacacaccctaattatatatccattatcaacgaggacggcaacgagatctttaatacatccctttttgagcctcctccacccggttacgagaacgtgtctgatatcgtccctcccttcagtgcattcagtccccagggcatgccagaaggtgacctggtgtatgtgaattacgcacgaaccgaggactttttcaaattagagagagacatgaagatcaactgtagtggcaaaatcgtcatcgcccgctacgggaaagtattccgtgggaacaaagtaaagaacgcacagctggccggcgccaagggggtaattctttattctgatccggcagactattttgcccctggagttaagagctatccagacggatggaatttaccaggtggcggggtgcagcgaggcaacattttaaatttgaatggcgccggtgaccctttgacaccgggctatcctgccaacgaatacgcttaccggagaggaatcgctgaagccgtaggcttgccaagcatacctgtgcaccccattggctactatgacgcccagaagctcctcgaaaagatgggcgggagtgcaccccccgattcaagctggcggggttcgctgaaggtgccttacaacgtgggtccaggatttacagggaacttttcaacacagaaagtgaagatgcacatccacagcactaacgaggtgacccgaatatacaatgtgattggaactttgcgaggcgccgttgagccggatagatacgtgattctgggtggacatcgggattcctgggtgtttgggggcatcgacccccaaagcggagccgccgtcgtgcatgagattgttcgttcttttgggactctgaagaaggaagggtggcgcccccggcgcactatccttttcgcgtcctgggacgctgaagaatttgggctgctcgggagtacagagtgggcggaggagaactctagactgctccaggagcggggggtggcctatattaatgctgacagttccattgagggaaactacactctgcgggtggattgtacgccacttatgtatagccttgtgcacaatcttactaaggaactgaaatcgcccgatgaggggttcgaaggaaagtccctttatgaatcctggactaagaaatcgcccagcccggagttctcagggatgccgcgaataagtaagctcggatctgggaatgattttgaagttttctttcagcgtctcggcatcgcaagtggccgagcacgctatactaagaattgggaaactaacaagttctccggatacccgttataccactcagtctatgagacatacgaattggtggagaagttctatgacccaatgttcaaataccatctgaccgtcgctcaggtgagaggcggaatggtgtttgagcttgccaactctatcgtcctccctttcgactgcagagattatgctgtggtgcttcgaaagtatgccgataaaatttacagcatttctatgaagcacccccaggagatgaagacgtacagcgtcagtttcgattccctgttttccgccgtaaagaactttaccgaaatcgcctcaaagtttagtgagcgcttgcaggactttgataagagtaaccctatcgtgctcagaatgatgaacgaccagctgatgttccttgagagggcctttatagacccactcggactcccagatagaccattctacaggcatgtgatctacgcaccaagctcgcataacaagtatgctggcgagagtttccccggcatctacgatgctctcttcgatattgagtctaaagtcgacccaagtaaagcctggggagaagtgaagcgccaaatctacgtagccgcctttactgttcaagccgccgcagaaacattgtcagaagtagcctag

SEQ ID NO: 146604 - DNA, 1329 bp, Artificial Sequence
  derived and/or modified sequence
atgggcggcagcgccccccccgacagcagctggcggggcagcctgaaggtgccttacaacgtggggccaggctttacaggaaatttcagtacacagaaagtaaagatgcatattcattctacgaatgaggtgacaagaatttacaacgttatcggcacacttcgcggtgcagtcgagcccgatcgttacgtcatcctgggcggacaccgcgatagttgggtgttcggtggcattgatcctcaaagcggggccgctgtggtgcacgaaattgtgcgaagcttcggcactctcaaaaaggagggatggcgcccccgaagaacgatcctgttcgccagctgggacgcggaggagttcggactgctgggatctaccgagtgggcagaagagaattcccgcttattacaagagcgaggggtggcctatatcaacgcagatagcagcatagaaggcaactacacactgcgtgtggattgtacccctctgatgtacagccttgtccacaatcttaccaaggagctgaaaagtccagatgaaggctttgaagggaagagcctttatgagtcttggacgaaaaagtcccccagcccagaattctcgggtatgcctcgcattagcaaactggggagtggcaatgactttgaggtgttcttccagcggctgggcatcgccagcggcagagctcggtatacaaaaaactgggagactaacaaatttagcggatatcccctgtatcactccgtctacgaaacctacgaactcgttgagaagttttacgatcccatgtttaagtatcatctgaccgtggcccaagtgaggggagggatggtcttcgagttagcaaacagcatcgtgctgccattcgattgtcgggactatgcagttgtgctgcgtaaatacgctgacaaaatttatagtatcagtatgaagcacccccaggagatgaaaacctatagtgtctcctttgattccctgttctcagctgtaaagaacttcacagaaatcgcctccaaatttagtgaacgtctccaggatttcgataaatctaatcccattgtgctacggatgatgaatgaccagctgatgtttctcgagcgggccttcatcgatccactcggcttgccagataggcccttctatcggcacgtgatctatgcaccctcttctcacaacaagtatgcaggggagtcttttcccgggatttacgacgccctttttgacattgagtctaaggtggatccatccaaggcatggggggaggtgaaacggcagatttatgtggcggcttttaccgttcaggcggccgctgaaacgctgtctgaagtagcatag

SEQ ID NO: 146605 - DNA, 1638 bp, Artificial Sequence
  derived and/or modified sequence
atgtggaacctgctgcacgagaccgacagcgccgtggccaccgcccgccgccctcgctggctgtgcgctggcgccctggttctggcaggcggcttttttctgttaggattcctcttcggatggtttattaaaagcagcaatgaggctactaacatcactcccaagcataatatgaaggctttccttgacgagctaaaagccgagaacatcaagaaatttctgtataactttactcaaatacctcatttggcaggaactgagcagaatttccaattggccaaacagatccaatcccaatggaaggaattcggcctggactctgtagaacttgcccactacgatgtgctcctgagctatcctaacaagactcacccaaactacatatccattatcaacgaggatggaaacgaaattttcaatacttcactctttgaacccccgccaccaggttatgagaacgtatccgacattgtacctccatttagcgccttctcgccccagggaatgcctgagggagatctggtatatgtgaactatgcccgcactgaagacttctttaagcttgaacgggatatgaaaatcaattgcagcggaaaaatagtcatcgcccgctacggcaaggttttccgtggtaacaaggtcaaaaacgcccagcttgctggggctaagggcgtcattctctacagtgaccctgctgattatttcgctcccggggtcaagagctatccagacggctggaatctcccggggggtggagtgcagagaggcaacatcctcaatctgaacggcgcaggagatccgcttactccgggctatcctgctaacgagtacgcctataggcgggggattgccgaggccgtaggcttaccaagtatacccgtgcatccaataggctactacgatgcacaaaaactgctggagaaaatgggtggctctgccccacctgactcatcttggagaggtagccttaaggttccttataacgtgggaccaggttttactggcaatttttccacccaaaaggtgaaaatgcatatccattccaccaatgaagtgacgagaatttacaacgtcataggtaccctaaggggcgctgttgagcccgatcggtacgtgatcctggggggccaccgcgattcttgggtgttcggtggtatcgatcctcagagcggggccgccgtagttcatgagatcgtgagatcattcgggaccttaaagaaagaggatattctcgggtggaggccgcggcgcacaattctgttcgcttcctgggatgctgaggagttcggcctccttgggtctacggagtgggctgaagaaaactctagactcctacaggaaagaggggtggcgtacataaacgcggatagtagtatcgagggtaattatacattgcgagtcgattgtacacctctgatgtactcattggtccataacttgaccaaggaactgaagtcaccagatgaggggttcgagggcaagtccctctatgagagctggaccaagaaatcaccaagccctgagttttcaggaatgccccgaatctccaaactgggctccggtaacgacttcgaggtcttttttcagcgtctgggtattgcatccggccgcgccaggtatacaaagaagaaaaaatag

SEQ ID NO: 146606 - DNA, 2253 bp, Artificial Sequence
  derived and/or modified sequence
atgtggaacctcctacacgaaacagattctgcggtcgctaccgccagacggccaaggtggttgtgcgcaggcgcactggtgctagctggcggtttctttctgttagggttcctctttggatggtttattaaaagctccaacgaggccacaaacatcaccccaaagcacaatatgaaagccttcctggatgaacttaaagccgaaaacattaagaaattcttgtacaattttacacagatccctcaccttgcagggactgagcagaactttcaactcgctaagcagatccagagtcaatggaaagaatttggcctggactccgttgaattagcacactacgatgtcctgctcagctatccgaacaaaactcatcccaactacatctcaattataaatgaggatggaaacgaaatatttaacactagcctttttgagccaccaccccctgggtatgagaatgtttcagacattgtcccacctttctctgcattctcaccacagggaatgcccgagggggacctcgtatacgtcaactatgctagaacggaagacttctttaagttggagagggacatgaaaataaactgtagcgggaaaattgtgatcgcacgctacggtaaggtgtttcgcggaaacaaggtgaagaacgctcagctggctggagctaagggtgtcatactttattcagacccagcagactactttgcaccaggagtcaaatcttatcccgatggctggaacttgccaggcggaggcgtccagcggggaaatatactaaacctcaatggtgcaggtgacccactgacccccggataccctgctaacgaatatgcttacaggcggggaatcgcggaggcagtcggtctgccatccatacctgtccatccgatcggttactacgatgcccagaaactgctagaaaaaatgggaggaagcgctcccccagactctagctggagagggtcactcaaggtgccttacaacgttggccctgggttcacagggaatttttccactcaaaaggtaaagatgcatatccatagcaccaatgaagtcacgcggatttataacgtgatcggaaccctgagaggcgctgtcgaaccagatcgttatgtcattttgggcggacaccgtgactcctgggtttttggtggcatagatccccagtctggagccgctgtcgtacatgaaatcgtcagatcttttggcacacttaagaaagaggggtggcgtcccagacgcaccatactttttgccagttgggatgctgaggaatttggcctcttgggcagtactgagtgggcagaggagaatagccggttactacaggagagaggagttgcctatatcaatgcagacagctcaattgagggaaattacaccctgagggtggattgcacacccctgatgtactcacttgtgcataacttgacaaaagaacttaagtcccctgatgagggatttgagggaaagtccctgtacgaaagttggactaagaagtctccgagtccggagtttagtggaatgcccaggatctctaagctgggatctggcaacgatttcgaagttttttttcagagacttggcatagcttctgggcgtgctcgctatacaaagaactgggagaccaacaagttttccggctacccactttaccacagcgtctacgagacatatgagctcgtcgagaaattttacgatcccatgttcaaataccatttaacggttgcacaagttagagggggtatggtgttcgagctcgcgaatagtattgtgctaccctttgattgtagagactacgctgttgtgctgcgtaaatacgccgataagatctactcaatttccatgaagcacccccaggaaatgaagacgtattccgtcagctttgattctctgttctcagctgtcaagaattttaccgaaatcgcatctaagtttagtgaacggctccaagattttgacaagtctaatcctattgtgttgcggatgatgaatgaccagctcatgttcttggaaagggcctttatcgatcctttaggccttccggaccgaccattctaccgacacgttatatacgcgccatcaagtcacaataagtacgccggagagtcattccccggaatttacgacgctttgtttgacatagagagcaaagtggatccgagtaaggcctggggtgaggtgaagcggcagatttatgtggccgcattcactgtgcaggcagccgctgaaaccttgtctgaagtggcatag

SEQ ID NO: 146607 - DNA, 1329 bp, Artificial Sequence
  derived and/or modified sequence
atgggcggttccgctccaccagacagtagctggagaggcagcctgaaggtcccctataacgtgggacctggctttacaggaaatttctccacccaaaaggttaagatgcatattcacagcacgaatgaggtaacacgtatatacaatgtcatcggaactcttcgcggagcggtcgaacccgaccggtatgtaatcctggggggacatcgggactcttgggtcttcggtggcatcgaccctcagagcggagctgccgtcgttcacgagatcgtgcgtagttttggcaccctcaagaaagagggatggaggcccagaagaacgatcttatttgcatcctgggatgcagaggaatttgggttgttgggttctacagagtgggctgaagagaatagcagacttctgcaggagcgaggggtcgcttatattaatgctgactctagtatcgaaggaaattacaccctgcgtgtggattgtacaccgcttatgtattctctggtccacaacctgactaaggagctgaagagccccgatgaagggtttgagggaaagtctctctatgaatcctggacaaagaaatccccaagtccggagtttagcgggatgccgcgaataagcaagctgggctcggggaatgactttgaagtgtttttccagagactgggaattgccagcggcagggctagatacactaaaaattgggaaactaacaagtttagcggataccctctctatcacagtgtgtacgaaacatatgaactggtggaaaagttttatgatccgatgtttaaataccacctgactgtagcccaggtccggggaggaatggtgttcgaactggcaaactccatcgtcctgcctttcgattgccgggactacgccgttgtattacggaagtatgctgataagatctacagtatctcaatgaagcaccctcaggagatgaaaacctattccgtgtccttcgactccctgtttagtgcagtgaaaaatttcacagagattgcttccaagttcagtgaacgtctccaagattttgacaaatctaatcctatcgtcctaagaatgatgaatgaccagttaatgttcctggagcgtgcattcatcgatcccctcggactccccgatagacccttttatagacacgtcatctacgccccatcatcccataacaaatatgccggagagagcttccctgggatttatgacgccctctttgatattgaatctaaagtggacccatcaaaagcatggggtgaagtaaaacgacagatttatgttgccgctttcacagtgcaagcagccgcagaaactttgtccgaggtggcttag

SEQ ID NO: 146608 - DNA, 1638 bp, Artificial Sequence
  derived and/or modified sequence
atgtggaaccttttgcacgaaacagattcagccgtcgcaacagcccgacggccacggtggctgtgcgccggtgcgctggtattagccggaggcttcttcctgctggggtttttgttcgggtggtttattaagtcttcgaacgaggctacgaatatcacgccgaagcacaatatgaaggccttcttagatgagctgaaagccgagaatataaaaaaattcctgtacaacttcacccagattcctcacctagccggaactgagcagaacttccagctggcaaaacagatccagtcacagtggaaagagttcggccttgattcagtcgaattggcccattacgacgtgcttttgtcatatccaaataagactcacccaaattatatcagcatcatcaacgaggacggaaacgaaatcttcaataccagtttattcgagccaccaccaccaggctatgaaaacgtgtccgatatagtgccaccattctctgctttctcaccacaggggatgccagagggagacctcgtgtatgtgaactacgcaagaacagaagactttttcaagctggagcgcgatatgaagatcaattgtagcggaaaaatagtaattgctaggtacgggaaggtgtttcgcggaaataaagtcaaaaacgcacagctggccggagcaaagggcgtcatactgtatagcgatccagcggactatttcgcccctggggttaagagttatccagacggatggaatcttcctggcggaggagtacagaggggaaacattctgaatttgaacggggcaggagatccgttaacccctgggtacccagccaacgagtatgcctaccgccgtggcatagcagaggccgttggtttaccctcgataccagtgcatcccattggctactatgacgcccagaagctgctggagaagatggggggttcagcccctccggactcatcatggagaggctcattgaaagttccctacaacgttgggccaggctttactggaaactttagtacccaaaaggtgaagatgcacattcattccaccaacgaggtcaccaggatttacaacgtcataggcactctccgcggagcagtcgagcctgatcgttatgttatcctggggggacacagggactcctgggtgttcgggggaatagatccacaatccggcgctgccgtagtacatgagatcgtcaggtcatttggaacactcaagaaagaagatatcctgggttggagacctcgacgtaccatcttgtttgcctcctgggacgcggaagagttcgggttgcttgggtcaacagagtgggccgaggagaacagtcgcctcctccaagaaaggggagtagcttatatcaatgctgatagcagcatcgaagggaattatactctccgggtcgattgcacccctctgatgtattccctggtacataatctgaccaaagaactgaaaagcccagatgagggcttcgagggtaaaagtctctacgaatcctggacaaagaagagccccagccctgaattctccggaatgccaaggatcagcaaactggggagcggaaacgatttcgaagtgttctttcagagactggggattgccagtgggcgagccagatatacaaaaaaaaagaaatag

SEQ ID NO: 146609 - DNA, 2253 bp, Artificial Sequence
  derived and/or modified sequence
atgtggaacctgctgcacgagaccgacagcgccgtggccaccgccagaagacccagatggctgtgcgccggcgccctggtgctggccggcggcttcttcctgctgggcttcctgttcggctggttcatcaagagcagcaacgaggccaccaacatcacccccaagcacaacatgaaggccttcctggacgagctgaaggccgagaacatcaagaagttcctgtacaacttcacccagatcccccacctggccggcaccgagcagaacttccagctggccaagcagatccagagccagtggaaggagttcggcctggacagcgtggagctggcccactacgacgtgctgctgagctaccccaacaagacccaccccaactacatcagcatcatcaacgaggacggcaacgagatcttcaacaccagcctgttcgagccccccccccccggctacgagaacgtgagcgacatcgtgccccccttcagcgccttcagcccccagggcatgcccgagggcgacctggtgtacgtgaactacgccagaaccgaggacttcttcaagctggagagagacatgaagatcaactgcagcggcaagatcgtgatcgccagatacggcaaggtgttcagaggcaacaaggtgaagaacgcccagctggccggcgccaagggcgtgatcctgtacagcgaccccgccgactacttcgcccccggcgtgaagagctaccccgacggctggaacctgcccggcggcggcgtgcagagaggcaacatcctgaacctgaacggcgccggcgaccccctgacccccggctaccccgccaacgagtacgcctacagaagaggcatcgccgaggccgtgggcctgcccagcatccccgtgcaccccatcggctactacgacgcccagaagctgctggagaagatgggcggcagcgccccccccgacagcagctggagaggcagcctgaaggtgccctacaacgtgggccccggcttcaccggcaacttcagcacccagaaggtgaagatgcacatccacagcaccaacgaggtgaccagaatctacaacgtgatcggcaccctgagaggcgccgtggagcccgacagatacgtgatcctgggcggccacagagacagctgggtgttcggcggcatcgacccccagagcggcgccgccgtggtgcacgagatcgtgagaagcttcggcaccctgaagaaggagggctggagacccagaagaaccatcctgttcgccagctgggacgccgaggagttcggcctgctgggcagcaccgagtgggccgaggagaacagcagactgctgcaggagagaggcgtggcctacatcaacgccgacagcagcatcgagggcaactacaccctgagagtggactgcacccccctgatgtacagcctggtgcacaacctgaccaaggagctgaagagccccgacgagggcttcgagggcaagagcctgtacgagagctggaccaagaagagccccagccccgagttcagcggcatgcccagaatcagcaagctgggcagcggcaacgacttcgaggtgttcttccagagactgggcatcgccagcggcagagccagatacaccaagaactgggagaccaacaagttcagcggctaccccctgtaccacagcgtgtacgagacctacgagctggtggagaagttctacgaccccatgttcaagtaccacctgaccgtggcccaggtgagaggcggcatggtgttcgagctggccaacagcatcgtgctgcccttcgactgcagagactacgccgtggtgctgagaaagtacgccgacaagatctacagcatcagcatgaagcacccccaggagatgaagacctacagcgtgagcttcgacagcctgttcagcgccgtgaagaacttcaccgagatcgccagcaagttcagcgagagactgcaggacttcgacaagagcaaccccatcgtgctgagaatgatgaacgaccagctgatgttcctggagagagccttcatcgaccccctgggcctgcccgacagacccttctacagacacgtgatctacgcccccagcagccacaacaagtacgccggcgagagcttccccggcatctacgacgccctgttcgacatcgagagcaaggtggaccccagcaaggcctggggcgaggtgaagagacagatctacgtggccgccttcaccgtgcaggccgccgccgagaccctgagcgaggtggcctag

SEQ ID NO: 146610 - DNA, 1329 bp, Artificial Sequence
  derived and/or modified sequence
atgggcggcagcgccccccccgacagcagctggagaggcagcctgaaggtgccctacaacgtgggccccggcttcaccggcaacttcagcacccagaaggtgaagatgcacatccacagcaccaacgaggtgaccagaatctacaacgtgatcggcaccctgagaggcgccgtggagcccgacagatacgtgatcctgggcggccacagagacagctgggtgttcggcggcatcgacccccagagcggcgccgccgtggtgcacgagatcgtgagaagcttcggcaccctgaagaaggagggctggagacccagaagaaccatcctgttcgccagctgggacgccgaggagttcggcctgctgggcagcaccgagtgggccgaggagaacagcagactgctgcaggagagaggcgtggcctacatcaacgccgacagcagcatcgagggcaactacaccctgagagtggactgcacccccctgatgtacagcctggtgcacaacctgaccaaggagctgaagagccccgacgagggcttcgagggcaagagcctgtacgagagctggaccaagaagagccccagccccgagttcagcggcatgcccagaatcagcaagctgggcagcggcaacgacttcgaggtgttcttccagagactgggcatcgccagcggcagagccagatacaccaagaactgggagaccaacaagttcagcggctaccccctgtaccacagcgtgtacgagacctacgagctggtggagaagttctacgaccccatgttcaagtaccacctgaccgtggcccaggtgagaggcggcatggtgttcgagctggccaacagcatcgtgctgcccttcgactgcagagactacgccgtggtgctgagaaagtacgccgacaagatctacagcatcagcatgaagcacccccaggagatgaagacctacagcgtgagcttcgacagcctgttcagcgccgtgaagaacttcaccgagatcgccagcaagttcagcgagagactgcaggacttcgacaagagcaaccccatcgtgctgagaatgatgaacgaccagctgatgttcctggagagagccttcatcgaccccctgggcctgcccgacagacccttctacagacacgtgatctacgcccccagcagccacaacaagtacgccggcgagagcttccccggcatctacgacgccctgttcgacatcgagagcaaggtggaccccagcaaggcctggggcgaggtgaagagacagatctacgtggccgccttcaccgtgcaggccgccgccgagaccctgagcgaggtggcctag

SEQ ID NO: 146611 - DNA, 1638 bp, Artificial Sequence
  derived and/or modified sequence
atgtggaacctgctgcacgagaccgacagcgccgtggccaccgccagaagacccagatggctgtgcgccggcgccctggtgctggccggcggcttcttcctgctgggcttcctgttcggctggttcatcaagagcagcaacgaggccaccaacatcacccccaagcacaacatgaaggccttcctggacgagctgaaggccgagaacatcaagaagttcctgtacaacttcacccagatcccccacctggccggcaccgagcagaacttccagctggccaagcagatccagagccagtggaaggagttcggcctggacagcgtggagctggcccactacgacgtgctgctgagctaccccaacaagacccaccccaactacatcagcatcatcaacgaggacggcaacgagatcttcaacaccagcctgttcgagccccccccccccggctacgagaacgtgagcgacatcgtgccccccttcagcgccttcagcccccagggcatgcccgagggcgacctggtgtacgtgaactacgccagaaccgaggacttcttcaagctggagagagacatgaagatcaactgcagcggcaagatcgtgatcgccagatacggcaaggtgttcagaggcaacaaggtgaagaacgcccagctggccggcgccaagggcgtgatcctgtacagcgaccccgccgactacttcgcccccggcgtgaagagctaccccgacggctggaacctgcccggcggcggcgtgcagagaggcaacatcctgaacctgaacggcgccggcgaccccctgacccccggctaccccgccaacgagtacgcctacagaagaggcatcgccgaggccgtgggcctgcccagcatccccgtgcaccccatcggctactacgacgcccagaagctgctggagaagatgggcggcagcgccccccccgacagcagctggagaggcagcctgaaggtgccctacaacgtgggccccggcttcaccggcaacttcagcacccagaaggtgaagatgcacatccacagcaccaacgaggtgaccagaatctacaacgtgatcggcaccctgagaggcgccgtggagcccgacagatacgtgatcctgggcggccacagagacagctgggtgttcggcggcatcgacccccagagcggcgccgccgtggtgcacgagatcgtgagaagcttcggcaccctgaagaaggaggacatcctgggctggagacccagaagaaccatcctgttcgccagctgggacgccgaggagttcggcctgctgggcagcaccgagtgggccgaggagaacagcagactgctgcaggagagaggcgtggcctacatcaacgccgacagcagcatcgagggcaactacaccctgagagtggactgcacccccctgatgtacagcctggtgcacaacctgaccaaggagctgaagagccccgacgagggcttcgagggcaagagcctgtacgagagctggaccaagaagagccccagccccgagttcagcggcatgcccagaatcagcaagctgggcagcggcaacgacttcgaggtgttcttccagagactgggcatcgccagcggcagagccagatacaccaagaagaagaagtag

SEQ ID NO: 146612 - protein, 258 aa, Artificial Sequence
  derived and/or modified sequence
MAEYSYVKSTKLVLKGTKTKSKKKKSKDKKRKREEDEETQLDIVGIWWTVTNFGEISGTIAIEMDKGTYIHALDNGLFTLGAPHKEVDEGPSPPEQFTAVKLSDSRIALKSGYGKYLGINSDGLVVGRSDAIGPREQWEPVFQNGKMALLASNSCFIRCNEAGDIEAKSKTAGEEEMIKIRSCAERETKKKDDIPEEDKGNVKQCEINYVKKFQSFQDHKLKISKEDSKILKKARKDGFLHETLLDRRAKLKADRYCK

SEQ ID NO: 146613 - protein, 182 aa, Artificial Sequence
  derived and/or modified sequence
MREPIYMHSTMVFLPWELHTKKGPSPPEQFMAVKLSDSRIALKSGYGKYLGINSDELVGHSDAIGPREQWEPVFQNGKMALLASNSCFIRCNEAGDIEAKSKTAGEEEMIKIRSCAEKETKKKDDIPEEDKGNVKQCEINYVKKFQSFQDHKLKISKEESKILKKAQKDGFLHETLLDREPN

SEQ ID NO: 146614 - protein, 122 aa, Artificial Sequence
  derived and/or modified sequence
MDEGTYIHALDNGLFTLGAPHKEDIDEGPSPPEQFMAVKLSDSRIALKSGYGKYLGINSDELVGHSDAIGPREQWEPVFQNGKMALLASNSCFIRCNEAGDIEAKSKTAGEEEMIKMLSHHL

SEQ ID NO: 146615 - protein, 123 aa, Artificial Sequence
  derived and/or modified sequence
MALLASNGCFIRCNEAGDIEAKSKTAGEEEMIKIRSCAERETKKKDDIPEEDKGNVKQCEINYVKKFQSFQEHKLKISKEDSKILKKAQKDGFLQETLLDSLGYEHRWKRWLLYWIKDMSRDG

SEQ ID NO: 146616 - DNA, 1074 bp, Artificial Sequence
  derived and/or modified sequence
ggccctctgcggccgccgtagctccccggcagaaacccggaagtggaactctgagccattcagcgtttgggtgaagacggaggcgggttctacagagacgtaggctgtcagggagtgtttatttcgcgtccgcttctgtttctccgcgcccctgtgctgccccgactcacatactcgtccagaaccggcctcagcctctccgcgcagaagtttcccggagccatggccgagtactcctacgtgaagtctaccaagctcgtgctcaagggaaccaagacgaagagtaagaagaaaaagagcaaagataagaaaagaaaaagagaagaagatgaagaaacccagcttgatattgttggaatctggtggacagtaacaaactttggtgaaatttcaggaaccatagccattgaaatggataagggaacctatatacatgcactcgacaatggtctttttaccctgggagctccacacaaagaagttgatgagggccctagtcctccagagcagtttacggctgtcaaattatctgattccagaatcgccctgaagtctggctatggaaaatatcttggtataaattcagatggacttgttgttgggcgttcagatgcaattggaccaagagaacaatgggaaccagtctttcaaaatgggaaaatggctttgttggcctcaaatagctgctttattagatgcaatgaagcaggggacatagaagcaaaaagtaaaacagcaggagaagaagaaatgatcaagattagatcctgtgctgaaagagaaaccaagaaaaaagatgacattccagaagaagacaaaggaaatgtaaaacaatgtgaaatcaattatgtaaagaaatttcagagcttccaagaccacaaacttaaaataagtaaagaagacagtaaaattcttaaaaaggctcggaaagatggatttttgcatgagacgcttctggacaggagagccaaattgaaagccgacagatactgcaagtgactgggatttttgtttctgccttatctttctgtgtttttttctgaataaaatattcagaggaaatgcttttacaga

SEQ ID NO: 146617 - DNA, 777 bp, Artificial Sequence
  derived and/or modified sequence
atggccgagtacagctacgtgaagagcaccaagctggtgctgaagggcaccaagaccaagagcaagaagaagaagagcaaggacaagaagagaaagagagaggaggacgaggagacccagctggacatcgtgggcatctggtggaccgtgaccaacttcggcgagatcagcggcaccatcgccatcgagatggacaagggcacctacatccacgccctggacaacggcctgttcaccctgggcgccccccacaaggaggtggacgagggccccagcccccccgagcagttcaccgccgtgaagctgagcgacagcagaatcgccctgaagagcggctacggcaagtacctgggcatcaacagcgacggcctggtggtgggcagaagcgacgccatcggccccagagagcagtgggagcccgtgttccagaacggcaagatggccctgctggccagcaacagctgcttcatcagatgcaacgaggccggcgacatcgaggccaagagcaagaccgccggcgaggaggagatgatcaagatcagaagctgcgccgagagagagaccaagaagaaggacgacatccccgaggaggacaagggcaacgtgaagcagtgcgagatcaactacgtgaagaagttccagagcttccaggaccacaagctgaagatcagcaaggaggacagcaagatcctgaagaaggccagaaaggacggcttcctgcacgagaccctgctggacagaagagccaagctgaaggccgacagatactgcaagtag

SEQ ID NO: 146618 - DNA, 549 bp, Artificial Sequence
  derived and/or modified sequence
atgagagagcccatctacatgcacagcaccatggtgttcctgccctgggagctgcacaccaagaagggccccagcccccccgagcagttcatggccgtgaagctgagcgacagcagaatcgccctgaagagcggctacggcaagtacctgggcatcaacagcgacgagctggtgggccacagcgacgccatcggccccagagagcagtgggagcccgtgttccagaacggcaagatggccctgctggccagcaacagctgcttcatcagatgcaacgaggccggcgacatcgaggccaagagcaagaccgccggcgaggaggagatgatcaagatcagaagctgcgccgagaaggagaccaagaagaaggacgacatccccgaggaggacaagggcaacgtgaagcagtgcgagatcaactacgtgaagaagttccagagcttccaggaccacaagctgaagatcagcaaggaggagagcaagatcctgaagaaggcccagaaggacggcttcctgcacgagaccctgctggacagagagcccaactag

SEQ ID NO: 146619 - DNA, 369 bp, Artificial Sequence
  derived and/or modified sequence
atggacgagggcacctacatccacgccctggacaacggcctgttcaccctgggcgccccccacaaggaggacatcgacgagggccccagcccccccgagcagttcatggccgtgaagctgagcgacagcagaatcgccctgaagagcggctacggcaagtacctgggcatcaacagcgacgagctggtgggccacagcgacgccatcggccccagagagcagtgggagcccgtgttccagaacggcaagatggccctgctggccagcaacagctgcttcatcagatgcaacgaggccggcgacatcgaggccaagagcaagaccgccggcgaggaggagatgatcaagatgctgagccaccacctgtag

SEQ ID NO: 146620 - DNA, 372 bp, Artificial Sequence
  derived and/or modified sequence
atggccctgctggccagcaacggctgcttcatcagatgcaacgaggccggcgacatcgaggccaagagcaagaccgccggcgaggaggagatgatcaagatcagaagctgcgccgagagagagaccaagaagaaggacgacatccccgaggaggacaagggcaacgtgaagcagtgcgagatcaactacgtgaagaagttccagagcttccaggagcacaagctgaagatcagcaaggaggacagcaagatcctgaagaaggcccagaaggacggcttcctgcaggagaccctgctggacagcctgggctacgagcacagatggaagagatggctgctgtactggatcaaggacatgagcagagacggctag

SEQ ID NO: 146621 - DNA, 777 bp, Artificial Sequence
  derived and/or modified sequence
atggctgaatactcctacgtgaagtcgaccaagttggtgctgaagggtaccaaaaccaagagtaagaagaaaaagagcaaggataagaagcgtaaaagggaggaggacgaggaaacacagcttgacatagttggcatatggtggacagttacaaatttcggagaaatctcaggaacaatcgctatcgagatggataaaggaacatacattcatgctcttgacaacggactcttcaccctgggcgcccctcacaaggaagtggacgaaggtccttctccccctgagcaatttacagctgttaaactcagtgactctaggattgcactgaaaagcgggtacggcaaatacctgggaatcaactcagacggactggtggtggggcggagtgatgcaatagggcccagggagcaatgggaacctgtctttcaaaacgggaaaatggccctgttagcctccaatagctgtttcattagatgtaacgaagccggtgacatagaggccaaatcaaagacagccggcgaagaagaaatgataaaaatacgcagttgtgccgaacgagagaccaagaagaaagacgatatccctgaagaggataagggaaatgttaagcagtgcgagatcaactacgtgaagaaatttcagtcattccaggaccataagctaaagatcagcaaagaggactccaagatactcaagaaggccaggaaagacgggttccttcatgaaacgttgctggacagacgcgccaagctaaaggctgaccggtactgcaaatag

SEQ ID NO: 146622 - DNA, 549 bp, Artificial Sequence
  derived and/or modified sequence
atgcgcgagcccatttatatgcactccacaatggtatttctgccatgggaattacatactaaaaagggccctagccctccggaacagttcatggccgtgaagctgtctgactcccgcattgcattaaagtctgggtatggaaaatatttgggcatcaatagcgatgagctggtcggccactcagacgctatcggcccacgagagcagtgggagcccgtttttcagaacgggaaaatggcccttctggccagcaactcttgtttcattcgctgcaatgaggctggcgacattgaggcaaagtcaaaaactgctggggaagaggaaatgatcaagattcgctcatgcgccgagaaagagacgaaaaaaaaggacgacataccagaggaggacaaagggaatgttaagcagtgtgagattaactacgtcaaaaagtttcagtctttccaagaccataagctgaagatcagtaaggaggaaagtaaaattctcaaaaaagctcagaaagatggcttcctgcacgagacccttttggaccgcgaacccaattag

SEQ ID NO: 146623 - DNA, 549 bp, Artificial Sequence
  derived and/or modified sequence
atgagagagcctatttacatgcattccaccatggtattcctcccttgggaactgcatacaaagaagggaccttcgccccctgaacagtttatggcagtaaaacttagtgacagccgtatagctctgaagagcgggtacgggaaatatcttgggatcaatagcgacgagctggtgggccattctgacgccatagggcctcgcgagcagtgggaaccagtgttccagaacgggaagatggccctactagccagcaactcctgctttatccgctgcaatgaggcaggtgatatagaagcaaagagtaagaccgccggagaggaagagatgatcaagatcaggtcgtgcgctgaaaaagagacaaagaagaaagacgacattcctgaagaggataaaggaaatgtgaaacagtgtgaaattaattatgttaaaaaatttcaatctttccaggaccacaagctcaaaatttcaaaggaggagagtaagatcttgaagaaagcccaaaaggacgggttcctgcatgagaccctcttggacagggagcctaactag

SEQ ID NO: 146624 - DNA, 369 bp, Artificial Sequence
  derived and/or modified sequence
atggatgaagggacgtatatccacgccctggacaatggcctgttcaccctgggtgcaccacacaaagaagacatcgacgagggaccaagtccaccggagcagttcatggccgtgaaactgagcgactcccgcattgcgctaaagagtggatacggtaagtatctcggtataaattcagacgaactcgtcggccactctgatgctattggtccgcgggagcagtgggaacccgtttttcagaatgggaaaatggctctattggcatccaactcatgtttcattaggtgtaacgaagcaggggatatagaggctaaaagtaagacagccggagaggaagaaatgataaaaatgttaagccaccacctttag

SEQ ID NO: 146625 - DNA, 372 bp, Artificial Sequence
  derived and/or modified sequence
atggccctgctcgcgagcaacggctgcttcataaggtgcaacgaggccggcgatatcgaagccaaaagtaagaccgcaggcgaggaggagatgattaaaatcagatcttgtgccgagcgtgagaccaaaaaaaaagatgacatcccggaggaagacaaagggaatgttaagcaatgcgaaattaattacgtgaagaagtttcaatcattccaggagcacaagttgaaaatttctaaagaggattccaagattcttaaaaaggcccaaaaggatggctttttgcaggagacactgctggacagtctgggatatgagcatcgttggaagcgctggctgttgtactggatcaaggacatgtctagagacggctag

SEQ ID NO: 146626 - DNA, 777 bp, Artificial Sequence
  derived and/or modified sequence
atggccgagtacagctatgtgaagagcaccaagctggtgctgaagggcaccaagaccaagagcaagaagaagaagagcaaggacaagaagaggaagcgggaggaggatgaggagacccagctggacatcgtgggcatctggtggacagtgaccaactttggagagatcagcggcaccatcgccatcgagatggacaagggcacctacatccacgccctggacaatggcctcttcaccctgggcgccccccacaaggaggtggatgagggccccagccccccagagcagttcaccgctgtgaagctgagtgacagcagaattgccctgaagagcggctacggcaagtacctgggcatcaacagtgatggcctggtggtgggccgcagtgatgccatcggcccccgggagcagtgggagcccgtcttccagaatggcaagatggccctgctggccagcaacagctgcttcatccgctgcaatgaggccggggacatcgaggccaagagcaagacagctggggaggaggagatgatcaagatccgcagctgtgccgagcgggagaccaagaagaaggatgacatcccagaagaagataaaggaaatgtgaagcagtgtgagatcaactacgtgaagaagttccagagcttccaggaccacaagctgaagatcagcaaggaggacagcaagatcctgaagaaggccaggaaggatggcttcctgcacgagaccctgctggacagaagagccaagctgaaggctgaccgctactgcaagtag

SEQ ID NO: 146627 - DNA, 549 bp, Artificial Sequence
  derived and/or modified sequence
atgagggagcccatctacatgcacagcaccatggtgttcctgccctgggagctgcacaccaagaagggccccagccccccagagcagttcatggctgtgaagctgagtgacagccgcatcgccctgaagagcggctacggcaagtacctgggcatcaacagtgatgagctggtgggccacagtgatgccatcggcccccgggagcagtgggagcccgtcttccagaatggcaagatggccctgctggccagcaacagctgcttcatccgctgcaatgaggccggggacatcgaggccaagagcaagacagctggggaggaggagatgatcaagatccgcagctgtgccgagaaggagaccaagaagaaggatgacatcccagaagaagataaaggaaatgtgaagcagtgtgagatcaactacgtgaagaagttccagagcttccaggaccacaagctgaagatcagcaaggaggagagcaagatcctgaagaaggcccagaaggatggcttcctgcacgagaccctgctggaccgggagcccaactag

SEQ ID NO: 146628 - DNA, 369 bp, Artificial Sequence
  derived and/or modified sequence
atggatgagggcacctacatccacgccctggacaatggcctcttcaccctgggcgccccccacaaggaggacattgatgagggccccagccccccagagcagttcatggctgtgaagctgagtgacagcagaattgccctgaagagcggctacggcaagtacctgggcatcaacagtgatgagctggtgggccacagtgatgccatcggcccccgggagcagtgggagcctgtgttccagaatggcaagatggccctgctggccagcaacagctgcttcatccgctgcaatgaagctggggacatcgaggccaagagcaagacagctggggaggaggagatgatcaagatgctgagccaccacctgtag

SEQ ID NO: 146629 - DNA, 1029 bp, Artificial Sequence
  derived and/or modified sequence
gaaacctggaagtggaaatctcgggcattcaccgtttgggtgaagacggaggcgggttctggacagacgtaggctgtcagggagtgtttacttcgcctccacttctgttcctccctgccctggtgctgctccaggtcacatactcgtcctgagccggcttcagcctgtccgcgcagaagtctcccggagccatggcctagtactcttatgtgaagtctagcaagctcgtgctcaagggaaccgaggtgaagagctggaagaaaaagagcaaagataagaagagaaaaagagaagatgaagaaacccagcttgatacgttggaatctggtgaacagtaacaaactttggtgaaatttcaggaaccatagccattgaaatggatgagggaacctatatacatgcactcgacaatggtctttttaccctgggagctccacacaaagaagggccctagtcctccagagcagtttatggctgtcaaattatctgattccagaatcgccctgaaatctggctatggaaaatatcttggtataaattcagatgaacttgttgggcattcagatgcaattggaccaagagaacaatgggaaccagtctttcaaaatgggaaaatggctttgttggcctcaaatagctgctttattagatgcaatgaagcaggggacatagaagcaaaaagtaaaacagcaggagaagaagaaatgatcaagattagatcctgtgctgaaaaagaaaccaagaaaaaagatgacattccagaagaagacaaaggaaatgtaaaacaatgtgaaatcaattatgtaaagaaatttcagagcttccaagaccacaaacttaaaataagtaaagaagagagtaaaattcttaaaaaggctcagaaagatggatttttgcatgagacgcttctggacagagaaccaaattgaaagccgacagatactgcaaatgactggaatttttgtttctgccttatctttttgtgttttttttttctgaataaaatattcagaggaaatgcttttacag

SEQ ID NO: 146630 - DNA, 995 bp, Artificial Sequence
  derived and/or modified sequence
gggcattcaccgtttgggtgaagacggaggcgggttctggacagacgtaggctgtcagggagtgtttacttcgcctccacttctgttcctccctgccctggtgctgctccaggtcacatactcgtcctgagccggcttcagcctgtccgcgcagaagtctcccggagccatggcctagtactcttatgtgaagtctagcaagctcgtgctcaagggaaccgagtaagaagaaaaagagcaaagataagaagagaaaaagagaagatgaagaaacccagcttgatacgttggaatctggtgaacagtaacaaactttggtgaaatttcaggaaccatagccattgaaatggatgagggaacctatatacatgcactcgacaatggtctttttaccctgggagctccacacaaagaagggccctagtcctccagagcagtttatggctgtcaaattatctgattccagaatcgccctgaaatctggctatggaaaatatcttggtataaattcagatgaacttgttgggcattcagatgcaattggaccaagagaacaatgggaaccagtctttcaaaatgggaaaatggctttgttggcctcaaatagctgctttattagatgcaatgaagcaggggacatagaagcaaaaagtaaaacagcaggagaagaagaaatgatcaagattagatcctgtgctgaaaaagaaaccaagaaaaaagatgacattccagaagaagacaaaggaaatgtaaaacaatgtgaaatcaattatgtaaagaaatttcagagcttccaagaccacaaacttaaaataagtaaagaagagagtaaaattcttaaaaaggctcagaaagatggatttttgcatgagacgcttctggacagagaaccaaattgaaagccgacagatactgcaaatgactggaatttttgtttctgccttatctttttgtgttttttttttctgaataaaatattcagaggaaatgctttt

SEQ ID NO: 146631 - DNA, 712 bp, Artificial Sequence
  derived and/or modified sequence
gggcattcaccgtttgggtgaagacggaggcgggttctggacagacgtaggctgtcagggagtgtttacttcgcctccacttctgttcctccctgccctggtgctgctccaggtcacatactcgtcctgagccggcttcagcctgtccgcgcagaagtctcccggagccatggcctagtactcttatgtgaagtctagcaagctcgtgctcaagggaaccgagtaagaagaaaaagagcaaagataagaagagaaaaagagaagatgaagaaacccagcttgatacgttggaatctggtgaacagtaacaaactttggtgaaatttcaggaaccatagccattgaaatggatgagggaacctatatacatgcactcgacaatggtctttttaccctgggagctccacacaaagaagatattgatgagggccctagtcctccagagcagtttatggctgtcaaattatctgattccagaatcgccctgaaatctggctatggaaaatatcttggtataaattcagatgaacttgttgggcattcagatgcaattggaccaagagaacaatgggaaccagtctttcaaaatgggaaaatggctttgttggcctcaaatagctgctttattagatgcaatgaagcaggggacatagaagcaaaaagtaaaacagcaggagaagaagaaatgatcaagatgttaagtcatcattta

SEQ ID NO: 146632 - DNA, 372 bp, Artificial Sequence
  derived and/or modified sequence
atggccctgctggccagcaatggctgcttcatccgctgcaatgaggccggggacatcgaggccaagagcaagacagctggggaggaggagatgatcaagatccgcagctgtgccgagcgggagaccaagaagaaggatgacatcccagaagaagataaaggaaatgtgaagcagtgtgagatcaactacgtgaagaagttccagagcttccaggagcacaagctgaagatcagcaaggaggacagcaagatcctgaagaaggcccagaaggatggcttcctgcaggagaccctgctggacagcctgggctatgagcaccgctggaagcgctggctgctgtactggatcaaggacatgagcagagatggatag

SEQ ID NO: 146633 - DNA, 777 bp, Artificial Sequence
  derived and/or modified sequence
atggccgagtacagctacgtgaagagcaccaagctggtgctgaagggaacaaagactaaatcgaagaagaagaaatccaaggataagaagcgtaaacgggaggaagatgaagagacgcagctcgatattgtaggaatttggtggactgtgaccaacttcggagagatatccggtacaatcgcaatagaaatggataagggaacatatattcacgccctggataatggcttattcacactgggtgcccctcacaaggaagtcgacgagggcccttcccccccggaacagttcacagcagtcaaactgagtgattctagaattgcccttaagtccggatacgggaagtatctgggaatcaactccgatggccttgttgtaggccgctctgacgcaattggtcctcgggaacagtgggagcctgtttttcagaacggaaagatggcactgctggctagcaatagctgctttattcgctgcaacgaagccggcgacattgaggctaagtcaaagaccgccggtgaagaagagatgatcaaaataaggagctgcgcagaaagggaaacgaaaaaaaaagacgatatcccagaggaggataagggtaacgtcaagcaatgcgaaatcaactatgtgaagaagtttcagagtttccaggaccataagcttaagatctcaaaggaggattccaagattctgaaaaaagcacgaaaggacgggtttctccacgagaccctgttggataggcgcgcaaaactgaaagcggatcgctactgcaaatag

SEQ ID NO: 146634 - DNA, 549 bp, Artificial Sequence
  derived and/or modified sequence
atgcgggagcccatctacatgcacagcaccatggtgttcctgccctgggagttacacactaagaaggggccatcccctcctgagcagttcatggccgttaagttatcagactcaaggatagcattaaagtctggttacgggaagtatttagggatcaattctgatgagttggtcggccacagcgatgccattggccctagggaacagtgggagcccgtgttccagaacggtaagatggccctgcttgcttccaactcttgcttcatccgctgtaacgaagcaggggatattgaagcaaagtctaagaccgctggtgaggaggagatgatcaagatacgctcctgcgccgagaaagagacgaaaaaaaaagacgacatccccgaggaagacaaaggcaatgtgaagcagtgtgaaatcaactacgtcaaaaagttccagagtttccaggaccacaaactaaagatctctaaggaggaatctaagatccttaaaaaggcccagaaagacggcttcctacacgagacccttctcgaccgcgagcccaactag

SEQ ID NO: 146635 - DNA, 549 bp, Artificial Sequence
  derived and/or modified sequence
atgcgggagcccatctacatgcacagcaccatggtgttcctgccctgggagctgcataccaagaaggggccttctccccccgaacaatttatggctgttaaactgtctgattctcgcatcgcactgaagagcggttacggaaagtacttggggatcaattccgatgagctcgtggggcactctgatgctataggaccacgagaacagtgggagcctgtctttcagaacggaaagatggccctacttgccagtaacagttgtttcatcaggtgtaatgaggccggggacattgaggccaagtcaaaaacagctggcgaggaggagatgattaaaataaggtcctgtgccgaaaaagagaccaagaagaaggatgatatcccagaggaggataagggtaatgtaaagcagtgtgaaatcaactacgtcaaaaagtttcagtcgttccaggatcacaagctgaaaatttctaaggaggagagcaagatcttgaaaaaagctcagaaagatgggtttctgcacgaaacacttctggaccgcgaacccaattag

SEQ ID NO: 146636 - DNA, 369 bp, Artificial Sequence
  derived and/or modified sequence
atggacgagggcacctacatccacgccctggacaacggcctgttcacattgggcgcaccacataaagaagacattgacgagggcccctctccccccgaacaatttatggcggtaaagctgtccgattctagaatcgccttaaaatctgggtatggcaaatacttagggatcaactctgatgagcttgtggggcacagtgacgctatcgggccgcgagaacagtgggagccggttttccagaatggaaaaatggccctcctcgcatccaatagctgcttcatccgttgcaatgaagcgggcgatatagaggcaaagagcaagaccgcaggtgaagaagagatgattaaaatgctatctcaccatttgtag

SEQ ID NO: 146637 - DNA, 372 bp, Artificial Sequence
  derived and/or modified sequence
atggccctgctggccagcaacggctgcttcatccggtgcaacgaggctggggacatagaggccaagtcaaaaactgccggcgaagaggagatgatcaaaatccgcagttgcgccgaaagagaaaccaagaaaaaggacgatatcccagaggaggacaagggcaatgtgaagcagtgtgagataaattatgtgaagaaattccaaagcttccaggagcacaagctgaagatatccaaagaggattctaaaattctaaagaaggcccagaaagacgggttcctacaggaaaccctgctggactcattaggatacgagcaccgatggaagagatggctgctgtattggattaaggatatgtctcgggacggctag

SEQ ID NO: 146638 - DNA, 777 bp, Artificial Sequence
  derived and/or modified sequence
atggctgagtatagctatgttaagagcactaagctcgtactgaagggaaccaagaccaagagcaagaagaaaaagagcaaggataagaagaggaagcgagaggaagatgaagaaacccagctagatattgttgggatttggtggaccgtgactaacttcggagaaatctccggcactattgccattgaaatggacaaggggacgtacatccacgccctggataacggattatttacgttgggagccccacataaggaggtcgacgaagggccttcccccccagaacagttcaccgccgttaaactgtccgactctcgcatcgctttgaaatctgggtacggcaagtatctcgggatcaactctgatggacttgtggtcggtcgcagtgacgctatagggcctcgtgagcagtgggagccagtgtttcaaaatggcaaaatggcacttttggcctccaattcctgttttattcgatgtaatgaggcaggtgatatagaagccaagtcaaaaactgccggagaagaagagatgatcaaaattcggagttgcgccgagcgagagacaaaaaaaaaagacgacattcccgaggaagataaaggcaacgtgaagcagtgtgaaatcaattacgtgaagaaattccagtccttccaggaccacaaactgaaaatatccaaggaagatagcaagattctaaagaaggcaagaaaggacggcttcctgcacgagactctgttagatcggagagctaaactcaaagctgacagatattgtaagtag

SEQ ID NO: 146639 - DNA, 549 bp, Artificial Sequence
  derived and/or modified sequence
atgcgggaacctatatatatgcactctaccatggtctttctcccttgggagctccacactaaaaaaggacccagtcctccagagcagtttatggccgtgaagctgtctgactctagaatcgcacttaagtccggctacggtaagtatctgggcataaacagtgatgagctcgtcggacacagcgacgccatcggtccaagggagcagtgggaacccgtgttccagaacggcaagatggcactgctggccagcaacagttgcttcatcaggtgtaatgaagccggtgacatcgaagcaaagagcaagaccgcaggggaggaagagatgattaagatcaggagttgtgctgagaaagaaaccaagaaaaaggatgacatcccagaagaggataaaggcaacgtcaagcaatgcgagatcaattacgttaagaaattccagtctttccaggaccacaagctgaaaattagtaaggaagagagcaaaattttgaaaaaggcccagaaggacggcttcctgcatgagaccttactcgatagggaacccaactag

SEQ ID NO: 146640 - DNA, 549 bp, Artificial Sequence
  derived and/or modified sequence
atgagagagcctatctatatgcactcgactatggtgttcttaccttgggagttacataccaagaagggcccatctccacccgagcagtttatggcagttaagctgtccgatagtcgcatcgccctgaaaagtggatatgggaagtatctgggtatcaatagcgacgaactggtcgggcacagtgatgccatcggccctagggagcagtgggaacccgtgtttcagaatggaaaaatggcactgctcgcttctaattcttgtttcattcggtgcaacgaggctggcgatattgaagcaaagtcaaagactgccggagaggaagaaatgattaagatacgcagttgtgccgagaaagagacgaaaaaaaaagacgatatccccgaagaagacaagggcaatgtgaaacagtgtgaaattaactacgtgaaaaagttccagagctttcaagatcataagttgaagatctctaaagaggaatcaaagattttgaaaaaggcccaaaaagatggattcctccacgaaaccctgctcgatcgtgagcccaattag

SEQ ID NO: 146641 - DNA, 369 bp, Artificial Sequence
  derived and/or modified sequence
atggatgagggaacctacatccatgcgctcgacaatggtttatttacgctaggggctccacacaaggaggatattgacgagggccctagcccgccagagcagtttatggccgtgaagctgtctgattcccgcatcgctctgaagtcgggatacggaaagtacctcggaattaactccgatgaactggtaggccattccgatgccattgggcctcgggagcagtgggaacctgtattccagaacgggaagatggcactattggcgagcaattcatgcttcatccgctgtaatgaagctggcgatatcgaggctaaatcaaaaactgcaggggaagaggagatgataaaaatgttgtcacatcatctttag

SEQ ID NO: 146642 - DNA, 372 bp, Artificial Sequence
  derived and/or modified sequence
atggcactactagcttcaaatggttgcttcatacgatgcaatgaggctggggatatagaagccaagtcaaaaaccgcgggagaggaagaaatgattaagattcggtcctgcgccgaacgtgaaactaaaaagaaggatgatatacccgaagaggacaaaggtaacgtgaagcaatgcgagattaactacgtgaagaagttccaaagtttccaggagcataaattgaagataagcaaggaggactccaaaattctgaagaaggcacagaaggatgggttccttcaggagaccttactggatagtcttggctacgaacatcgatggaagcgatggctgctgtattggatcaaagacatgtcacgggacggctag

SEQ ID NO: 146643 - DNA, 1093 bp, Artificial Sequence
  derived and/or modified sequence
gctccgggtcacatactcgtcctgagccggcttcagcctctccgcgcagaagtgtcccggagccatggccgagtactcttatgcgaagtctaccaagcttgtgctcaagggaaccaagacgaagagtaagaagaaaaagagcaaagagaagaagagaaaaagagaagaagatgaagaaacccagtttgatatgttggaatctggtgaacagtaacaaactttgatgaaatttcaggaaccatagccattgaaatggatgagggaacctatatacatccactcgacaatggtctttttaccctgggagctccacacaaagaaggggaaaatggctttgttggcctcaaatggctgctttattagatgcaatgaagcaggggacatagaagcaaaaagtaaaacagcaggagaagaagaaatgatcaagattagatcctgtgctgaaagagaaaccaagaaaaaagatgacattccagaagaagacaaaggaaatgtaaaacaatgtgaaatcaattatgtaaagaaatttcagagcttccaagagcacaaacttaaaataagtaaagaagacagtaaaattcttaaaaaggctcagaaagatggatttttgcaagagacgcttctggacagtttaggctatgagcatagatggaagaggtggctgttgtattggatcaaggatatgagcagagatggatgaggcagcggctgtaatggttcaaggctatgaacatcttgtgaagtaggatgttaaatctgcaaatatcagagtgaatccaaacttatcaattcaacactggattgtaaaacagctcaaaaaaagactaaaaacacagctctacactttaggaggttggggcaggcagattgctcgagctcaggagtgggagacaagtttaggaaacatggaaaaaccctgtctctaaaaaaaaaaaaaaaattgaattagctgggtatggtggtataagcctgtggttccagcttctcaggaggctgaggtgagaggattgcttgagcctggaaggtgaggctgcagtgagctctgatcacaccactgcattccagcctaggtgatagagtgagaccctgtctt

SEQ ID NO: 146644 - protein, 342 aa, Artificial Sequence
  derived and/or modified sequence
MNNAGHGPTRRLRGLGVLAGVALLAALWLLWLLGSAPRGTPAPQPTITILVWHWPFTDQPPELPSDTCTRYGIARCHLSANRSLLASADAVVFHHRELQTRRSHLPLAQRPRGQPWVWASMESPSHTHGLSHLRGIFNWVLSYRRDSDIFVPYGRLEPHWGPSPPLPAKSRVAAWVVSNFQERQLRARLYRQLAPHLRVDVFGRANGRPLCASCLVPTVAQYRFYLSFENSQHRDYITEKFWRNALVAGTVPVVLGPPRATYEAFVPADAFVHVDDFGSARELAAFLTGMNESRYQRFFAWRDRLRVRLFTDWRERFCAICDRYPHLPRSQVYEDLEGWFQA

SEQ ID NO: 146645 - DNA, 2584 bp, Artificial Sequence
  derived and/or modified sequence
ccaggctccaggccctggcttagagggagcggggagtctggacttcaggctggatcccttcctcttcctggagcgggtgctggcccccaacccgcttgcgtcagggacaaaaggactccttccctttccagcctggaaagcccctctgctgcaggctggaggaagggaccctgggcccagcctatagtcagcggtgtctatgggcatggatctggacggggaaaaggacaaagcagcctccatccacagttcattccgggaccaggcccttgcaggcacgcgctgggctcctgtgggaagacactaagggccccaggacagacctcctctccgggcatctgggttcctagatggcagaggtggcagagtggggtgggatggcccaattgggagctttagcttccggcaaagagctgagcacagtacatcttcaatgtgtaagattctcctgggagaccagggcccagctggtggtgagctgggggaagtgggtgatactgccgtgggaggagccacctggccctctggggaagtgcactcgctgtctgcagcgcccaggcctgggtagctgggtgggggctggggggccatctgtgctcagggtgcctgcacctgggccttctctgccctgggccaagcctgcccgagcctctctgtcctctgcctgcccagctggacatctctgggcctctctggagaccagtggggtgggctgtgggggcgtcatattgccctggcttggcatccctcttgtggctgtacccctcccagcagccccaggactagcaagtccccgagatgggggtggggacagtggttgatgccaaaggttgtgggggcaggggcggggcaggagcaggaaggtcccctgagttccctcaccttgggcagagataaaaggagcacagttccaggcggggctgagctagggcgtagctgtgatttcaggggcacctctggcggctgccgtgatttgagaatctcgggtctcttggctgactgatcctgggagactgtggatgaataatgctgggcacggccccacccggaggctgcgaggcttgggggtcctggccggggtggctctgctcgctgccctctggctcctgtggctgctggggtcagcccctcggggtaccccggcaccccagcccacgatcaccatccttgtctggcactggcccttcactgaccagcccccagagctgcccagcgacacctgcacccgctacggcatcgcccgctgccacctgagtgccaaccgaagcctgctggccagcgccgacgccgtggtcttccaccaccgcgagctgcagacccggcggtcccacctgcccctggcccagcggccgcgagggcagccctgggtgtgggcctccatggagtctcctagccacacccacggcctcagccacctccgaggcatcttcaactgggtgctgagctaccggcgcgactcggacatctttgtgccctatggccgcctggagccccactgggggccctcgccaccgctgccagccaagagcagggtggccgcctgggtggtcagcaacttccaggagcggcagctgcgtgccaggctgtaccggcagctggcgcctcatctgcgggtggatgtctttggccgtgccaatggacggccactgtgcgccagctgcctggtgcccaccgtggcccagtaccgcttctacctgtcctttgagaactctcagcaccgcgactacattacggagaaattctggcgcaacgcactggtggctggcactgtgccagtggtgctggggcccccacgggccacctatgaggccttcgtgccggctgacgccttcgtgcatgtggatgactttggctcagcccgagagctggcggctttcctcactggcatgaatgagagccgataccaacgcttctttgcctggcgtgacaggctccgcgtgcgactgttcaccgactggcgggaacgtttctgtgccatctgtgaccgctacccacacctaccccgcagccaagtctatgaggaccttgagggttggtttcaggcctgagatccgctggccgggggaggtgggtgtgggtggaagggctgggtgtcgaaatcaaaccaccaggcatccggcccttaccggcaagcagcgggctaacgggaggctgggcacagaggtcaggaagcaggggtggggggtgcaggtgggcactggagcatgcagaggaggtgagagtgggagggaggtaacgggtgcctgctgcggcagacgggaggggaaaggctgccgaggaccctccccaccctgaacaaatcttgggtgggtgaaggcctggctggaagagggtgaaaggcagggcccttggggctggggggcaccccagcctgaagtttgtgggggccaaacctgggaccccgagcttcctcggtagcagaggccctgtggtccccgagacacaggcacgggtccctgccacgtccatagttctgaggtccctgtgtgtaggctggggcggggcccaggagaccacggggagcaaaccagcttgttctgggctcagggagggagggcggtggacaataaacatctgagcagtg

SEQ ID NO: 146646 - DNA, 1029 bp, Artificial Sequence
  derived and/or modified sequence
atgaataacgcaggacatgggccaacaagacgtttgcgagggctgggggttcttgccggcgtcgccctgttggccgctctctggctgctgtggctgctcgggtctgccccccggggaacacccgccccccagcctaccatcaccattctggtttggcactggccttttaccgatcaacccccagaattgccttctgatacctgcacccgctacggcattgccaggtgccatctgagcgctaatcggtcactgcttgcctccgccgacgctgttgtttttcaccaccgggagcttcagacaagacgtagccacctgcctcttgcgcagaggccacgaggccagccatgggtgtgggcctctatggagagcccatcccacacgcacggcttgagtcacctgcggggcatttttaactgggtcttatcttatcgccgcgattcagatatcttcgtgccatacggcagattagagcctcattgggggccatccccaccgctccctgccaagtccagagtggctgcctgggttgtgtccaacttccaggagagacagttacgcgcaagactataccgtcagctggcacctcacctgcgagtcgacgttttcggacgcgcgaacggccgacctctatgcgcaagctgcctcgtgcctactgtggcgcagtaccggttctatttaagttttgaaaatagtcaacacagggattacatcacagaaaagttctggaggaatgccttagtcgccggcacagttccagtggtcctcggacccccccgagcaacctatgaggcgtttgtgcccgcggatgcattcgttcacgtggacgactttggatccgctcgggaactggcagcattcctgacaggtatgaatgagagccggtatcagcgtttttttgcctggagagatagactgcgggtgcgactcttcactgattggagggagagattttgtgcaatttgtgaccggtacccgcatttgccccggtcacaggtgtacgaggatctcgaggggtggtttcaggcttag

SEQ ID NO: 146647 - DNA, 1029 bp, Artificial Sequence
  derived and/or modified sequence
atgaacaatgccggccacggccccacccggcggctgcggggcctgggcgtgctggccggcgtggccctgctggccgccctgtggctgctgtggctgctgggcagcgccccccggggcaccccagccccccagcccaccatcaccatcctggtgtggcactggcccttcacagaccagcccccagagctgcccagcgacacctgcaccaggtatggaattgcccgctgccacctgagcgccaacagaagcctgctggccagcgcagatgctgtggtgttccaccaccgggagctgcagaccaggaggagccacctgcccctggcccagaggccccggggccagccctgggtgtgggcctccatggagagccccagccacacccacggcctgagccacctgcggggcatcttcaactgggtgctgagctaccgccgggacagcgacatctttgtgccctacggccgcctggagccccactggggccccagcccccccctgcctgccaagagccgggtggccgcctgggtggtgagcaacttccaggagcggcagctgcgggcccggctgtaccggcagctggccccccacctgcgggtggatgtgtttggccgggccaacggccggcccctgtgtgccagctgcctggtgcccaccgtggcccagtaccgcttctacctgagctttgagaacagccagcaccgggactacatcacagagaagttctggagaaatgccctggtggccggcaccgtgcctgtggtgctgggccccccccgggccacctatgaggcctttgtgcctgcagatgcctttgtgcacgtggatgactttggaagtgcccgggagctggccgccttcctgaccggcatgaatgaaagccgctaccagcgcttctttgcctggagggaccggctgcgggtgcggctcttcacagactggagggagcgcttctgtgccatctgtgaccgctacccccacctgcccaggagccaggtgtatgaggacctggagggctggttccaggcctag

SEQ ID NO: 146648 - DNA, 1029 bp, Artificial Sequence
  derived and/or modified sequence
atgaacaacgccggccacggccccacccggcggctgcggggcctgggggtactggcaggagtggctcttctagccgccctctggctcctgtggctactcggtagtgctccccgaggcactccagcgccccaaccaactatcaccatattggtgtggcattggccctttactgaccagccacccgaattgccaagcgacacttgcactaggtatgggatcgctcgatgccacttaagtgctaatcggagcctgctcgccagcgcggatgcagtggtgttccatcatcgcgagctgcagacccgcagaagtcacctgcccctagcccagcgacctagaggacagccttgggtgtgggcctcaatggagtccccctcccacactcacggattgagccacctgcgaggaatctttaactgggtgctcagctataggagagatagtgatatatttgtgccatacggaaggctggaaccacactggggaccctccccccccctgcctgctaaaagccgtgttgctgcctgggtggtgtctaactttcaagaacggcaacttcgggctcgcctctaccgacagctggcacctcacttgagggttgacgtgttcgggagagccaatgggcgcccattgtgcgcttcctgcctggtgccaacagtggctcagtatcgcttttacctcagctttgagaatagccagcaccgcgactacattacagaaaaattctggcgcaatgcgctcgtggctgggacagtgccagtggtgttaggacctcctcgtgccacgtatgaggcctttgtgcctgctgacgcattcgtgcacgtggacgactttggttcagctcgcgagcttgcagcatttctgaccggcatgaacgagtcacgctaccagcgcttcttcgcatggcgggatcggctaagggtgagactgttcactgactggcgcgagcgcttctgcgcgatctgtgaccggtaccctcaccttccgaggagtcaggtttacgaggatctggaaggatggtttcaggcatag

SEQ ID NO: 146649 - DNA, 1029 bp, Artificial Sequence
  derived and/or modified sequence
atgaataatgcaggtcacgggccaacccgtcgcttgagaggactcggggttctggccggagtcgccctgctggctgctctctggctgctgtggctgcttgggtcagcacctcgcggtacccctgcaccgcagcctacaatcactatcctcgtttggcattggcccttcactgatcagccccctgaactgcccagcgacacctgcacacgctatggaatagcacgatgccacctgtcagccaaccgttctttgttagcttccgctgatgccgtggtgttccaccacagagagttgcagacgagacgctcccatttgccgctcgctcagaggcctcggggacagccatgggtctgggccagtatggagtccccctctcacacacacggtctttctcacctgcgaggcatatttaactgggtgttatcttatcgacgtgactccgacatcttcgtgccatacggacgcctggaaccgcactggggaccgagtccccctttgccagcaaaatccagagtcgccgcatgggtcgtctcaaacttccaggagcgccaactacgggcacgcttgtaccgccaactcgccccacatctgcgcgtggacgtcttcggcagggctaatgggcgtcccctatgcgcctcttgcctagtgcccacagtagctcaataccgattctatctttccttcgaaaacagtcagcacagggactatattactgagaaattctggcggaacgccttggttgccggaaccgtgccagtggtgctgggtcctcccagggccacttatgaggccttcgtgcccgctgacgctttcgtgcatgtggatgatttcggcagcgccagggagctcgccgcattcctgacgggcatgaacgagtcgcgctaccaacgctttttcgcctggcgcgaccggctccgcgtgaggcttttcactgactggagggaaaggttttgcgcaatatgcgaccggtatccacacctgcctaggtctcaggtgtatgaggacctggaaggctggtttcaggcctag

SEQ ID NO: 146650 - DNA, 1029 bp, Artificial Sequence
  derived and/or modified sequence
atgaacaacgccggccacggccccaccagaagactgagaggcctgggcgtgctggccggcgtggccctgctggccgccctgtggctgctgtggctgctgggcagcgcccccagaggcacccccgccccccagcccaccatcaccatcctggtgtggcactggcccttcaccgaccagccccccgagctgcccagcgacacctgcaccagatacggcatcgccagatgccacctgagcgccaacagaagcctgctggccagcgccgacgccgtggtgttccaccacagagagctgcagaccagaagaagccacctgcccctggcccagagacccagaggccagccctgggtgtgggccagcatggagagccccagccacacccacggcctgagccacctgagaggcatcttcaactgggtgctgagctacagaagagacagcgacatcttcgtgccctacggcagactggagccccactggggccccagcccccccctgcccgccaagagcagagtggccgcctgggtggtgagcaacttccaggagagacagctgagagccagactgtacagacagctggccccccacctgagagtggacgtgttcggcagagccaacggcagacccctgtgcgccagctgcctggtgcccaccgtggcccagtacagattctacctgagcttcgagaacagccagcacagagactacatcaccgagaagttctggagaaacgccctggtggccggcaccgtgcccgtggtgctgggcccccccagagccacctacgaggccttcgtgcccgccgacgccttcgtgcacgtggacgacttcggcagcgccagagagctggccgccttcctgaccggcatgaacgagagcagataccagagattcttcgcctggagagacagactgagagtgagactgttcaccgactggagagagagattctgcgccatctgcgacagatacccccacctgcccagaagccaggtgtacgaggacctggagggctggttccaggcctag

SEQ ID NO: 146651 - DNA, 1239 bp, Artificial Sequence
  derived and/or modified sequence
atgacagacttatactaccttagccagactgatggtgccggtgactggagagagaaagaggctaaggatctaacagagctggtgcagcggcggatcacttatctacaaaatccaaaggattgttcgaaagctaaaaagcttgtgtgtaacatcaacaagggatgtggctacgggtgccaactgcaccatgtcgtgtactgtttcatgattgcttacggtacccagcggaccctgatcctcgagtcacagaactggagatacgccacaggaggctgggaaaccgtgtttcgaccagtgtctgagacatgcacagaccgctcaggtatatcaaccggacactggtcgggggaggtgaaggataagaatgttcaagtggtggagctcccaattgttgacagcctccatcctaggcccccgtatctgccgctcgctgtgcccgaagacctagcagataggctggttcgcgtgcatggcgaccctgcagtttggtgggtcagtcagtttgtgaagtacctgatccggccccagccctggttggaaaaggaaatagaagaggcgactaaaaagctggggttcaaacatccagtcattggggtgcacgtcaggaggacggacaaggttggcacggaagccgcttttcaccccatcgaagaatacatggtccatgtggaagaacatttccagcttcttgcgaggaggatgcaagtagacaagaagcgggtgtacctggccactgacgacccatctctgctcaaggaggctaaaacgaaataccctaactacgagtttatttccgataacagcatctcttggtcagcaggcttacataatcgctacactgagaattccctgcggggcgtcattcttgacatccatttccttagtcaggcagattttttggtgtgcacctttagcagccaggtctgtcgagtcgcttacgagatcatgcagaccttacatcctgacgcatcagccaattttcacagcctagacgatatctactacttcgggggccaaaatgcccacaatcagattgccatttacgcccaccagccgcggaccgccgacgaaattcccatggaacctggcgacattatcggagttgcagggaaccactgggatggatattcaaaaggggtcaatcgtaaactcggtaggacaggcctgtacccctcttacaaagtgagagaaaaaattgaaactgtgaagtatccgacctatccagaggccgagaagtag

SEQ ID NO: 146652 - DNA, 1239 bp, Artificial Sequence
  derived and/or modified sequence
atgacagacctgtactacctgagccagacagatggagctggggactggagggagaaggaggccaaggacctgacagagctggtgcagaggcgcatcacctacctgcagaaccccaaggactgcagcaaggccaagaagctggtgtgcaacatcaacaagggctgcggctacggctgccagctgcaccacgtggtgtactgcttcatgattgcctacggcacccagaggaccctcatcctggagagccagaactggaggtatgccactggaggctgggagaccgtcttccggcctgtgtctgagacctgcacagacagaagtggcatcagcacaggccactggagcggggaggtgaaggacaagaatgtgcaggtggtggagctgcccatcgtggacagcctgcacccccggcccccctacctgcccctggccgtgcctgaggacctggccgaccggctggtgcgggtgcatggagaccctgctgtgtggtgggtgtcccagtttgtgaagtacctgatccggccccagccctggctggagaaggagattgaggaggccaccaagaagctgggcttcaagcaccctgtgattggagtgcacgtgcggaggacagacaaggtgggcacagaagctgccttccaccccatcgaggagtacatggtgcacgtggaggagcacttccagctgctggcccggaggatgcaggtggacaagaagagggtgtacctggccacagatgaccccagcctgctgaaggaggccaagaccaagtaccccaactatgagttcatcagtgacaacagcatctcctggagcgctggcctgcacaaccgctacacagagaacagcctgcggggcgtcatcctggacatccacttcctgagccaggccgacttcctggtgtgcaccttcagcagccaggtgtgccgggtggcctatgagatcatgcagaccctgcacccagatgccagcgccaacttccacagcctggatgacatctactactttggaggccagaatgcccacaaccagatcgccatctatgcccaccagcccaggacagcagatgagatccccatggagcccggggacatcatcggcgtggccggcaaccactgggatggctacagcaagggcgtgaacaggaagctgggccgcacaggcctgtaccccagctacaaggtgcgggagaagattgaaacagtgaagtaccccacctacccagaggccgagaagtag

SEQ ID NO: 146653 - DNA, 1239 bp, Artificial Sequence
  derived and/or modified sequence
atgaccgacctgtactacctgagccagaccgacggcgccggcgactggcgggagaaagaggccaaagacctgaccgagcttgtacagagaagaataacgtatctgcagaatcccaaagactgtagtaaggctaagaagctagtatgcaacataaacaaggggtgtggctacggttgtcagctgcatcacgtggtgtactgctttatgatcgcctacggtacacagcgcaccctcattctggagtcccagaactggcggtatgctacgggagggtgggagacagtgttcagaccagtgtcggagacttgcactgacaggagcggaatctctactgggcactggtcaggcgaggtgaaggacaaaaacgttcaggtggttgaactgcctattgttgatagcctgcatccccgcccaccatacttgcccctggctgttccggaggacctggcggaccgcctggtgcgggtgcatggcgacccagcagtatggtgggtatcccagtttgtcaagtaccttatcaggccacagccctggctcgagaaagagatagaggaagcaactaaaaagctcggattcaaacaccctgtcatcggggttcacgtgaggagaacggacaaagtgggcacagaggctgcatttcacccaatcgaggagtacatggtgcacgtcgaagagcacttccagcttttggctaggcgcatgcaggtcgacaagaaacgcgtatatctagccacggatgatccctctttgctcaaagaggcaaaaaccaagtacccgaactacgagttcatttccgacaattctatctcctggtccgctggccttcacaaccgttacacagagaacagcctcaggggtgtgattttggatatccacttccttagccaggccgactttctggtctgcacgttctcaagccaagtatgcagggtggcatacgaaatcatgcagaccctgcatcctgacgcctcggcgaatttccattcactggacgacatctactatttcgggggacaaaatgcacacaatcagatagccatctatgctcatcagcccaggacagctgacgaaatacccatggaacctggagacattattggcgtcgcgggcaatcactgggacggatattccaaaggcgtgaaccgaaaacttggccgcactggactgtacccttcctataaagtgagagagaagatcgaaaccgtgaagtatcccacgtacccagaggcagaaaagtag

SEQ ID NO: 146654 - DNA, 1239 bp, Artificial Sequence
  derived and/or modified sequence
atgacagatctgtactacctgagccagactgacggcgcaggggattggagggagaaagaggcaaaggacctgactgagttagtgcagcgccgtattacttaccttcagaatcccaaagactgctctaaagcgaagaagcttgtgtgtaacattaataaaggttgcggatacggatgtcaactgcaccatgtggtgtattgttttatgatcgcctacggaactcaaaggaccctgatcctcgagtcccaaaactggcgctatgcaactggaggatgggaaacggtgttcaggcctgtttcagagacttgtacagatcgctccggtattagcaccgggcactggtcaggggaagtgaaggataagaacgtacaagtggttgagttgccaatcgtcgatagcttgcaccctcgaccaccttaccttccattagcggtacctgaagacttggccgaccgattagttagggttcacggtgatccagcagtctggtgggtctcacagttcgtgaaatacctgattaggccccagccgtggctggagaaggaaattgaggaagcaacaaaaaaactgggttttaagcacccggtaattggtgtgcatgtgcgacggaccgataaagttggcacagaggctgcgtttcatcccatagaggaatacatggtgcacgtagaggaacacttccaacttttggccaggagaatgcaagtagataaaaagagggtctatctggctaccgacgatccctctctactcaaagaagccaagacaaaataccccaactatgaattcatctctgataattctatcagctggtccgcagggctgcacaacagatacactgaaaattcgctccggggagttattttggacatacatttcctgtcccaggctgactttctggtgtgtacgttcagctcacaagtttgtcgtgtagcatacgagatcatgcaaacactgcacccagatgcttccgcgaattttcacagtctggacgatatatactatttcggcggacagaacgcccacaatcagatagctatttacgcgcaccaacctagaacggctgatgagataccaatggagcccggagatatcatcggcgttgccggaaatcattgggacgggtatagcaagggagtcaataggaaacttggcagaaccggtctgtaccccagttataaagtaagggagaagattgaaactgtaaagtatcccacctatccagaggctgaaaagtag

SEQ ID NO: 146655 - DNA, 1239 bp, Artificial Sequence
  derived and/or modified sequence
atgaccgacctgtactacctgagccagaccgacggcgccggcgactggagagagaaggaggccaaggacctgaccgagctggtgcagagaagaatcacctacctgcagaaccccaaggactgcagcaaggccaagaagctggtgtgcaacatcaacaagggctgcggctacggctgccagctgcaccacgtggtgtactgcttcatgatcgcctacggcacccagagaaccctgatcctggagagccagaactggagatacgccaccggcggctgggagaccgtgttcagacccgtgagcgagacctgcaccgacagaagcggcatcagcaccggccactggagcggcgaggtgaaggacaagaacgtgcaggtggtggagctgcccatcgtggacagcctgcaccccagacccccctacctgcccctggccgtgcccgaggacctggccgacagactggtgagagtgcacggcgaccccgccgtgtggtgggtgagccagttcgtgaagtacctgatcagaccccagccctggctggagaaggagatcgaggaggccaccaagaagctgggcttcaagcaccccgtgatcggcgtgcacgtgagaagaaccgacaaggtgggcaccgaggccgccttccaccccatcgaggagtacatggtgcacgtggaggagcacttccagctgctggccagaagaatgcaggtggacaagaagagagtgtacctggccaccgacgaccccagcctgctgaaggaggccaagaccaagtaccccaactacgagttcatcagcgacaacagcatcagctggagcgccggcctgcacaacagatacaccgagaacagcctgagaggcgtgatcctggacatccacttcctgagccaggccgacttcctggtgtgcaccttcagcagccaggtgtgcagagtggcctacgagatcatgcagaccctgcaccccgacgccagcgccaacttccacagcctggacgacatctactacttcggcggccagaacgcccacaaccagatcgccatctacgcccaccagcccagaaccgccgacgagatccccatggagcccggcgacatcatcggcgtggccggcaaccactgggacggctacagcaagggcgtgaacagaaagctgggcagaaccggcctgtaccccagctacaaggtgagagagaagatcgagaccgtgaagtaccccacctaccccgaggccgagaagtag

SEQ ID NO: 146656 - protein, 571 aa, Artificial Sequence
  derived and/or modified sequence
MRRRSRMLLCFAFLWVLGIAYYMYSGGGSALAGGAGGGAGRKEDWNEIDPIKKKDLHHSNGEEKAQSMETLPPGKVRWPDFNQEAYVGGTMVRSGQDPYARNKFNQVESDKLRMDRAIPDTRHDQCQRKQWRVDLPATSVVITFHNEARSALLRTVVSVLKKSPPHLIKEIILVDDYSNDPEDGALLGKIEKVRVLRNDRREGLMRSRVRGADAAQAKVLTFLDSHCECNEHWLEPLLERVAEDRTRVVSPIIDVINMDNFQYVGASADLKGGFDWNLVFKWDYMTPEQRRSRQGNPVAPIKTPMIAGGLFVMDKFYFEELGKYDMMMDVWGGENLEISFRVWQCGGSLEIIPCSRVGHVFRKQHPYTFPGGSGTVFARNTRRAAEVWMDEYKNFYYAAVPSARNVPYGNIQSRLELRKKLSCKPFKWYLENVYPELRVPDHQDIAFGALQQGTNCLDTLGHFADGVVGVYECHNAGGNQEWALTKEKSVKHMDLCLTVVDRAPGSLIKLQGCRENDSRQKWEQIEGNSKLRHVGSNLCLDSRTAKSGGLSVEVCGPALSQQWKFTLNLQQ

SEQ ID NO: 146657 - protein, 265 aa, Artificial Sequence
  derived and/or modified sequence
MVRSGQDPYARNKFNQVESDKLRMDRAIPDTRHDQCQRKQWRVDLPATSVVITFHNEARSALLRTVVSVLKKSPPHLIKEIILVDDYSNDPEDGALLGKIEKVRVLRNDRREGLMRSRVRGADAAQAKVLTFLDSHCECNEHWLEPLLERVAEDRTRVVSPIIDVINMDNFQYVGASADLKGGFDWNLVFKWDYMTPEQRRSRQGNPVAPIKDLVPRVAVWWQPGDHPVQPCGTRVPEAAPLHVPGWQWHCLCPKHPPGSRGLDG

SEQ ID NO: 146658 - DNA, 1716 bp, Artificial Sequence
  derived and/or modified sequence
atgagaagaagaagcagaatgctgctgtgcttcgccttcctgtgggtgctgggcatcgcctactacatgtacagcggcggcggcagcgccctggccggcggcgccggcggcggcgccggcagaaaggaggactggaacgagatcgaccccatcaagaagaaggacctgcaccacagcaacggcgaggagaaggcccagagcatggagaccctgccccccggcaaggtgagatggcccgacttcaaccaggaggcctacgtgggcggcaccatggtgagaagcggccaggacccctacgccagaaacaagttcaaccaggtggagagcgacaagctgagaatggacagagccatccccgacaccagacacgaccagtgccagagaaagcagtggagagtggacctgcccgccaccagcgtggtgatcaccttccacaacgaggccagaagcgccctgctgagaaccgtggtgagcgtgctgaagaagagccccccccacctgatcaaggagatcatcctggtggacgactacagcaacgaccccgaggacggcgccctgctgggcaagatcgagaaggtgagagtgctgagaaacgacagaagagagggcctgatgagaagcagagtgagaggcgccgacgccgcccaggccaaggtgctgaccttcctggacagccactgcgagtgcaacgagcactggctggagcccctgctggagagagtggccgaggacagaaccagagtggtgagccccatcatcgacgtgatcaacatggacaacttccagtacgtgggcgccagcgccgacctgaagggcggcttcgactggaacctggtgttcaagtgggactacatgacccccgagcagagaagaagcagacagggcaaccccgtggcccccatcaagacccccatgatcgccggcggcctgttcgtgatggacaagttctacttcgaggagctgggcaagtacgacatgatgatggacgtgtggggcggcgagaacctggagatcagcttcagagtgtggcagtgcggcggcagcctggagatcatcccctgcagcagagtgggccacgtgttcagaaagcagcacccctacaccttccccggcggcagcggcaccgtgttcgccagaaacaccagaagagccgccgaggtgtggatggacgagtacaagaacttctactacgccgccgtgcccagcgccagaaacgtgccctacggcaacatccagagcagactggagctgagaaagaagctgagctgcaagcccttcaagtggtacctggagaacgtgtaccccgagctgagagtgcccgaccaccaggacatcgccttcggcgccctgcagcagggcaccaactgcctggacaccctgggccacttcgccgacggcgtggtgggcgtgtacgagtgccacaacgccggcggcaaccaggagtgggccctgaccaaggagaagagcgtgaagcacatggacctgtgcctgaccgtggtggacagagcccccggcagcctgatcaagctgcagggctgcagagagaacgacagcagacagaagtgggagcagatcgagggcaacagcaagctgagacacgtgggcagcaacctgtgcctggacagcagaaccgccaagagcggcggcctgagcgtggaggtgtgcggccccgccctgagccagcagtggaagttcaccctgaacctgcagcagtag

SEQ ID NO: 146659 - DNA, 1716 bp, Artificial Sequence
  derived and/or modified sequence
atgagaagaagaagccgtatgcttctgtgcttcgcgttcctgtgggtcttagggatcgcttactacatgtacagcggcggtgggtccgcgctcgcagggggggccggcgggggtgccggcagaaaggaagattggaacgagattgatcctatcaaaaaaaaggatctacaccatagtaatggcgaggaaaaggcacagtcaatggagacactcccaccaggcaaggtgcggtggcccgatttcaaccaggaggcttatgtaggaggcaccatggtgagatccggccaggatccttacgcccgtaataagttcaatcaagtcgagagcgataagctccgaatggatagggccatccctgacacaaggcacgatcaatgtcaaagaaagcagtggcgggttgacctccccgccactagtgtggttatcacattccacaatgaagcaaggtcagccctgctgagaacggtggtgagcgtgttgaagaaatctccgccacacctgatcaaggagattattttagttgatgactactccaatgaccccgaagatggggcgttgcttggaaagatcgagaaggtacgcgtcctgcgcaacgacaggcgcgaggggctgatgaggtcgagggtccgaggtgcggacgctgcccaggccaaagtactcaccttcctcgactctcactgtgagtgcaatgagcactggctagagcctctcttggagcgcgtggcagaagaccgcacccgcgtcgtgagtcccatcattgatgtcattaatatggataattttcagtatgtgggtgctagcgctgacctgaagggcggcttcgactggaacctcgtctttaagtgggactatatgacccccgagcaaaggaggtctaggcagggaaatcccgtggctccaatcaagactccaatgattgcaggtggactcttcgtgatggataagttttacttcgaggagctggggaaatacgatatgatgatggatgtctggggtggagaaaacttggaaatcagcttcagggtgtggcagtgtgggggctccctggagataattccctgttctagggtagggcatgtgtttaggaaacagcatccttatacatttcccgggggatctggtacagttttcgctaggaacacaagacgggcagccgaagtatggatggacgagtacaaaaacttctactatgctgctgtgccctcagcccgcaacgtgccctatgggaacattcaatcaagactggagctcagaaagaagctctcgtgtaagccattcaagtggtatctggagaatgtatacccagagttgcgcgtgcccgaccaccaggacatcgctttcggcgccctgcagcagggcaccaactgcctcgacacactgggccacttcgccgacggtgtcgtgggagtatatgagtgtcacaatgcgggaggcaaccaagagtgggccctgacaaaggagaagagtgtgaaacatatggacctgtgccttaccgtagttgatcgggcaccgggatctctcattaagcttcagggttgtcgggagaacgactcccggcagaaatgggagcagatcgaggggaatagtaaattaagacatgttggttccaacttgtgcttagacagccggaccgccaagtccgggggtctgagtgtggaggtctgcgggccggcgttatcacagcagtggaagtttacattgaatctgcaacagtag

SEQ ID NO: 146660 - DNA, 1716 bp, Artificial Sequence
  derived and/or modified sequence
atgagaagaagaagcaggatgctgctgtgctttgccttcctgtgggtgctgggcatcgcctactacatgtacagcggcggcggcagcgccctggccggcggggccggcggcggggccggcaggaaagaagactggaatgaaattgaccccatcaagaagaaggacctgcaccacagcaatggagaggagaaggcccagagcatggagaccctgcccccaggcaaggtgcgctggccagacttcaaccaggaggcctacgtgggcggcaccatggtgcgcagcggccaggacccctatgccaggaacaagttcaaccaggtggagagtgacaagctgaggatggaccgggccatcccagacaccaggcatgaccagtgccagaggaagcagtggagggtggacctgcctgccacctctgtggtgatcaccttccacaatgaggcccggagcgccctgctgaggacagtggtgtctgtgctgaagaagagccccccccacctgatcaaggagatcatcctggtggatgactacagcaatgaccctgaagatggagccctgctgggcaagattgagaaggtgcgggtgctgagaaatgaccggcgggagggcctgatgaggagccgggtgagaggagcagatgctgcccaggccaaggtgctgaccttcctggacagccactgtgagtgcaatgagcactggctggagcccctgctggagcgggtggccgaggacaggaccagggtggtgagccccatcattgatgtgatcaacatggacaacttccagtatgtgggcgccagcgctgacctgaagggcggctttgactggaacctggtgttcaagtgggactacatgaccccagagcagaggaggagccggcagggcaaccctgtggcccccatcaagacccccatgattgctgggggcctgtttgtgatggacaagttctactttgaggagctgggcaagtatgacatgatgatggatgtgtggggcggggagaacctggagatctccttccgggtgtggcagtgtggcggcagcctggagatcatcccctgcagccgggtgggccacgtgttcaggaagcagcacccctacaccttccctgggggcagcggcaccgtgtttgccaggaacacccggcgggctgctgaggtgtggatggatgagtacaagaacttctactatgctgctgtgcccagcgccagaaatgtgccctacggcaacatccagagccggctggagctgaggaagaagctgagctgcaagcccttcaagtggtacctggagaatgtgtacccagagctgcgggtgcctgaccaccaggacatcgcctttggagccctgcagcagggcaccaactgcctggacaccctgggccactttgctgatggagtggtgggcgtgtatgagtgccacaatgctgggggcaaccaggagtgggccctgaccaaggagaagtctgtgaagcacatggacctgtgcctgactgtggtggaccgggcccctggcagcctcatcaagctgcagggctgcagagaaaatgacagccggcagaagtgggagcagatcgagggcaacagcaagctgcggcacgtgggcagcaacctgtgcctggacagcaggacagccaagagcggcggcctgtctgtggaggtgtgtggccctgccctgagccagcagtggaagttcaccctgaacctgcagcagtag

SEQ ID NO: 146661 - DNA, 1716 bp, Artificial Sequence
  derived and/or modified sequence
atgcggcggcggagccggatgctgctgtgcttcgccttcctgtgggttctgggcatcgcttattatatgtactccgggggcggaagcgctctggccggcggggcaggcggtggagccgggcgcaaagaggactggaatgaaatagatccaattaaaaagaaggacttacatcactccaacggcgaggagaaggcccagtccatggagacactgccgccaggtaaggtgagatggcctgacttcaatcaggaagcttacgtcgggggcacgatggttaggtcgggccaggatccctacgcccggaacaagttcaaccaggtggaaagtgataaattgcgaatggaccgcgccatccctgacacacggcacgaccaatgccagcgcaaacaatggcgcgtggacctcccggccacctcagtggtgatcacctttcacaacgaggcccgatccgcactgcttcggacggtggtctccgtccttaagaagtcgcctccacaccttattaaagaaatcattttggtcgacgattactcaaatgatccagaagacggagctctgctcgggaagattgagaaagtacgtgttttgcgaaacgatcggcgggaaggactgatgcgtagcagagtgcgtggagccgacgctgcccaggccaaggtcctgacattcctggactctcattgcgagtgtaacgaacattggcttgagcccctgttggagcgggttgccgaagacagaacgcgagttgtaagcccaatcattgatgttattaacatggacaactttcaatacgtaggggcatcagcggaccttaaggggggcttcgattggaacctggtgttcaagtgggattacatgacccctgagcaaagacgctctcgccagggcaatcccgtggcccccataaagaccccgatgattgccggcggactattcgtcatggacaaattttactttgaggaactagggaagtatgacatgatgatggacgtgtggggcggggaaaatttggaaatcagttttcgggtttggcagtgtggaggctccctggagattattccctgttcgcgtgtcggacacgtgtttcggaagcagcatccctacacattccctggaggcagtgggactgtattcgctcgaaatacccgccgcgccgcagaagtgtggatggacgagtacaaaaacttctattatgcagcggtcccctcagccaggaacgtaccatatgggaacattcaaagtcgccttgaattacgcaagaagctgtcatgcaaacctttcaagtggtacctagaaaacgtgtaccccgagcttcgggtgccagatcatcaggacatcgccttcggggctctgcaacaaggcaccaattgcctagacaccctgggacactttgccgacggcgttgtgggtgtatacgaatgccacaatgcaggcggcaaccaggagtgggctctgacaaaggaaaagagtgtcaagcatatggacctttgcctcacggtagtagacagggcgccaggatcactaataaaacttcaggggtgcagagagaatgactcccggcagaagtgggagcaaattgagggaaatagtaagttgcgccatgtgggatctaacttatgccttgactctcggacggccaagtcaggaggtttaagcgtggaagtatgcggcccagctctgagccagcagtggaagtttaccctgaacctccagcagtag

SEQ ID NO: 146662 - DNA, 1716 bp, Artificial Sequence
  derived and/or modified sequence
atgcggaggaggtccaggatgctgctgtgtttcgcatttctttgggtcctgggtatcgcctactatatgtattccggcggagggtcagcactggccggaggagctggcggaggtgctgggagaaaggaggactggaacgagatcgatcccattaagaagaaggatctgcaccactcaaacggtgaggagaaggctcaatcaatggagacactccccccagggaaagtgaggtggccagactttaaccaagaggcctatgtgggcggaaccatggtcagatccgggcaggacccatatgccaggaacaaattcaatcaagttgagagcgataagctcaggatggaccgcgcaattcctgatactaggcatgaccaatgccagcgcaagcaatggagggtcgaccttcccgctacctccgtggtgattacattccataacgaagccaggtctgctctgttaaggactgttgtgtccgtcctgaagaagtctcctccccatcttatcaaagagatcattttggtcgacgactattcaaacgatccagaagacggagcgctactaggaaagattgagaaagtgcgggtactgcgcaacgacaggcgggaagggttgatgcggagcagagtgcgtggcgctgacgccgcacaggccaaggtgcttaccttccttgactcccactgtgagtgcaatgagcattggttagaaccacttctggagagggtggcagaggatcggacccgcgtcgtttcaccgatcatcgacgtaatcaacatggacaattttcagtacgtgggcgcttccgcagacctgaagggaggatttgactggaatctcgtctttaaatgggactacatgacacccgaacagcggaggtccagacagggtaatcctgtagccccaattaaaacgcctatgatcgccggtggcctttttgtaatggacaaattttacttcgaggaactagggaagtacgacatgatgatggacgtttggggcggagagaatctggagatctcgtttagggtctggcagtgcggtggcagcctggagattataccatgttctagagtcggtcatgtgtttcgaaaacagcacccttatacatttcccggtgggtccggaactgtgtttgcccgtaatacccggagggccgctgaggtgtggatggatgagtataagaacttctactacgccgcagttccttccgccagaaatgtgccctacgggaacatccagtcacgtctggaactcagaaaaaaactgtcctgcaagccctttaagtggtacttagagaatgtctacccagaattaagagttcctgaccaccaggacattgcatttggagcacttcagcagggaacgaattgcctagatactctgggccatttcgccgacggcgtggttggcgtgtacgagtgtcataatgccggaggtaaccaggaatgggctctcacaaaggagaaatccgttaagcatatggatctttgcttgaccgtagtcgatcgggctccagggtccttgattaagttacaggggtgcagagagaatgattcccgccaaaagtgggagcagatagaaggaaattcaaagttaaggcatgtgggttccaatctgtgcttagattctcgtactgcaaaatccgggggtttatcagtggaagtttgcgggccagccctcagccagcagtggaagtttacgctgaatctgcagcagtag

SEQ ID NO: 146663 - DNA, 4454 bp, Artificial Sequence
  derived and/or modified sequence
ccaccgcgcccgcggccggcccaggcagcactcgcgagcagcggcggccccgccggcggccgagttgggagaatgcggcggcgctcgcggatgctgctctgcttcgccttcctgtgggtgctgggcatcgcctactacatgtactcggggggcggctctgcgctggccgggggcgcgggcggcggcgccggcaggaaggaggactggaatgaaattgaccccattaaaaagaaagaccttcatcacagcaatggagaagagaaagcacaaagcatggagaccctccctccagggaaagtacggtggccagactttaaccaggaagcttatgttggagggacgatggtccgctccgggcaggacccttacgcccgcaacaagttcaaccaggtggagagtgataagcttcgaatggacagagccatccctgacacccggcatgaccagtgtcagcggaagcagtggcgggtggatctgccggccaccagcgtggtgatcacgtttcacaatgaagccaggtcggccctactcaggaccgtggtcagcgtgcttaagaaaagcccgccccatctcataaaagaaatcatcttggtggatgactacagcaatgatcctgaggacggggctctcttggggaaaattgagaaagtgcgagttcttagaaatgatcgacgagaaggcctcatgcgctcacgggttcggggggccgatgctgcccaagccaaggtcctgaccttcctggacagtcactgcgagtgtaatgagcactggctggagcccctcctggaaagggtggcggaggacaggactcgggttgtgtcacccatcatcgatgtcattaatatggacaactttcagtatgtgggggcatctgctgacttgaagggcggttttgattggaacttggtattcaagtgggattacatgacgcctgagcagagaaggtcccggcaggggaacccagtcgcccctataaaaacccccatgattgctggtgggctgtttgtgatggataagttctattttgaagaactggggaagtacgacatgatgatggatgtgtggggaggagagaacctagagatctcgttccgcgtgtggcagtgtggtggcagcctggagatcatcccgtgcagccgtgtgggacacgtgttccggaagcagcacccctacacgttcccgggtggcagtggcactgtctttgcccgaaacacccgccgggcagcagaggtctggatggatgaatacaaaaatttctattatgcagcagtgccttctgctagaaacgttccttatggaaatattcagagcagattggagcttaggaagaaactcagctgcaagcctttcaaatggtaccttgaaaatgtctatccagagttaagggttccagaccatcaggatatagcttttggggccttgcagcagggaactaactgcctcgacactttgggacactttgctgatggtgtggttggagtttatgaatgtcacaatgctgggggaaaccaggaatgggccttgacgaaggagaagtcggtgaagcacatggatttgtgccttactgtggtggaccgggcaccgggctctcttataaagctgcagggctgccgagaaaatgacagcagacagaaatgggaacagatcgagggcaactccaagctgaggcacgtgggcagcaacctgtgcctggacagtcgcacggccaagagcgggggcctaagcgtggaggtgtgtggcccggccctttcgcagcagtggaagttcacgctcaacctgcagcagtaggagggtccgggaggccctgccgtcctgtctcctgcaccattgggtggagtctggtgatcacattattgattatgtttcttaaactttccgcgaaactaatatacctcagtattccatcatggtctgaaagtcaaacttcggcaaggcacggacgactgtgcagacacagcagcggcaagaagcgagaactgccctccccctcctctcggtgcagcccagccgggcccccttccccaggccggagcgcccctcttccttccagctttcacttctgccggctccgcaactgagtgacacccagcgacaaccgactggggagtggtagaagcaactgaacggatgcgtgcgagctgaggacagggcgggaggagggggcacacatgccccaggggagcgaggagaactcttgaaatctccattttcaatcccttcgaaatcacgtatggtttccacaaagccgagtcgtgtcacgtggcaggtttacgtcaatagtccctctctctgctcctccattcgcaagtgtcttcctgggccagactcccctccacctcatgtacttgctatattgaggatgaagttttctatggtgggacactaaatataaagctatatagagaaagaatgtacggtcagttccctatggtttctgtagatcatcgtcatcttgtatattccccacaaagccgttcgcagcttccgggagaaggggccagagcccggtggggccagtttctcacagagggaggaggtggcctttgtcccctggagcccgatcagccagttggtgctactgctgtggccagctggggggcttcctccagaccaccggcctcggccccggcatccctgttgggcgtcagcctgagagtccctactgtgcgtcagaatccaccttgcgtgctgtgcgtatctgtgaacctggagcggttacttattttgacagatatcactttgggtctttttacattaaatttcttttctctaaggaatataagacataccccatagctctgtgtgagccagcaataccgctgccccctggcgacagggcagaccaatgatgccaggcagctgtcacacgctagtattggcttcattgtgatctgagccctgcacgctgggccttcagaattaatggccagcagtgtcagggatgagcccgtcagccagggcacaggcctggctcacagtcctgcacacctgctggcctggggagctccagccaggcagcgagtcctgccccgcccgcagctccctcccacaccccgcctggccaagatgactgcttcagggggctttggggaaagaattaggaagggtcagaaccaaacaatacctgctcatttacactgaggattcagggcgggagacaggagccttggggtcctgttaaaccacagacagttatgaactgaaagtcataacggggagaggtgcctggcttctacctgggtgctcaggaatgttcctcgtcacccctgccactctgtggtcggtgccctgcttcctcctccactcctggccgccttctccagcgccgcacacacagatgctcagtctcagagaggctggcacggcctggcagtctgagaaaagcgtcagttaggcacacctgcaggcccctcggtgggacagcggcggccttggagttaggagccaccctgggaggttgtgccggtgccatgctcctccctgtgtcttgtatgaaaggggccactgtgtgtcttcctccccggcgggagccccacatgtgtgcactgtaggacagcggccccgaggtggaagcctggctggagggctgccctataggtcttctcttcccgcctcccctgccatgcaaccagatgtgttgtgagtgggcagcgtgcccccacgctggagtaactccgcacgcttctgtctttcacggtgggcgctcggggggagcctgaggaaaacccccttaggtacctgtgcgaggctgtggagtgcaggccagagcagggtgtgcgtagcccccagcacccaggttcttctgtcagaccctgtgacctgcgagctgctactactgtaaggagggaaatggatgaatctggctcgttttaaaatcacgttttctgacgaatcctttgccccttcacctttaccccgcccgcacccctaggccctctcagccttcctatcatcccacgtgtctacccagacccttgtgcggcccatgccctgggggcggcgtcctgtccctgagctgggaggcggctttggatggtccgggcgtcaagagcaggggtgggccggggaggggtcctttgcggtgagctatgtttacatgacacagtgtgccaaagtgacttactgcggttgcgttagtttttaatcatcaggactatctcaccctcccactcctgtttttaaaactcagaattctttcctaagagcccttcgagcaaagcgtgccgaagttagttgtcttctctgtgctggtcctttcttatgtcctcataaaagctcagatgatggtatctgtgagtatgttttgcaaattcaaaatatagtttggtaatttttttttccagttgatttttaaaaagaactgctgtacagagcttgtactttgtccattttatagatggaaaccatccttgaaaattgtttaacttaaataaagagaagatactttctagata

SEQ ID NO: 146664 - DNA, 1341 bp, Artificial Sequence
  derived and/or modified sequence
agttgggagaatgcggcggcgctcgcggatgctgctctgcttcgccttcctgtgggtgctgggcatcgcctactacatgtactcggggggcggctctgcgctggccgggggcgcgggcggcggcgccggcaggaagggaaagtacggtggccagactttaaccaggaagcttatgttggagggacgatggtccgctccgggcaggacccttacgcccgcaacaagttcaaccaggtggagagtgataagcttcgaatggacagagccatccctgacacccggcatgaccagtgtcagcggaagcagtggcgggtggatctgccggccaccagcgtggtgatcacgtttcacaatgaagccaggtcggccctactcaggaccgtggtcagcgtgcttaagaaaagcccgccccatctcataaaagaaatcatcttggtggatgactacagcaatgatcctgaggacggggctctcttggggaaaattgagaaagtgcgagttcttagaaatgatcgacgagaaggcctcatgcgctcacgggttcggggggccgatgctgcccaagccaaggtcctgaccttcctggacagtcactgcgagtgtaatgagcactggctggagcccctcctggaaagggtggcggaggacaggactcgggttgtgtcacccatcatcgatgtcattaatatggacaactttcagtatgtgggggcatctgctgacttgaagggcggttttgattggaacttggtattcaagtgggattacatgacgcctgagcagagaaggtcccggcaggggaacccagtcgcccctataaaagatctcgttccgcgtgtggcagtgtggtggcagcctggagatcatcccgtgcagccgtgtgggacacgtgttccggaagcagcacccctacacgttcccgggtggcagtggcactgtctttgcccgaaacacccgccgggcagcagaggtctggatggatgaatacaaaaatttctattatgcagcagtgccttctgctagaaacgttccttatggaaatattcagagcagattggagcttaggaagaaactcagctgcaagcctttcaaatggtaccttgaaaatgtctatccagagttaagggttccagaccatcaggatatagcttttggggccttgcagcagggaactaactgcctcgacactttgggacactttgctgatggtgtggttggagtttatgaatgtcacaatgctgggggaaaccaggaatgggccttgacgaaggagaagtcggtgaagcacatggatttgtgccttactgtggtggaccgggcaccgggctctcttataaagct

SEQ ID NO: 146665 - protein, 633 aa, Artificial Sequence
  derived and/or modified sequence
MAHLKRLVKLHIKRHYHKKFWKLGAVIFFFIIVLVLMQREVSVQYSKEESRMERNMKNKNKMLDLMLEAVNNIKDAMPKMQIGAPVRQNIDAGERPCLQGYYTAAELKPVLDRPPQDSNAPGASGKAFKTTNLSVEEQKEKERGEAKHCFNAFASDRISLHRDLGPDTRPPECIEQKFKRCPPLPTTSVIIVFHNEAWSTLLRTVHSVLYSSPAILLKEIILVDDASVDEYLHDKLDEYVKQFSIVKIVRQRERKGLITARLLGATVATAETLTFLDAHCECFYGWLEPLLARIAENYTAVVSPDIASIDLNTFEFNKPSPYGSNHNRGNFDWSLSFGWESLPDHEKQRRKDETYPIKTPTFAGGLFSISKEYFEYIGSYDEEMEIWGGENIEMSFRVWQCGGQLEIMPCSVVGHVFRSKSPHSFPKGTQVIARNQVRLAEVWMDEYKEIFYRRNTDAAKIVKQKAFGDLSKRFEIKHRLQCKNFTWYLNNIYPEVYVPDLNPVISGYIKSVGQPLCLDVGENNQGGKPLIMYTCHGLGGNQYFEYSAQHEIRHNIQKELCLHAAQGLVQLKACTYKGHKTVVTGEQIWEIQKDQLLYNPFLKMCLSANGEHPSLVSCNPSDPLQKWILSQND

SEQ ID NO: 146666 - protein, 464 aa, Artificial Sequence
  derived and/or modified sequence
MAHLKRLVKLHIKRHYHKKFWKLGAVIFFFIIVLVLMQREVSVQYSKEESRMERNMKNKNKMLDLMLEAVNNIKDAMPKMQIGAPVRQNIDAGERPCLQGYYTAAELKPVLDRPPQDSNAPGASGKAFKTTNLSVEEQKEKERGEAKHCFNAFASDRISLHRDLGPDTRPPECIEQKFKRCPPLPTTSVIIVFHNEAWSTLLRTVHSVLYSSPAILLKEIILVDDASVDEYLHDKLDEYVKQFSIVKIVRQRERKGLITARLLGATVATAETLTFLDAHCECFYGWLEPLLARIAENYTAVVSPDIASIDLNTFEFNKPSPYGSNHNRGNFDWSLSFGWESLPDHEKQRRKDETYPIKTPTFAGGLFSISKEYFEYIGSYDEEMEIWGGENIEMSFRVWQCGGQLEIMPCSVVGHVFRSKSPHSFPKGTQVIARNQVRLAEVWMDEYKEIFYRRNTDAAKIVKQ

SEQ ID NO: 146667 - DNA, 1902 bp, Artificial Sequence
  derived and/or modified sequence
atggcccacctgaagagactggtgaagctgcacatcaagagacactaccacaagaagttctggaagctgggcgccgtgatcttcttcttcatcatcgtgctggtgctgatgcagagagaggtgagcgtgcagtacagcaaggaggagagcagaatggagagaaacatgaagaacaagaacaagatgctggacctgatgctggaggccgtgaacaacatcaaggacgccatgcccaagatgcagatcggcgcccccgtgagacagaacatcgacgccggcgagagaccctgcctgcagggctactacaccgccgccgagctgaagcccgtgctggacagacccccccaggacagcaacgcccccggcgccagcggcaaggccttcaagaccaccaacctgagcgtggaggagcagaaggagaaggagagaggcgaggccaagcactgcttcaacgccttcgccagcgacagaatcagcctgcacagagacctgggccccgacaccagaccccccgagtgcatcgagcagaagttcaagagatgcccccccctgcccaccaccagcgtgatcatcgtgttccacaacgaggcctggagcaccctgctgagaaccgtgcacagcgtgctgtacagcagccccgccatcctgctgaaggagatcatcctggtggacgacgccagcgtggacgagtacctgcacgacaagctggacgagtacgtgaagcagttcagcatcgtgaagatcgtgagacagagagagagaaagggcctgatcaccgccagactgctgggcgccaccgtggccaccgccgagaccctgaccttcctggacgcccactgcgagtgcttctacggctggctggagcccctgctggccagaatcgccgagaactacaccgccgtggtgagccccgacatcgccagcatcgacctgaacaccttcgagttcaacaagcccagcccctacggcagcaaccacaacagaggcaacttcgactggagcctgagcttcggctgggagagcctgcccgaccacgagaagcagagaagaaaggacgagacctaccccatcaagacccccaccttcgccggcggcctgttcagcatcagcaaggagtacttcgagtacatcggcagctacgacgaggagatggagatctggggcggcgagaacatcgagatgagcttcagagtgtggcagtgcggcggccagctggagatcatgccctgcagcgtggtgggccacgtgttcagaagcaagagcccccacagcttccccaagggcacccaggtgatcgccagaaaccaggtgagactggccgaggtgtggatggacgagtacaaggagatcttctacagaagaaacaccgacgccgccaagatcgtgaagcagaaggccttcggcgacctgagcaagagattcgagatcaagcacagactgcagtgcaagaacttcacctggtacctgaacaacatctaccccgaggtgtacgtgcccgacctgaaccccgtgatcagcggctacatcaagagcgtgggccagcccctgtgcctggacgtgggcgagaacaaccagggcggcaagcccctgatcatgtacacctgccacggcctgggcggcaaccagtacttcgagtacagcgcccagcacgagatcagacacaacatccagaaggagctgtgcctgcacgccgcccagggcctggtgcagctgaaggcctgcacctacaagggccacaagaccgtggtgaccggcgagcagatctgggagatccagaaggaccagctgctgtacaaccccttcctgaagatgtgcctgagcgccaacggcgagcaccccagcctggtgagctgcaaccccagcgaccccctgcagaagtggatcctgagccagaacgactag

SEQ ID NO: 146668 - DNA, 1395 bp, Artificial Sequence
  derived and/or modified sequence
atggcccacctgaagagactggtgaagctgcacatcaagagacactaccacaagaagttctggaagctgggcgccgtgatcttcttcttcatcatcgtgctggtgctgatgcagagagaggtgagcgtgcagtacagcaaggaggagagcagaatggagagaaacatgaagaacaagaacaagatgctggacctgatgctggaggccgtgaacaacatcaaggacgccatgcccaagatgcagatcggcgcccccgtgagacagaacatcgacgccggcgagagaccctgcctgcagggctactacaccgccgccgagctgaagcccgtgctggacagacccccccaggacagcaacgcccccggcgccagcggcaaggccttcaagaccaccaacctgagcgtggaggagcagaaggagaaggagagaggcgaggccaagcactgcttcaacgccttcgccagcgacagaatcagcctgcacagagacctgggccccgacaccagaccccccgagtgcatcgagcagaagttcaagagatgcccccccctgcccaccaccagcgtgatcatcgtgttccacaacgaggcctggagcaccctgctgagaaccgtgcacagcgtgctgtacagcagccccgccatcctgctgaaggagatcatcctggtggacgacgccagcgtggacgagtacctgcacgacaagctggacgagtacgtgaagcagttcagcatcgtgaagatcgtgagacagagagagagaaagggcctgatcaccgccagactgctgggcgccaccgtggccaccgccgagaccctgaccttcctggacgcccactgcgagtgcttctacggctggctggagcccctgctggccagaatcgccgagaactacaccgccgtggtgagccccgacatcgccagcatcgacctgaacaccttcgagttcaacaagcccagcccctacggcagcaaccacaacagaggcaacttcgactggagcctgagcttcggctgggagagcctgcccgaccacgagaagcagagaagaaaggacgagacctaccccatcaagacccccaccttcgccggcggcctgttcagcatcagcaaggagtacttcgagtacatcggcagctacgacgaggagatggagatctggggcggcgagaacatcgagatgagcttcagagtgtggcagtgcggcggccagctggagatcatgccctgcagcgtggtgggccacgtgttcagaagcaagagcccccacagcttccccaagggcacccaggtgatcgccagaaaccaggtgagactggccgaggtgtggatggacgagtacaaggagatcttctacagaagaaacaccgacgccgccaagatcgtgaagcagtag

SEQ ID NO: 146669 - DNA, 78 bp, Artificial Sequence
  derived and/or modified sequence
atggcccacctgaagagactggtgaagctgcacatcaagagacactaccacaagaagttctggaagctgggcgcctag

SEQ ID NO: 146670 - DNA, 36 bp, Artificial Sequence
  derived and/or modified sequence
atggcccacctgaagagactggtgaagctgcactag

SEQ ID NO: 146671 - DNA, 1902 bp, Artificial Sequence
  derived and/or modified sequence
atggcccacctcaaaaggttagtcaaactgcatattaagagacactatcacaaaaaattctggaaactgggcgcggtcattttcttctttattatagtcctggtcttgatgcaacgtgaagtaagcgttcagtacagtaaggaggagagccggatggagagaaatatgaaaaataaaaataagatgctcgaccttatgcttgaagcggtgaataatattaaagatgctatgcctaagatgcagataggggccccagtgagacaaaatatagatgcgggcgaacggccttgtctgcagggttactataccgctgccgagctgaagcctgtcctggacagacctccacaggatagcaatgcgccgggcgcttcaggcaaggcttttaaaactactaatttaagcgtcgaagaacaaaaagaaaaagagagaggcgaagcaaagcactgctttaacgcctttgcttccgatcggatctcgctgcaccgggatcttggacccgacacacggccacctgaatgtattgagcaaaaattcaagagatgccctcccctgcccacaacctccgtcattatcgtcttccataacgaagcgtggtctacccttttaagaaccgtgcacagcgttctctactcatcacccgccattctcctgaaggaaataatcctggttgatgacgctagcgtcgacgaatatctgcatgataagctggacgaatacgtgaagcaattttctattgtcaagatagttcggcagcgggagcgaaaagggctcatcaccgccagactgctgggcgccactgtggctaccgctgaaacactgactttcctagacgcccactgtgaatgcttttacggatggctcgagccgctgctggctaggattgctgagaattacacagccgtggtgagccccgatattgccagcatcgatctcaacacttttgaattcaataaaccttctccatacggctccaaccacaatagagggaattttgactggtcactgagttttgggtgggaatcgctgccagaccatgagaagcagagaagaaaggacgaaacttatcccatcaagactcccacgttcgccggaggactcttcagcatttccaaagaatattttgaatatatcggtagctacgatgaggaaatggaaatctggggaggagagaacattgaaatgtcgttcagggtgtggcagtgcggcggccaactggagattatgccctgtagcgtggtggggcatgtcttcaggtctaaatcgccacattcctttccgaaaggtactcaggtgattgcccggaaccaggtccgcctggccgaggtttggatggacgaatacaaggaaatattctacaggagaaacactgacgcagccaagattgtcaagcagaaggccttcggcgatctgtctaagcgtttcgaaatcaaacataggctccagtgcaaaaactttacctggtatctaaataatatctacccagaggtttatgtgccagacttgaaccccgtgatctcaggttatattaaaagtgtagggcagccattgtgcctcgacgtgggagagaataaccagggcggcaaacctttgatcatgtacacctgccacgggctgggtggcaaccaatattttgaatacagcgcgcagcacgaaatacggcacaatattcaaaaggagctctgtctacacgccgcacagggcctagtccaactgaaggcgtgtacatacaaaggacacaagactgtggttacgggtgagcagatctgggaaatccagaaggaccaattactgtataaccccttcctgaagatgtgcctgagcgctaatggagagcatcccagcctggtttcttgcaaccctagtgacccccttcagaaatggatactgagccaaaatgattag

SEQ ID NO: 146672 - DNA, 1395 bp, Artificial Sequence
  derived and/or modified sequence
atggcccacctgaagagactggtaaagctgcatatcaagcgacactaccacaaaaagttctggaaattgggggctgttatatttttctttattattgtcctggtgctcatgcagcgcgaagtgtccgttcagtatagcaaagaagagtctagaatggagcggaacatgaaaaataaaaataaaatgctggacctcatgctggaagccgtcaataatatcaaggatgccatgcctaagatgcagatcggtgctcctgttaggcagaacatcgacgccggtgagcgaccatgcctccaggggtattatactgccgccgaactgaagcccgttcttgaccgccctccccaagattctaatgcacctggagcgagcgggaaggctttcaagacaaccaacctctcagtggaggagcaaaaagagaaagaaaggggcgaagccaagcactgcttcaatgccttcgcgtccgacaggatcagcctccatagggatctaggacccgatacacgtcccccggaatgtatcgagcaaaagttcaaaaggtgcccaccactccccaccacatccgtgatcatagtgtttcacaatgaagcatggtctaccctgctgagaacggttcatagcgtcctgtattccagtccagccattttactcaaggaaatcattctggtcgacgatgcctccgtggacgaatacttgcatgacaaactggacgaatacgttaaacagttctccatagtgaagatcgtccggcaacgcgagcgtaaaggcctgatcacggcccgactgcttggcgcaactgtggccaccgcagagacgcttaccttcttggatgcgcattgcgagtgcttctacggctggctggagccattactcgcccggattgcagagaattacaccgctgtagtaagtcccgacatagcttccatagacctgaataccttcgaattcaacaaaccatcaccctacggcagcaaccacaaccgaggtaactttgattggtccctgagctttggttgggaaagcttaccagatcacgaaaaacagaggcggaaggacgagacttatcccatcaaaacccccaccttcgccgggggactcttttccattagcaaagaatatttcgagtacatcgggtcatatgacgaagagatggagatctggggaggagagaacattgaaatgtctttcagagtctggcagtgcggcggccaactcgaaatcatgccatgttccgtggtcggtcatgtgtttcgttccaaaagtcctcactccttcccgaagggcacgcaggtgatcgcaagaaatcaggtgcggctggctgaggtatggatggacgagtacaaagaaatcttttataggcgaaacaccgatgctgcaaagatcgtcaagcagtag

SEQ ID NO: 146673 - DNA, 78 bp, Artificial Sequence
  derived and/or modified sequence
atggctcatttgaagcgcctagtgaagctgcatataaaacggcactaccataagaagttctggaaactaggcgcctag

SEQ ID NO: 146674 - DNA, 36 bp, Artificial Sequence
  derived and/or modified sequence
atggcccacctaaagaggctagtgaagcttcattag

SEQ ID NO: 146675 - DNA, 1902 bp, Artificial Sequence
  derived and/or modified sequence
atggcccacctgaagaggctggtgaagctgcacatcaagaggcactaccacaagaagttctggaagctgggcgctgtgatcttcttcttcatcatcgtgctggtgctgatgcagcgggaggtgtctgtgcagtacagcaaggaggagagcaggatggagaggaacatgaagaacaagaacaagatgctggacctgatgctggaggccgtgaacaacatcaaggatgccatgcccaagatgcagatcggggcccctgtgcggcagaacattgatgctggggagcggccctgcctgcagggctactacacagctgctgagctgaagcctgtgctggaccggcccccccaggacagcaatgcccctggggccagcggcaaggccttcaagaccaccaacctgtctgtggaggagcagaaggagaaggagcggggggaggccaagcactgcttcaatgcctttgccagtgaccgcatcagcctgcaccgggacctgggccctgacacccggcccccagagtgcatcgagcagaagttcaagcgctgcccccccctgcccaccaccagcgtcatcatcgtgttccacaatgaggcctggagcaccctgctgaggacagtgcacagcgtgctgtacagcagccctgccatcctgctgaaggagatcatcctggtggatgatgcctctgtggatgagtacctgcatgacaagctggatgaatatgtgaagcagttcagcatcgtgaagatcgtgcggcagcgggagaggaagggcctcatcacagcccggctgctgggcgccaccgtggccacagctgagaccctgaccttcctggatgcccactgtgagtgcttctacggctggctggagcccctgctggccagaattgctgagaactacacagctgtggtgtccccagacatcgccagcattgacctgaacacctttgagttcaacaagcccagcccctacggcagcaaccacaacagaggcaactttgactggagcctgagctttggctgggagagcctgcctgaccacgagaagcagaggaggaaggatgagacctaccccatcaagacccccacctttgctgggggcctcttcagcatcagcaaggagtactttgagtacatcggcagctatgatgaggagatggagatctggggcggggagaacatcgagatgtccttccgggtgtggcagtgtggcggccagctggagatcatgccctgcagcgtggtgggccacgtgttccgcagcaagagcccccacagcttccccaagggcacccaggtgattgccaggaaccaggtgcggctggccgaggtgtggatggatgagtacaaggagatcttctacagaagaaacacagatgctgccaagatcgtgaagcagaaggcctttggagacctgagcaagagatttgagatcaagcaccggctgcagtgcaagaacttcacctggtacctgaacaacatctacccagaggtgtatgtgcctgacctgaaccctgtgatcagcggctacatcaagtctgtgggccagcccctgtgcctggatgtgggggagaacaaccagggcggcaagcccctcatcatgtacacctgccacggcctgggcggcaaccagtactttgagtacagcgcccagcacgagatccgccacaacatccagaaggagctgtgcctgcacgccgcccagggcctggtgcagctgaaggcctgcacctacaagggccacaagacagtggtgactggagagcagatctgggagatccagaaggaccagctgctgtacaaccccttcctgaagatgtgcctgagcgccaatggagagcaccccagcctggtgtcctgcaaccccagcgaccccctgcagaagtggatcctgagccagaatgactag

SEQ ID NO: 146676 - DNA, 1395 bp, Artificial Sequence
  derived and/or modified sequence
atggcccacctgaagaggctggtgaagctgcacatcaagaggcactaccacaagaagttctggaagctgggcgctgtgatcttcttcttcatcatcgtgctggtgctgatgcagcgggaggtgtctgtgcagtacagcaaggaggagagcaggatggagaggaacatgaagaacaagaacaagatgctggacctgatgctggaggccgtgaacaacatcaaggatgccatgcccaagatgcagatcggggcccctgtgcggcagaacattgatgctggggagcggccctgcctgcagggctactacacagctgctgagctgaagcctgtgctggaccggcccccccaggacagcaatgcccctggggccagcggcaaggccttcaagaccaccaacctgtctgtggaggagcagaaggagaaggagcggggggaggccaagcactgcttcaatgcctttgccagtgaccgcatcagcctgcaccgggacctgggccctgacacccggcccccagagtgcatcgagcagaagttcaagcgctgcccccccctgcccaccaccagcgtcatcatcgtgttccacaatgaggcctggagcaccctgctgaggacagtgcacagcgtgctgtacagcagccctgccatcctgctgaaggagatcatcctggtggatgatgcctctgtggatgagtacctgcatgacaagctggatgaatatgtgaagcagttcagcatcgtgaagatcgtgcggcagcgggagaggaagggcctcatcacagcccggctgctgggcgccaccgtggccacagctgagaccctgaccttcctggatgcccactgtgagtgcttctacggctggctggagcccctgctggccagaattgctgagaactacacagctgtggtgtccccagacatcgccagcattgacctgaacacctttgagttcaacaagcccagcccctacggcagcaaccacaacagaggcaactttgactggagcctgagctttggctgggagagcctgcctgaccacgagaagcagaggaggaaggatgagacctaccccatcaagacccccacctttgctgggggcctcttcagcatcagcaaggagtactttgagtacatcggcagctatgatgaggagatggagatctggggcggggagaacatcgagatgtccttccgggtgtggcagtgtggcggccagctggagatcatgccctgcagcgtggtgggccacgtgttccgcagcaagagcccccacagcttccccaagggcacccaggtgattgccaggaaccaggtgcggctggccgaggtgtggatggatgagtacaaggagatcttctacagaagaaacacagatgctgccaagatcgtgaagcagtag

SEQ ID NO: 146677 - DNA, 78 bp, Artificial Sequence
  derived and/or modified sequence
atggcccacctgaagaggctggtgaagctgcacatcaagaggcactaccacaagaagttctggaagctgggcgcctag

SEQ ID NO: 146678 - DNA, 36 bp, Artificial Sequence
  derived and/or modified sequence
atggcccacctgaagaggctggtgaagctgcactag

SEQ ID NO: 146679 - DNA, 1902 bp, Artificial Sequence
  derived and/or modified sequence
atggcccacctgaagcggctggtgaagctgcacatcaagcggcactatcacaaaaagttctggaagctgggggcagtcatatttttctttataatcgtgctcgtgctaatgcagcgtgaggtctccgttcaatatagcaaagaagagagcagaatggagagaaatatgaaaaataaaaataaaatgctggaccttatgttggaggctgtgaataacatcaaggatgcgatgccaaaaatgcagatcggggcccccgtgcgccagaatatcgacgccggagagcgcccatgcctgcagggctactacacggcagcagagctgaaacccgtgttggacaggcctcctcaggactccaacgcccctggggctagcggtaaggcattcaaaacaactaacttgtccgtggaggagcaaaaagagaaggagcggggtgaggctaaacactgtttcaatgcattcgcgtctgataggatatcgctccacagggatctgggcccagacactcgcccacccgagtgtattgagcagaagttcaaacgttgccctcccttgcccaccacatctgtgatcattgtgtttcacaacgaagcatggtctaccctcctgaggacagtgcatagcgtgctgtacagttcccctgccatcctgttaaaggagattatcctggtggacgacgccagcgtcgatgaatacttgcacgataagctggatgaatacgtgaaacagttcagtatcgtcaagatcgttcgccagcgggagcgcaaagggctgattaccgcccggcttctgggcgccaccgtggctacagcagagacccttacctttttggacgcacattgtgagtgcttttacggctggctcgagccacttctggcacgcatcgccgagaactacacagctgtcgtcagtccagacatcgcatccatagaccttaatacatttgaatttaataaacccagcccctacggtagcaaccacaaccgcggcaacttcgattggagtctgagctttggctgggagtccctgccagaccatgagaagcaacggaggaaggacgaaacttatcccattaagacccctaccttcgcaggaggattgttcagtatcagcaaggagtattttgaatatattggttcgtatgacgaggaaatggagatctggggcggagaaaacatcgagatgtcattccgggtgtggcaatgtgggggtcagttggagataatgccatgttcagtggttggtcatgtgttccggagcaagagtccacacagctttcccaagggaacgcaggtgatagcacgaaaccaagtcaggctggccgaggtctggatggacgagtacaaggaaatcttctatagacggaatactgatgcggccaagattgtgaagcagaaggcatttggtgacctctcaaaacgctttgagatcaaacatagactccagtgtaagaatttcacctggtatcttaacaacatttatccggaggtatacgtgcctgacctgaacccagtgatttccgggtatattaagtctgtgggccagcctctctgtctagacgtgggtgagaacaatcaaggaggcaagccactcataatgtacacatgccatggattgggcgggaaccagtacttcgagtatagtgcacaacatgagatcaggcacaatatccaaaaagaactgtgtttacacgccgcccagggcttggtccagttgaaggcttgcacttacaaaggacacaagacagtcgtcactggggaacagatttgggaaatacaaaaggatcagctgctgtacaacccattcctgaagatgtgtctgtccgccaacggggagcatccttctctcgtgtcctgcaacccctccgaccctctgcagaaatggatcctgtcccagaatgattag

SEQ ID NO: 146680 - DNA, 1395 bp, Artificial Sequence
  derived and/or modified sequence
atggcccacctgaagcggctggtgaagctgcacatcaagcggcactatcacaaaaagttctggaaactgggagccgttatttttttctttatcattgtactggtgttgatgcagcgcgaagtgtccgtgcaatattccaaggaggagagtagaatggagcgcaacatgaaaaataaaaataagatgttggacttgatgctcgaagcagtcaataacattaaggatgctatgcctaagatgcagattggggcaccagtcagacagaacatcgacgccggcgaacgaccatgtctacaaggctattacaccgccgcagaactgaagcctgtgttagacaggcccccccaggacagtaatgccccaggggcgagcggaaaggcttttaaaacgactaatctgagtgtggaggagcagaaggagaaagaaagaggagaggcaaaacattgttttaacgctttcgctagcgatagaatcagcttgcaccgcgatctcggtcctgacacaagaccccccgaatgtatcgagcagaagttcaagcgctgtcctcccctacccacaacatccgtgattatcgtttttcataacgaggcctggtccaccttacttaggacagttcactcagtgctgtatagcagcccggctatcctcctgaaggagatcattctggtggacgacgctagtgttgatgagtacctgcacgataagctggacgagtacgtgaagcagttctcaattgtgaagattgttcgtcagcgggagaggaaaggcctaataaccgcccggctcctgggggccaccgtggccaccgccgaaacattgacatttcttgacgcacattgcgaatgtttttatggctggctggagccgctcctggcaagaattgccgagaattacactgccgtagtctcccctgatattgcatccattgatctaaataccttcgagttcaacaaaccctcaccgtacggttccaatcacaatagggggaactttgattggtccctctccttcgggtgggaatcactccccgaccacgaaaagcaaagaaggaaagatgagacctatcccatcaagaccccaacctttgctggcgggttattttctatttcaaaagaatactttgaatatatcggatcttatgatgaggaaatggagatctgggggggcgagaatatcgagatgagcttccgggtttggcaatgcgggggacagttggagataatgccctgctcggtggtcggtcatgtctttaggagcaagagtccacattctttcccgaaggggacccaggtgatcgcccgcaaccaagtccgcctggccgaggtgtggatggatgagtacaaggagatcttctaccgaaggaacacggatgcagcgaagatcgtgaagcagtag

SEQ ID NO: 146681 - DNA, 78 bp, Artificial Sequence
  derived and/or modified sequence
atggcccacctgaagcggctggtgaagctgcacatcaagcggcactatcataagaagttctggaaactgggtgcctag

SEQ ID NO: 146682 - DNA, 36 bp, Artificial Sequence
  derived and/or modified sequence
atggcccacctgaagcggctggtgaagctgcactag

SEQ ID NO: 146683 - DNA, 1902 bp, Artificial Sequence
  derived and/or modified sequence
atggcccacttgaagagactggtgaaactccatatcaagcggcactaccataaaaagttctggaagctgggcgctgtgatcttttttttcataattgtgctggtgttgatgcagcgggaggtatctgtacaatactccaaggaagagagtcgtatggagagaaacatgaagaacaagaacaagatgctcgatttgatgcttgaagccgtcaacaatataaaagacgccatgccaaagatgcagattggtgcccctgtcagacagaatatcgatgcaggtgagcggccatgcctgcaagggtactacacagccgcagaactcaaaccagttttagatcggcctccacaagatagcaatgcccctggagcctcaggaaaggcttttaaaactaccaatctgtcagtggaggagcagaaggagaaggaaagaggggaggcgaaacactgtttcaacgctttcgcatccgaccgcatctccctccatcgggacctaggtccggacaccagacctccagagtgcatagaacagaagttcaagcgctgcccccctctgccaaccacaagtgttatcatcgtttttcataacgaagcttggtcgactctcttgaggaccgttcactccgtgttatactcgtcgcctgctattctgctaaaagagattatcctggttgacgacgccagtgtggacgaatacttacacgacaagcttgacgaatatgttaaacagtttagtatcgtaaagatcgtgaggcagcgtgaacggaagggacttatcacggctcgtctgctgggggctacagttgcaaccgctgaaacgctgacattcctagacgctcattgcgaatgtttctacgggtggctagagcccttgcttgcacggatagctgaaaattatacagctgtcgtcagtcctgacattgcctctatagacttaaacacttttgagttcaataaaccctctccatatggctctaaccacaatcgcggaaacttcgactggagtttgtcattcggatgggaaagcctgcctgaccatgagaagcaaaggagaaaggatgagacataccctattaaaaccccgacatttgcaggtgggctcttctctattagcaaggagtactttgaatacatcgggagctacgacgaggaaatggagatctggggaggcgagaacattgaaatgagctttcgggtgtggcagtgcggagggcagttggaaattatgccttgcagcgtggtgggacatgtcttcagatccaagtctccccactccttcccgaagggcacccaggtcattgccagaaatcaagttcgtctggcagaagtttggatggacgagtataaggaaatcttctacaggagaaatacagatgcagctaaaattgtcaagcagaaggctttcggggatctctcaaagcggtttgaaatcaaacataggcttcaatgcaagaactttacatggtatctcaacaatatctaccctgaggtatacgtgcctgatctgaaccccgtgatcagcggctatattaagtctgtagggcagcctctatgtttagatgtgggggaaaacaatcagggtgggaagcctctcatcatgtatacatgtcacggactgggcggtaatcagtatttcgaatacagtgctcaacacgagattcgacacaacatccagaaagagctgtgcctgcacgctgcccaaggactcgttcagcttaaagcctgtacctataagggccacaagactgtcgttaccggcgaacagatctgggagatccagaaggaccaactcctgtacaatcccttccttaagatgtgcttgtcagcgaacggagaacatccatcgctggtgtcctgcaacccctctgatcctttgcagaaatggatcctgtctcagaacgactag

SEQ ID NO: 146684 - DNA, 1395 bp, Artificial Sequence
  derived and/or modified sequence
atggcacacttaaagaggctggtgaagttacacattaagcggcactaccacaaaaagttctggaaactgggagccgttatcttctttttcattatcgtgcttgttttgatgcagcgcgaagtgtccgtgcagtacagtaaggaagagtccaggatggaacgcaatatgaagaataagaataagatgttggacttaatgttagaggccgtgaacaacatcaaggatgccatgcctaagatgcaaattggcgcaccagtgagacagaacatcgatgccggtgagcggccttgcctgcagggatattacaccgctgccgagcttaagcccgtcctcgatcggcctccgcaggactcaaacgcccctggggcaagcggtaaggcatttaagacgacaaacctcagcgtggaagagcagaaagaaaaggagcgaggagaggctaaacattgttttaatgctttcgcatccgatcgcatatctctccatcgggatttgggccctgacacccgcccaccagaatgtatcgagcagaaatttaagagatgcccgcctctgcctaccacaagcgtgatcatcgtttttcacaacgaggcgtggtcaacccttctcagaacagtgcacagcgtgctctactcatcaccagctatcctgctgaaagagataattctggtagatgacgcctcagtggacgagtatctgcatgataagctggacgagtacgtgaaacagtttagcattgtgaaaattgttagacagagggaaagaaagggcttgatcactgcacgattgttaggggcaactgtggccacagcagagacactgactttcctggacgctcactgtgaatgtttctacggttggctggagcccctcctggctcggatcgcggagaactataccgcggttgtctctccagatattgcatccatagacctgaacacctttgagtttaataaaccatctccgtacggatctaatcacaatcggggtaacttcgactggtctctgtctttcggctgggagagcctacccgatcatgagaaacagagacgcaaagatgagacctaccctattaaaacccctacttttgcaggcggtcttttctccatatccaaagaatacttcgagtacatcggttcttatgatgaagagatggagatttggggcggagagaatatagaaatgtctttccgcgtttggcagtgtggtggacagctagaaatcatgccctgttctgtcgtcggacatgtgtttcggtctaaatccccacattcgttccccaaggggacccaggtgattgctcgcaaccaggtgcggttagctgaggtgtggatggacgagtataaggaaatcttttatcggcgaaacactgacgccgctaaaattgtcaagcagtag

SEQ ID NO: 146685 - DNA, 78 bp, Artificial Sequence
  derived and/or modified sequence
atggcccacctcaagaggctggtcaagctgcatattaagaggcattaccataagaaattctggaagctgggggcatag

SEQ ID NO: 146686 - DNA, 36 bp, Artificial Sequence
  derived and/or modified sequence
atggcacatctgaagaggctcgtgaaacttcattag

SEQ ID NO: 146687 - DNA, 3868 bp, Artificial Sequence
  derived and/or modified sequence
gctgaaccctgcccgaagaaaccacatgagccagcagttgctgccctcccgaagtggtcctcggaggcagcgcaccccttcattttggcgaaccgaggaggaagggaggaaccgtgtgggggaaatctagaacttctggttccccaaggacccagcagactgtgttctggctacaaggtgatcactgccaccaggtcagtgcaggattcctccaatgtagatgggccgggagccacaacttgcgcggagcagcagcctcgccgaccactcagagagaagccgcgcgacagccaggcttggcccggacggcgcccccaccctgcgcgcgcgatccaaggttctcacctggagcgctcaggtagggctggggcggggcgggaggctggcgcgcaggcgcggaagtggggcctcgcccctgccgacgtcgcaggctggagctcacctgggagactccaagtggaagccgagcctcggttctgcctctccaggcaacgcgggaggcccagcgggaaggcaggaggcggcggcggaggaggagctctactgagccgcaactgtggcgacagcaaccggagtcgcagccgccgccacctgcacctggcgcctagcccacgtccagcgcctgcccggccgccgcttcccgccaccctgccctgcccacccgccaggtactaccattaaagataccttcttctcagcaaatctatgataaaaaatataagtaacagaagaagaaataactgttatttgtcaagtgacaagcttttaatgtcagaatggctcacctaaagcgactagtaaaattacacattaaaagacattaccataaaaagttctggaagcttggtgcagtaatttttttctttataatagttttggttttaatgcaaagagaagtaagtgttcaatattccaaagaggaatcaaggatggaaaggaacatgaaaaacaaaaacaagatgttggatttaatgctagaagctgtaaacaatattaaggatgccatgccaaaaatgcaaataggagcacctgtcaggcaaaacattgatgctggtgagagaccttgtttgcaaggatattatacagcagcagaattgaagcctgtccttgaccgtccacctcaggattcaaatgcacctggtgcttctggtaaagcattcaagacaaccaatttaagtgttgaagagcaaaaggaaaaggaacgtggggaagctaaacactgctttaatgctttcgcaagtgacaggatttctttgcaccgagatcttggaccagacactcgacctcctgaatgtattgaacaaaaatttaagcgctgccctcccctgcccaccaccagtgtcataatagtttttcataatgaagcgtggtccacgttgcttagaactgtccacagtgtgctctattcttcacctgcaatactgctgaaggaaatcattttggtggatgatgctagtgtagatgagtacttacatgataaactagatgaatatgtaaaacaattttctatagtaaaaatagtcagacaaagagaaagaaaaggtctgatcactgctcggttgctaggagcaacagtcgcaacagctgaaacgctcacatttttagatgctcactgtgagtgtttctatggttggctagaacctctgttggccagaatagctgagaactacacggctgtcgtaagtccagatattgcatccatagatctgaacacgtttgaattcaacaaaccttctccttatggaagtaaccataaccgtggaaattttgactggagtctttcatttggctgggagtcgcttcctgatcatgagaagcaaagaaggaaagatgaaacctacccaattaaaacacccacttttgcaggaggacttttttccatatcaaaagaatattttgagtatattggaagctatgatgaagaaatggaaatctggggaggtgaaaatatagaaatgtctttcagagtatggcaatgtggtgggcagttggagattatgccttgctctgttgttggacatgtttttcgcagcaaaagccctcatagctttccaaaaggcactcaggtgattgctagaaaccaagttcgccttgcagaagtctggatggatgaatacaaggaaatattttataggagaaatacagatgcagcaaaaattgttaaacaaaaagcatttggtgatctttcaaaaagatttgaaataaaacaccgccttcagtgtaaaaattttacatggtatctgaacaacatttatccagaggtgtatgtgccagaccttaatcctgttatatctggatacattaaaagcgttggtcagcctctatgtctggatgttggagaaaacaatcaaggaggcaaaccattaattatgtatacatgtcatggacttgggggaaaccagtactttgaatactctgctcaacatgaaattcggcacaacatccagaaggaattatgtcttcatgctgctcaaggtctcgttcagctgaaggcatgtacctacaaaggtcacaagacagttgtcactggagagcagatatgggagatccagaaggatcaacttctatacaatccattcttaaaaatgtgcctttcagcaaatggagagcatccaagtttagtgtcatgcaacccatcagatccactccaaaaatggatacttagccaaaatgattaagtgttccttaaaattaagttgaaaaaggaaatattctttctcataaaactgtgactaggcatacactgtagtttttgaaaattatgcaaaagcagctaaatgtaacttattccaagtgcatttttcttatttatatctttatgtagcactactacagaaattctgcaagtttctgtttcaaagcacaataactagtaataccaaagactatttcaaaatgtccagatgtaggggaagagatgtttacagtatgatgaaaataattttccaagtaaagtgatgtttgtgtgttttgtacacttagggatatatatatatagctacattcacacactcacaatttaaaatatttcccctagttttttggggggataggaagaaagatttgttactgtatttttttaactacataaaaatagatcaataaatgtcagcattggcctctgtgtacaaaccaagagcttttacagatccagaatttattagtttaaaatgcaggtgaacttttttttgcgtttggtttacttgtctgtcaaatgtttccttaaacatgaaactgaataaggagaagagtatttttaacacttaaatttcttggcaaattttaaaacattttttagtctgtaatacactccacttgaagcacttaagtcttccttaaatgacttttcttaagtaatgatactgtgtgttttcccaaagcacttttaaaaaaatttttataaattactatctgttgaaaaggtgtccttttcctttcttctagtatttttttcttaccaaaattcactaatcttgaatgtttgtgatattaaatttcaaatgcagaatacttgactcatttaaagctaaattttgttactgattcaattataattgtaatggatttttgactttgtaatggattcttttcatcaaaaagccttatttttttatctatgtggaaaacacaataaaaaatcctcaacactattgtaatcatttggttaagtttttttcctcttttgggtaaaatctgtaattgataataggtgggggaaaatgaattttgtatgctgaatttctaagcgcctattgtttgtaaaaccatcagatatttcttatggcacaaaaaatgaggaatagcaaaattcctgtgttcaatatttagaaaattttgtattaatttctgataaagttccttaagcatc

SEQ ID NO: 146688 - DNA, 1954 bp, Artificial Sequence
  derived and/or modified sequence
acatgagccagcagttgctgccctcccgaagtggtcctcggaggcagcgcaccccttcattttggcgaaccgaggaggaagggaggaaccgtgtgggggaaatctagaacttctggttccccaaggacccagcagactgtgttctggctacaaggtgatcactgccaccaggtcagtgcaggattcctccaatgtagatgggccgggagccacaacttgcgcggagcagcagcctcgccgaccactcagagagaagccgcgcgacagccaggcttggcccggacggcgcccccaccctgcgcgcgcgatccaaggttctcacctggagcgctcaggggttccttcaggagtcacaagtactattgggttggaaaatctgggagaataatagtttacttactgatgaaactgctgtattatcattcattaagctggagcagatcacagtttgagggtactaccattaaagataccttcttctcagcaaatctatgataaaaaatataagtaacagaagaagaaataactgttatttgtcaagtgacaagcttttaatgtcagaatggctcacctaaagcgactagtaaaattacacattaaaagacattaccataaaaagttctggaagcttggtgcagtaatttttttctttataatagttttggttttaatgcaaagagaagtaagtgttcaatattccaaagaggaatcaaggatggaaaggaacatgaaaaacaaaaacaagatgttggatttaatgctagaagctgtaaacaatattaaggatgccatgccaaaaatgcaaataggagcacctgtcaggcaaaacattgatgctggtgagagaccttgtttgcaaggatattatacagcagcagaattgaagcctgtccttgaccgtccacctcaggattcaaatgcacctggtgcttctggtaaagcattcaagacaaccaatttaagtgttgaagagcaaaaggaaaaggaacgtggggaagctaaacactgctttaatgctttcgcaagtgacaggatttctttgcaccgagatcttggaccagacactcgacctcctgaatgtattgaacaaaaatttaagcgctgccctcccctgcccaccaccagtgtcataatagtttttcataatgaagcgtggtccacgttgcttagaactgtccacagtgtgctctattcttcacctgcaatactgctgaaggaaatcattttggtggatgatgctagtgtagatgagtacttacatgataaactagatgaatatgtaaaacaattttctatagtaaaaatagtcagacaaagagaaagaaaaggtctgatcactgctcggttgctaggagcaacagtcgcaacagctgaaacgctcacatttttagatgctcactgtgagtgtttctatggttggctagaacctctgttggccagaatagctgagaactacacggctgtcgtaagtccagatattgcatccatagatctgaacacgtttgaattcaacaaaccttctccttatggaagtaaccataaccgtggaaattttgactggagtctttcatttggctgggagtcgcttcctgatcatgagaagcaaagaaggaaagatgaaacctacccaattaaaacacccacttttgcaggaggacttttttccatatcaaaagaatattttgagtatattggaagctatgatgaagaaatggaaatctggggaggtgaaaatatagaaatgtctttcagagtatggcaatgtggtgggcagttggagattatgccttgctctgttgttggacatgtttttcgcagcaaaagccctcatagctttccaaaaggcactcaggtgattgctagaaaccaagttcgccttgcagaagtctggatggatgaatacaaggaaatattttataggagaaatacagatgcagcaaaaattgttaaacaa

SEQ ID NO: 146689 - protein, 173 aa, Artificial Sequence
  derived and/or modified sequence
MALRVVRSVRALLCTLRAVPSPAAPCPPRPWQLGVGAVRTLRTGPALLSVRKFTEKHEWVTTENGIGTVGISNFAQEALGDVVYCSLPEVGTKLNKQDEFGALESVKAASELYSPLSGEVTEINEALAENPGLVNKSCYEDGWLIKMTLSNPSELDELMSEEAYEKYIKSIEE

SEQ ID NO: 146690 - DNA, 522 bp, Artificial Sequence
  derived and/or modified sequence
atggctctgcgagtggtgaggtctgtgcgggctctgctgtgcaccctgagggctgtcccaagtcccgccgctccttgccctccaagaccctggcagcttggtgtcggagccgttaggacccttcgcactggccccgccctgctctcagtacgcaagtttactgagaagcatgagtgggttaccacagagaacggaattggcaccgtgggaatcagcaatttcgcacaggaagcattgggcgatgtagtgtactgtagcctgcctgaagtaggcaccaagttaaacaagcaggacgagtttggggctctggagagcgtgaaggccgcctctgaactgtattcacctctgtccggcgaagttaccgagatcaatgaagcccttgcagagaacccggggctcgtgaataaatcatgttacgaggatggttggctgattaaaatgacgttgagcaacccatctgaactcgatgagctgatgagcgaagaggcatacgagaagtacataaagtcaattgaagagtag

SEQ ID NO: 146691 - DNA, 1552 bp, Artificial Sequence
  derived and/or modified sequence
cccgcggcaccgcctccgcgcctccatccagccggctccctccggccgcgaactgcccctccccgccccgcctcccggcgcgggtggccgaggcgtagcgctgcgacccccgcacccctgcgaacatggcgctgcgagtggtgcggagcgtgcgggccctgctctgcaccctgcgcgcggtcccgtcacccgccgcgccctgcccgccgaggccctggcagctgggggtgggcgccgtccgtacgctgcgcactggacccgctctgctctcggtgcgtaaattcacagagaaacacgaatgggtaacaacagaaaatggcattggaacagtgggaatcagcaattttgcacaggaagcgttgggagatgttgtttattgtagtctccctgaagttgggacaaaattgaacaaacaagatgagtttggtgctttggaaagtgtgaaagctgctagtgaactctattctcctttatcaggagaagtaactgaaattaatgaagctcttgcagaaaatccaggacttgtaaacaaatcttgttatgaagatggttggctgatcaagatgacactgagtaacccttcagaactagatgaacttatgagtgaagaagcatatgagaaatacataaaatctattgaggagtgaaaatggaactcctaaataaactagtatgaaataacgcaagccagcagagttgtcttaaattagtggtggatagaagacttagaatagaaacttttagtattaccgatggggaaaaaaaaactactgttaacactgctaatgaaagaaaatgccctttaactttctaatgattatagataaatataatatgcgtctttttcacaatatcctatgatttttagactaggctctagtgttcagaattcatgaaattatccatggtaaaaactagttataaaaattacataattcaaagataacattgttattcttaagccttatataatattgtaacttgcatgtatccatacctggatttgggatgaaatacttaatgatctttccattggaaataactggaagtgaagaggttttgttgcttgtacagtgtcagatgaggaacaccactatcttaattttgcgatacactgcatttgctggtgctatttttatacagtgaagcaacagctttgcagcaaaataataaaatacttcttcgttaatcatgtttgttttgatgttaatatttcatttagtaactctgctagtatttgtgaaagtgctaactttaacttacggaaagttactttttaaaaggaaatttaagccagaacaatgcaaagctccaagaaaatgttttctttagtcacaaatctggtttttcttaagccaagatctgtcacctttaacataataaaaaataaatcaccaactttgattttctatcatgcgaggtctgaagaaagaagaggaaagacagaggaaggtggaagttttgatcagtatagcacatggtgtttttaagttgttaaaccacgttcaggtttccacttaagtcatgggaataaaagtggacaaggactgaa

SEQ ID NO: 146692 - DNA, 522 bp, Artificial Sequence
  derived and/or modified sequence
atggccctgcgggtggtgcgctctgtgcgggccctgctgtgcaccctgcgggctgtgcccagccctgctgccccctgccccccccggccctggcagctgggcgtgggcgctgtgaggaccctgaggactggacctgccctgctgtctgtgaggaagttcacagagaagcatgagtgggtgaccacagaaaatggcatcggcaccgtgggcatcagcaactttgcccaggaggccctgggagatgtggtgtactgcagcctgcctgaggtgggcaccaagctgaacaagcaggatgaatttggagccctggagagcgtgaaggccgccagcgagctgtacagccccctgtctggagaggtgacagagatcaatgaggccctggctgaaaatcctggcctggtgaacaagagctgctatgaagatggctggctgatcaagatgaccctgagcaaccccagcgagctggatgagctgatgtctgaggaggcctatgagaagtacatcaagagcattgaggagtag

SEQ ID NO: 146693 - DNA, 522 bp, Artificial Sequence
  derived and/or modified sequence
atggccctgcgggtggtgcggagcgtgcgggccctgctgtgcaccctgagggccgtgcccagtcccgccgctccatgtccacccaggccatggcagctaggagtcggggccgttcggacgctcaggacgggaccagccctgcttagcgtacgcaagttcaccgagaagcacgaatgggtgacaactgagaatggcatcgggaccgtcggcattagtaattttgcccaagaagcactcggagacgtggtgtactgctctctgcctgaagtcggaaccaagctgaataagcaagacgagtttggagctttggaaagtgtgaaggcagcatccgaactgtactctcccctcagcggagaagtgacggaaatcaatgaagcgttagctgaaaaccctggactcgtgaacaaaagttgctacgaagatggctggcttattaagatgacactgagcaacccatctgagctcgacgagttaatgtcagaggaggcctatgagaaatacatcaaaagtatcgaagagtag

SEQ ID NO: 146694 - DNA, 522 bp, Artificial Sequence
  derived and/or modified sequence
atggcactgcgcgtggttcgatctgtcagagccctgctgtgtacattgagagctgtgccttcacccgcagcaccgtgtccacctcgcccttggcaactgggggtcggggctgtgcgtacattgcgcacgggacccgcactcctgtctgtgcgaaagttcaccgagaaacacgagtgggtgacgacggagaatggtattggaacggtcgggatctccaacttcgcgcaggaagccctcggagatgtggtctactgcagccttcctgaggtcgggaccaagcttaataagcaggacgagttcggagccctcgagtctgtcaaagcagcatcagaattatacagtccactgtcgggtgaggtcaccgagattaacgaagcactagccgaaaatccgggactagtgaataagtcgtgctacgaggacggttggcttatcaagatgaccctttccaacccaagcgagctggatgagctgatgtccgaagaagcatatgagaagtacatcaagtccattgaggaatag

SEQ ID NO: 146695 - DNA, 522 bp, Artificial Sequence
  derived and/or modified sequence
atggccctgagagtggtgagaagcgtgagagccctgctgtgcaccctgagagccgtgcccagccccgccgccccctgcccccccagaccctggcagctgggcgtgggcgccgtgagaaccctgagaaccggccccgccctgctgagcgtgagaaagttcaccgagaagcacgagtgggtgaccaccgagaacggcatcggcaccgtgggcatcagcaacttcgcccaggaggccctgggcgacgtggtgtactgcagcctgcccgaggtgggcaccaagctgaacaagcaggacgagttcggcgccctggagagcgtgaaggccgccagcgagctgtacagccccctgagcggcgaggtgaccgagatcaacgaggccctggccgagaaccccggcctggtgaacaagagctgctacgaggacggctggctgatcaagatgaccctgagcaaccccagcgagctggacgagctgatgagcgaggaggcctacgagaagtacatcaagagcatcgaggagtag

SEQ ID NO: 146696 - protein, 580 aa, Artificial Sequence
  derived and/or modified sequence
MAGTVRTACLVVAMLLSLDFPGQAQPPPPPPDATCHQVRSFFQRLQPGLKWVPETPVPGSDLQVCLPKGPTCCSRKMEEKYQLTARLNMEQLLQSASMELKFLIIQNAAVFQEAFEIVVRHAKNYTNAMFKNNYPSLTPQAFEFVGEFFTDVSLYILGSDINVDDMVNELFDSLFPVIYTQLMNPGLPDSALDINECLRGARRDLKVFGNFPKLIMTQVSKSLQVTRIFLQALNLGIEVINTTDHLKFSKDCGRMLTRMWYCSYCQGLMMVKPCGGYCNVVMQGCMAGVVEIDKYWREYILSLEELVNGMYRIYDMENVLLGLFSTIHDSIQYVQKNAGKLTTTIGKLCAHSQQRQYRSAYYPEDLFIDKKVLKVAHVEHEETLSSRRRELIQKLKSFISFYSALPGYICSHSPVAENDTLCWNGQELVERYSQKAARNGMKNQFNLHELKMKGPEPVVSQIIDKLKHINQLLRTMSMPKGRVLDKNLDEEGFESGDCGDDEDECIGGSGDGMIKVKNQLRFLAELAYDLDVDDAPGNSQQATPKDNEISTFHNLGNVHSPLKLLTSMAISVVCFFFLVH

SEQ ID NO: 146697 - protein, 256 aa, Artificial Sequence
  derived and/or modified sequence
  misc_feature (1)..(1): Xaa can be any naturally occurring amino acid
XKPCGGYCNVVMQGCMAGVVEIDKYWREYILSLEELVNGMYRIYDMENVLLGLFSTIHDSIQYVQKNAGKLTTTIGKLCAHSQQRQYRSAYYPEDLFIDKKVLKVAHVEHEETLSSRRRELIQKLKSFISFYSALPGYICSHSPVAENDTLCWNGQELVERYSQKAARNGMKNQFNLHELKMKGPEPVVSQIIDKLKHINQLLRTMSMPKGRVLDKNLDEEGFESGDCGDDEDECIGGSGDGMIKVKNQLRFLAGN

SEQ ID NO: 146698 - DNA, 1743 bp, Artificial Sequence
  derived and/or modified sequence
atggctggaactgttagaactgcttgcctcgtcgtggctatgttgctgtctttggatttccccggccaagcccaaccccccccaccccctcccgacgcgacttgccatcaggtacggtcattcttccagagattgcagcctgggctaaaatgggtgcccgaaacacccgttcctggcagcgatctccaagtgtgcctccccaaaggccccacctgttgtagccgcaagatggaggaaaaataccagctcacagcacgactgaatatggaacagctgctccagtcagcttcgatggagctaaagtttctcatcattcagaatgccgctgtctttcaagaggccttcgaaatagtggttcgccacgctaaaaactacacgaatgctatgtttaagaataattacccctcactgactccccaagctttcgagttcgtgggagaattcttcacagatgtttctctgtacatcctgggcagcgatatcaacgtcgacgacatggtaaacgagttgtttgacagtctattcccggtgatctacacccaactaatgaaccccggcttgcccgattccgccctggatattaacgagtgcctccgaggagcacggagagacctcaaggttttcgggaatttccccaagctaataatgacccaagtgagcaagagtctgcaggtgacacgcattttcttgcaagccctgaaccttgggatagaggtaatcaatacaacggaccacctgaagttcagtaaggactgtggtaggatgcttactcggatgtggtactgttcttattgtcaagggctcatgatggtgaagccctgtgggggatactgcaacgtggtaatgcaggggtgcatggccggagtggtggagatcgataaatactggcgagagtatatcctgtccctggaggaactcgtcaacggtatgtaccgcatttacgatatggagaatgtcttgctggggttgtttagcaccatccatgatagtatccagtatgtacaaaaaaatgcagggaagcttacaacaaccatagggaaactgtgtgcacactcacagcaaaggcaatatcgttcggcttactatcctgaggacctgtttatcgataaaaaggtgctcaaagtggcccatgttgaacacgaagagacactgtccagcaggagaagggaactcatccagaaattaaaatccttcatcagcttttactccgccttaccgggatacatctgttcccattctccagttgccgagaatgataccctgtgctggaatgggcaggagttagtcgagcggtacagtcagaaggccgcgagaaacggaatgaagaatcagttcaatctgcacgagctgaagatgaagggtcccgagccagtggtgagccagattattgataaactgaaacatattaaccaactgctgaggacgatgagtatgccaaagggacgtgtactagacaagaaccttgacgaagaaggcttcgagagtggtgattgtggggacgatgaagacgagtgcatcggcggctccggggatggcatgattaaagtcaaaaatcagctccgcttcctcgccgagctcgcctatgacctcgatgtcgatgatgcgcccggtaacagccagcaggctacacccaaggacaatgagatctccacatttcacaatcttggtaacgtgcattcacctctgaagctcctgactagcatggcgatttctgtggtttgcttcttcttccttgtgcattag

SEQ ID NO: 146699 - DNA, 2568 bp, Artificial Sequence
  derived and/or modified sequence
cgccctgtgtagagcggctgcgagcgggcagctgggctcggctgccgggagccaccgcgcgggctccgcaccctcctctcgcactgccttcgcccggtccccgcgccgcggtgccccagtggcccccgccgcgctccacgccgcgcccccgcaccccgccggctaccggccgcacaaccgccaccgccccctggccgcgcggctcgcctcgccccgccccgtccctcctcgccccgccccaccccagtcagccccgccctgccccgcgccgccaagcggttcccgccctcgcccagcgcccaggtagctgcgaggaaacttttgcagcggctgggtagcagcacgtctcttgctcctcagggccactgccaggcttgccgagtcctgggactgctctcgctccggctgccactctcccgcgctctcctagctccctgcgaagcaggatggccgggaccgtgcgcaccgcgtgcttggtggtggcgatgctgctcagcttggacttcccgggacaggcgcagcccccgccgccgccgccggacgccacctgtcaccaagtccgctccttcttccagagactgcagcccggactcaagtgggtgccagaaactcccgtgccaggatcagatttgcaagtatgtctccctaagggcccaacatgctgctcaagaaagatggaagaaaaataccaactaacagcacgattgaacatggaacagctgcttcagtctgcaagtatggagctcaagttcttaattattcagaatgctgcggttttccaagaggcctttgaaattgttgttcgccatgccaagaactacaccaatgccatgttcaagaacaactacccaagcctgactccacaagcttttgagtttgtgggtgaatttttcacagatgtgtctctctacatcttgggttctgacatcaatgtagatgacatggtcaatgaattgtttgacagcctgtttccagtcatctatacccagctaatgaacccaggcctgcctgattcagccttggacatcaatgagtgcctccgaggagcaagacgtgacctgaaagtatttgggaatttccccaagcttattatgacccaggtttccaagtcactgcaagtcactaggatcttccttcaggctctgaatcttggaattgaagtgatcaacacaactgatcacctgaagttcagtaaggactgtggccgaatgctcaccagaatgtggtactgctcttactgccagggactgatgatggttaaaccctgtggcggttactgcaatgtggtcatgcaaggctgtatggcaggtgtggtggagattgacaagtactggagagaatacattctgtcccttgaagaacttgtgaatggcatgtacagaatctatgacatggagaacgtactgcttggtctcttttcaacaatccatgattctatccagtatgtccagaagaatgcaggaaagctgaccaccactattggcaagttatgtgcccattctcaacaacgccaatatagatctgcttattatcctgaagatctctttattgacaagaaagtattaaaagttgctcatgtagaacatgaagaaaccttatccagccgaagaagggaactaattcagaagttgaagtctttcatcagcttctatagtgctttgcctggctacatctgcagccatagccctgtggcggaaaacgacaccctttgctggaatggacaagaactcgtggagagatacagccaaaaggcagcaaggaatggaatgaaaaaccagttcaatctccatgagctgaaaatgaagggccctgagccagtggtcagtcaaattattgacaaactgaagcacattaaccagctcctgagaaccatgtctatgcccaaaggtagagttctggataaaaacctggatgaggaagggtttgaaagtggagactgcggtgatgatgaagatgagtgcattggaggctctggtgatggaatgataaaagtgaagaatcagctccgcttccttgcagaactggcctatgatctggatgtggatgatgcgcctggaaacagtcagcaggcaactccgaaggacaacgagataagcacctttcacaacctcgggaacgttcattccccgctgaagcttctcaccagcatggccatctcggtggtgtgcttcttcttcctggtgcactgactgcctggtgcccagcacatgtgctgccctacagcaccctgtggtcttcctcgataaagggaaccactttcttatttttttctatttttttttttttgttatcctgtatacctcctccagccatgaagtagaggactaaccatgtgttatgttttcgaaaatcaaatggtatcttttggaggaagatacattttagtggtagcatatagattgtccttttgcaaagaaagaaaaaaaaccatcaagttgtgccaaattattctcctatgtttggctgctagaacatggttaccatgtctttctctctcactccctccctttctatcgttctctctttgcatggatttctttgaaaaaaaataaattgctcaaataaaaa

SEQ ID NO: 146700 - DNA, 1743 bp, Artificial Sequence
  derived and/or modified sequence
atggccggcaccgtgaggacagcctgcctggtggtggccatgctgctgagcctggacttccctggccaggcccagcccccacctcctcctccagatgccacctgccaccaggtgcgctccttcttccagaggctgcagcccggcctgaagtgggtgcctgagacccctgtgcccggcagtgacctgcaggtgtgcctgcccaagggccccacctgctgcagcaggaagatggaggagaagtaccagctgacagcccggctgaacatggagcagctgctgcagagcgcctccatggagctgaagttcctgatcatccagaatgctgctgtgttccaggaggcctttgaaattgtggtgagacatgccaagaactacaccaatgccatgttcaagaacaactaccccagcctgaccccccaggcctttgaatttgtgggggagttcttcacagatgtgtccctgtacatcctgggcagtgacatcaacgtggatgacatggtgaatgagctgtttgacagcctcttccctgtgatctacacccagctgatgaaccctggcctgcctgacagcgccctggacatcaatgaatgtctgcggggggcccggcgggacctgaaggtgtttggaaacttccccaagctgatcatgacccaggtgtccaagagcctgcaggtgacccgcatcttcctgcaggccctgaacctgggcattgaagtcatcaacaccacagaccacctgaagttcagcaaggactgtggccgcatgctgaccaggatgtggtactgcagctactgccagggcctgatgatggtgaagccctgtggcggctactgcaatgtggtgatgcagggctgcatggccggcgtggtggagattgacaagtactggagggagtacatcctgagcctggaggagctggtgaatggcatgtaccgcatctatgacatggagaatgtgctgctgggcctcttcagcaccatccatgacagcatccagtatgtgcagaagaatgctgggaagctgaccaccaccatcggcaagctgtgtgcccacagccagcagaggcagtacagaagtgcctactacccagaggacctcttcatcgacaagaaggtgctgaaggtggcccacgtggagcacgaggagaccctgagcagcagaagaagagagctgatccagaagctgaagagcttcatctccttctacagcgccctgcccggctacatctgcagccacagccctgtggctgaaaatgacaccctgtgctggaatggccaggagctggtggagcgctacagccagaaggccgccagaaatggcatgaagaaccagttcaacctgcacgagctgaagatgaagggccctgagcctgtggtgtcccagatcatcgacaagctgaagcacatcaaccagctgctgcggaccatgtccatgcccaagggccgggtgctggacaagaacctggatgaggagggctttgaaagtggggactgtggagatgatgaagatgagtgcatcggcggcagcggagatggcatgatcaaggtgaagaaccagctgcgcttcctggccgagctggcctatgacctggatgtggatgatgcccctggcaacagccagcaggccacccccaaggacaatgagatcagcaccttccacaacctgggcaatgtgcacagccccctgaagctgctgacctccatggccatctctgtggtgtgcttcttcttcctggtgcactag

SEQ ID NO: 146701 - DNA, 1743 bp, Artificial Sequence
  derived and/or modified sequence
atggccggcaccgtgcggaccgcctgcctggtggtggccatgctgctgagcttggattttccggggcaggcccagcccccaccaccgcccccagacgccacatgtcaccaggtgagatctttcttccagcgactgcagcccggactaaagtgggtacccgagacccctgtcccaggcagcgatctgcaagtttgccttcccaaggggcctacctgctgcagcaggaaaatggaggagaagtatcagttaaccgcccggctgaatatggagcaacttttacagagcgcaagtatggagctgaagttcttaatcattcaaaatgctgccgttttccaagaagccttcgagatcgtggtccgccacgcaaaaaattatactaacgcgatgttcaagaataactacccatcactaactccccaggcattcgaatttgtcggagagttcttcactgacgtctctttgtatatacttggaagcgatattaacgtagacgatatggtgaacgagttattcgatagcctgttcccagttatttacacccagctcatgaacccaggcctgccagacagcgcactggacattaacgagtgcttacggggggcgagaagggacttgaaggtcttcgggaattttccgaaactaattatgactcaggtctctaaatcactgcaggtgaccaggatttttcttcaggcacttaatctgggcattgaagttatcaacacaacagatcacctgaagttcagtaaggattgtggccgaatgttaactaggatgtggtactgcagctactgtcaaggactaatgatggtcaaaccttgcggtggatactgtaacgtggtaatgcaggggtgcatggcaggggttgtggaaatcgacaaatactggcgtgagtacattcttagtctggaagagctagtgaacggtatgtacagaatttatgacatggagaatgtactcctcggtcttttttcaacaatccatgattctattcaatacgtacagaaaaatgccggcaagctgacgaccaccatcgggaagctgtgcgcccattctcagcagcggcaatatagatctgcctattatcccgaggatctgttcatcgataagaaagtgctgaaggtggctcatgtagaacacgaagagacccttagcagccgaagaagagaactgatccagaaactgaaatcatttatcagcttctattcagcgctgcccggctacatctgttcccatagccctgtcgccgaaaacgacacattgtgctggaatgggcaggagctggtggagagatatagtcaaaaagccgcccggaacggtatgaagaatcaattcaatctccacgaactgaagatgaaaggtccggagccagtcgtctcacaaataattgataagctcaaacacattaaccagctcctgaggaccatgtccatgccaaaaggaagggtgctcgataaaaatctggatgaggagggttttgaatccggtgactgcggggatgatgaggatgaatgtatcggaggctcaggcgacggaatgattaaggttaaaaaccaactccgctttttggccgaactcgcctacgatttggatgtcgacgacgcccctgggaattctcagcaagctactcccaaagataacgaaatctccacctttcacaatcttggtaacgtgcactccccactcaagctgttaacatccatggcaatttctgttgtatgtttcttctttctggtacactag

SEQ ID NO: 146702 - DNA, 1743 bp, Artificial Sequence
  derived and/or modified sequence
atggctggcaccgtcaggacggcttgcctggttgtggctatgctgttgagtctcgattttccaggccaggctcagcccccaccgcctcccccagatgctacatgtcatcaggttcgatcattctttcagaggctgcagccagggctgaaatgggtgccagaaacacctgtgccgggatccgatctacaggtgtgcttgcccaaaggaccaacatgttgcagcaggaaaatggaggagaagtatcagctcaccgccagactcaacatggaacagctattgcagagcgcatctatggagttaaagttcttgatcattcagaacgccgctgtcttccaggaggctttcgagatcgtggtgcggcacgcgaaaaactatactaatgctatgttcaagaataactatccctcccttactccccaggcttttgagttcgtcggagagttcttcacagacgtgagtctttatatcctgggaagcgatatcaatgtcgacgacatggtgaacgaattatttgattcgctgtttccagtgatctacacgcagttaatgaacccagggctgccagactccgccctggacattaacgagtgcctgcggggagccaggagggatctgaaggtcttcggaaactttcccaaacttattatgacccaagtgtcaaagagtctccaggtgacacgcatattcctgcaggcactcaatctcgggattgaggtgattaacactacagaccatctgaagttcagtaaagattgcggtcgcatgctgactcggatgtggtattgttcctattgtcaaggcctcatgatggttaaaccttgcgggggatactgcaatgtggtcatgcagggatgcatggccggtgttgttgaaatagataagtattggcgcgaatacatcttaagtctcgaggagcttgtcaacggcatgtatcgaatttacgacatggagaatgtgttgctcggtctcttctctactattcatgactctatccaatatgtccagaagaacgcagggaagcttacaacaacgatcggcaagctctgcgcccacagtcagcaaaggcagtacaggtcagcttactaccctgaggatctgtttatcgataagaaagtgctcaaggtggcccacgtggagcacgaggaaaccttgagcagcaggagacgggagctcattcaaaaactgaagtcgtttatctccttttactccgccctccccggttacatctgttctcattcccctgtcgctgagaatgatacactctgttggaatgggcaagagctggttgaaagatatagccagaaggctgccagaaatggcatgaagaatcagtttaacctccatgagctgaagatgaagggaccagagcccgtggtatcacagatcatcgataagttgaagcatatcaaccaactcctgcgaacaatgagcatgccaaaaggcagggtcctcgacaagaatttggatgaggagggattcgagtctggggactgcggtgacgatgaagacgaatgcatcggagggtccggtgacggcatgatcaaggtcaaaaatcaacttcggttcctggccgaattagcctacgacctggatgtagacgacgcccctggcaacagccagcaggccacccctaaggacaacgagatatccacttttcacaacctcgggaatgtgcattctcccctaaagctccttaccagtatggctatatctgtagtctgtttcttcttccttgttcactag

SEQ ID NO: 146703 - DNA, 1743 bp, Artificial Sequence
  derived and/or modified sequence
atggccggcaccgtgagaaccgcctgcctggtggtggccatgctgctgagcctggacttccccggccaggcccagccccccccccccccccccgacgccacctgccaccaggtgagaagcttcttccagagactgcagcccggcctgaagtgggtgcccgagacccccgtgcccggcagcgacctgcaggtgtgcctgcccaagggccccacctgctgcagcagaaagatggaggagaagtaccagctgaccgccagactgaacatggagcagctgctgcagagcgccagcatggagctgaagttcctgatcatccagaacgccgccgtgttccaggaggccttcgagatcgtggtgagacacgccaagaactacaccaacgccatgttcaagaacaactaccccagcctgaccccccaggccttcgagttcgtgggcgagttcttcaccgacgtgagcctgtacatcctgggcagcgacatcaacgtggacgacatggtgaacgagctgttcgacagcctgttccccgtgatctacacccagctgatgaaccccggcctgcccgacagcgccctggacatcaacgagtgcctgagaggcgccagaagagacctgaaggtgttcggcaacttccccaagctgatcatgacccaggtgagcaagagcctgcaggtgaccagaatcttcctgcaggccctgaacctgggcatcgaggtgatcaacaccaccgaccacctgaagttcagcaaggactgcggcagaatgctgaccagaatgtggtactgcagctactgccagggcctgatgatggtgaagccctgcggcggctactgcaacgtggtgatgcagggctgcatggccggcgtggtggagatcgacaagtactggagagagtacatcctgagcctggaggagctggtgaacggcatgtacagaatctacgacatggagaacgtgctgctgggcctgttcagcaccatccacgacagcatccagtacgtgcagaagaacgccggcaagctgaccaccaccatcggcaagctgtgcgcccacagccagcagagacagtacagaagcgcctactaccccgaggacctgttcatcgacaagaaggtgctgaaggtggcccacgtggagcacgaggagaccctgagcagcagaagaagagagctgatccagaagctgaagagcttcatcagcttctacagcgccctgcccggctacatctgcagccacagccccgtggccgagaacgacaccctgtgctggaacggccaggagctggtggagagatacagccagaaggccgccagaaacggcatgaagaaccagttcaacctgcacgagctgaagatgaagggccccgagcccgtggtgagccagatcatcgacaagctgaagcacatcaaccagctgctgagaaccatgagcatgcccaagggcagagtgctggacaagaacctggacgaggagggcttcgagagcggcgactgcggcgacgacgaggacgagtgcatcggcggcagcggcgacggcatgatcaaggtgaagaaccagctgagattcctggccgagctggcctacgacctggacgtggacgacgcccccggcaacagccagcaggccacccccaaggacaacgagatcagcaccttccacaacctgggcaacgtgcacagccccctgaagctgctgaccagcatggccatcagcgtggtgtgcttcttcttcctggtgcactag

SEQ ID NO: 146704 - protein, 75 aa, Artificial Sequence
  derived and/or modified sequence
MKEGMSNNSTTSISQARKAVEQLKMEACMDRVKVSQAAADLLAYCEAHVREDPLIIPVPASENPFREKKFFCTIL

SEQ ID NO: 146705 - DNA, 228 bp, Artificial Sequence
  derived and/or modified sequence
atgaaggagggcatgagcaacaacagcaccaccagcatcagccaggccagaaaggccgtggagcagctgaagatggaggcctgcatggacagagtgaaggtgagccaggccgccgccgacctgctggcctactgcgaggcccacgtgagagaggaccccctgatcatccccgtgcccgccagcgagaaccccttcagagagaagaagttcttctgcaccatcctgtag

SEQ ID NO: 146706 - DNA, 228 bp, Artificial Sequence
  derived and/or modified sequence
atgaaagagggcatgagtaataacagcaccacttccatctcccaggctcgcaaggctgttgagcagctcaaaatggaagcatgtatggatcgtgtcaaagttagtcaagcagccgctgatctgctcgcctactgcgaggcacacgttcgcgaggacccactgattatccccgttccggccagcgagaatcctttcagagagaagaagtttttttgcacaattttgtag

SEQ ID NO: 146707 - DNA, 228 bp, Artificial Sequence
  derived and/or modified sequence
atgaaggagggaatgagcaacaattctaccacctctatcagccaggctcgcaaggctgtcgaacaactgaagatggaggcatgtatggacagagtaaaggtcagtcaagcagcagcagacctgcttgcatattgcgaggcccacgtgcgagaggaccctcttatcatccccgtaccagcctccgagaacccgtttagagagaagaagtttttttgtacaatactgtag

SEQ ID NO: 146708 - DNA, 228 bp, Artificial Sequence
  derived and/or modified sequence
atgaaagagggaatgtccaacaacagtaccacatccattagtcaggccaggaaggcggtcgagcagttaaagatggaggcctgcatggacagagtgaaagttagccaggcggcagctgacttgctcgcatactgtgaggcccacgtgagagaggatccattaattatccccgtcccagcctccgaaaatcctttcagagagaaaaaatttttctgcaccatcctgtag

SEQ ID NO: 146709 - DNA, 228 bp, Artificial Sequence
  derived and/or modified sequence
atgaaggaaggtatgagtaacaactccaccacgagtatttctcaggcgaggaaagccgtagagcagctcaagatggaggcctgtatggaccgcgtgaaagtttcacaggcagctgcagaccttctggcctactgtgaagctcacgtccgcgaggacccattgattatacctgttccagcttctgagaacccatttagggagaagaagtttttctgcacaattctctag

SEQ ID NO: 146710 - DNA, 1595 bp, Artificial Sequence
  derived and/or modified sequence
ctcatctgacgactgacagctgctgccaccgccagcctctgtcccttgcccaggcctgtcacacggctgcctctcagcaggggcagtagaatgaaagagggcatgtctaataacagcaccactagcatctcccaagccaggaaagctgtggagcagctaaagatggaagcctgtatggacagggtcaaggtctcccaggcagctgcggacctcctggcctactgtgaagctcacgtgcgggaagatcctctcatcattccagtgcctgcatcagaaaacccctttcgcgagaagaagttcttttgtaccattctctaactccgtgtgtgatgaaaacgcctccttttctgaccttcaaagtcccctgtagagaccatgcatgctctaagccttagggagtgagaccaacacccatccctgcccagccaacagtggccggggcttgtcttatgtttccatctgttttcttcgtggcattcaatttcatttttttccttttcattttcatgttattttcattattggcaaagaaaatcaaaatgtttatagccaaataacaaatgtgccatgtaaaagtaagtctggacttaagagtttaaaatttttaaacatcagtttccaagtttatatcatattaatacatttcagtggataatttattttaaaaaaaaaactatgcctaaatatcccttatttgcaatattcagtatcaaattagagcattttgaccaactgaaacatataacgttttcatctcctttcctggagaaagcagctgcagaggttctgtatttcctgcatttccatcatcctagtaaaaagacaacaacccacaggattggaatggttttcttttgttttttttttgttgttgttgttgttttgagatggagtctcgctctgtcacccaggctggagtgcaatggcgtgacctcagctcactgcgacctccacctcctgggttcaagcgattctcctgcctcagcctcctgagtagctgggatcataggcacgcgccaccacacccagctaattttttgtatttttagtaaagacggggtttcaccatgttggtcaggctggtctcaaactcctgacctcgtgatccacccgcctcggcctcccaaagcgctgggattacaggcgtgagccaccacacccggccgtggaatggttttcttagcatatcctcctggggccgtggcgccccggctgtgggccgtggtggatgtcccttgtttcagtggtcctacaaaggtagatggtgggcggacaccgaagtcaacttgactgtaaaagtaccccataccgttgacgcgctgtggcagacctgtgggtgcggtctcccctctccaaatgccacctcttcctgctccctcctcttttggctcctactcagtagttccattgtgggctgcagtaatataaggacctgttctggacacagcactgggcccgctggggttttagtagggcagccccttccctgcaggagtgaggcatggtgacagcagtcccctatgtgcccccaagtcatctgagcattggtgtgcattaaggtactcaatcttccaacaataaataccataagtgca

SEQ ID NO: 146711 - DNA, 1721 bp, Artificial Sequence
  derived and/or modified sequence
cggtgccacagggacgaggcctggagagcagtcgctcctagaaccggggcgcgaagggcacccccgcctccagcacgcgccctccgccctcccggcctcgctccccccggagtgggggcctcgccggcccctggtccccgtcactcagcaacgtcgggtcagccttcgccgggttagtggcgacgcggccgcgcgaattcgcacaggggcagtagaatgaaagagggcatgtctaataacagcaccactagcatctcccaagccaggaaagctgtggagcagctaaagatggaagcctgtatggacagggtcaaggtctcccaggcagctgcggacctcctggcctactgtgaagctcacgtgcgggaagatcctctcatcattccagtgcctgcatcagaaaacccctttcgcgagaagaagttcttttgtaccattctctaactccgtgtgtgatgaaaacgcctccttttctgaccttcaaagtcccctgtagagaccatgcatgctctaagccttagggagtgagaccaacacccatccctgcccagccaacagtggccggggcttgtcttatgtttccatctgttttcttcgtggcattcaatttcatttttttccttttcattttcatgttattttcattattggcaaagaaaatcaaaatgtttatagccaaataacaaatgtgccatgtaaaagtaagtctggacttaagagtttaaaatttttaaacatcagtttccaagtttatatcatattaatacatttcagtggataatttattttaaaaaaaaaactatgcctaaatatcccttatttgcaatattcagtatcaaattagagcattttgaccaactgaaacatataacgttttcatctcctttcctggagaaagcagctgcagaggttctgtatttcctgcatttccatcatcctagtaaaaagacaacaacccacaggattggaatggttttcttttgttttttttttgttgttgttgttgttttgagatggagtctcgctctgtcacccaggctggagtgcaatggcgtgacctcagctcactgcgacctccacctcctgggttcaagcgattctcctgcctcagcctcctgagtagctgggatcataggcacgcgccaccacacccagctaattttttgtatttttagtaaagacggggtttcaccatgttggtcaggctggtctcaaactcctgacctcgtgatccacccgcctcggcctcccaaagcgctgggattacaggcgtgagccaccacacccggccgtggaatggttttcttagcatatcctcctggggccgtggcgccccggctgtgggccgtggtggatgtcccttgtttcagtggtcctacaaaggtagatggtgggcggacaccgaagtcaacttgactgtaaaagtaccccataccgttgacgcgctgtggcagacctgtgggtgcggtctcccctctccaaatgccacctcttcctgctccctcctcttttggctcctactcagtagttccattgtgggctgcagtaatataaggacctgttctggacacagcactgggcccgctggggttttagtagggcagccccttccctgcaggagtgaggcatggtgacagcagtcccctatgtgcccccaagtcatctgagcattggtgtgcattaaggtactcaatcttccaacaataaataccataagtgca

SEQ ID NO: 146712 - DNA, 5104 bp, Artificial Sequence
  derived and/or modified sequence
gggggcgagggtcgcagagtcgccggctctcccttccccagtctgggcccccacggcacagggggccgagcagaagcccccagcgtccagggccgggggagggtccgcctgcgcccccaggcccgcgtggtcgggccctgcagggcgggaggcgcggcgcggggcggggccggtgacgggacgcggagaccccgcgggcggcgggaggggcacgaggcgcgcgtttgcacccgagcccggcccgcgccccgatgcggagcgatgccgctcggcctggccgccccccgcgagcaccgcgctgcagacgaagcccgcgcgtgatcccgctccgggtgacctcaaagcagaagctctgaattcacctctcatctgacgactgacagctgctgccaccgccagcctctgtcccttgcccaggcctgtcacacggctgcctctcagcaggggcagtagaatgaaagagggcatgtctaataacagcaccactagcatctcccaagccaggaaagctgtggagcagctaaagatggaagcctgtatggacagggtcaaggtctcccaggcagctgcggacctcctggcctactgtgaagctcacgtgcgggaagatcctctcatcattccagtgcctgcatcagaaaacccctttcgcgagaagaagttcttttgtaccattctctaactccgtgtgtgatgaaaacgcctccttttctgaccttcaaagtcccctgtagagaccatgcatgctctaagccttagggagtgagaccaacacccatccctgcccagccaacagtggccggggcttgtcttatgtttccatctgttttcttcgtggcattcaatttcatttttttccttttcattttcatgttattttcattattggcaaagaaaatcaaaatgtttatagccaaataacaaatgtgccatgtaaaagtaagtctggacttaagagtttaaaatttttaaacatcagtttccaagtttatatcatattaatacatttcagtggataatttattttaaaaaaaaaactatgcctaaatatcccttatttgcaatattcagtatcaaattagagcattttgaccaactgaaacatataacgttttcatctcctttcctggagaaagcagctgcagaggttctgtatttcctgcatttccatcatcctagtaaaaagacaacaacccacaggattggaatggttttcttttgttttttttttgttgttgttgttgttttgagatggagtctcgctctgtcacccaggctggagtgcaatggcgtgacctcagctcactgcgacctccacctcctgggttcaagcgattctcctgcctcagcctcctgagtagctgggatcataggcacgcgccaccacacccagctaattttttgtatttttagtaaagacggggtttcaccatgttggtcaggctggtctcaaactcctgacctcgtgatccacccgcctcggcctcccaaagcgctgggattacaggcgtgagccaccacacccggccgtggaatggttttcttagcatatcctcctggggccgtggcgccccggctgtgggccgtggtggatgtcccttgtttcagtggtcctacaaaggtagatggtgggcggacaccgaagtcaacttgactgtaaaagtaccccataccgttgacgcgctgtggcagacctgtgggtgcggtctcccctctccaaatgccacctcttcctgctccctcctcttttggctcctactcagtagttccattgtgggctgcagtaatataaggacctgttctggacacagcactgggcccgctggggttttagtagggcagccccttccctgcaggagtgaggcatggtgacagcagtcccctatgtgcccccaagtcatctgagcattggtgtgcattaaggtactcaatcttccaacaataaataccataagtgcatgtctgttttattttatttatttatctttttgagacagagtcttgctctgtcgcccgggctggaatgcaatggcacaatctcagctcaccgcaacctccactcgcaggttcaagtgatcctcatgtctcagcctccctagtagctgggatgacaagcacacgccaacatgcctggctcatttttgtatttttagtagagacggggtttcaccatgtcggccaggctggtctccaactactggcctcgagtgatctgcccaccttggcctcccaaagtgctgggattgcaggtgtgagccagtgcacccggccgtatgtcttagagtgaggggaaactgaggcacaaagcgtttatgtagtttgcccaaggttacacatggtaagcagaaaaactgggatttgagggcaggcagcccggccccagagttcccttagccccctgaactgtgctaccttccaggtctacctgtttgcaggtagggagacccacaaactatcataactgcacaccgtgaagcaaacacctttgttgcagtaacccgtggcacacttcacttcccacattctccaggaggaagccgtattctggtagtttaaggaaggtgattcatggatgccccaaggaaaggctagacatcgatgaattagctcttggattgtctaagatcaacctgaaggtcctacctaaaccaaactcatatgatcccgatgaaagaggagaatacacagtgggagcagagctctttgtgtaagtttgttctattctgtttatttggaaactgcctctctccctagttctgaaagagacttgctgtgtgatagagaacaggccatttgtgcctgaaatgttctaacctgcaaattgggtttaatggtaattatcctgcctttctgtctgggaggaaacagagatgctacatagatgaaagctctgattatcatttaaaacaaataaatgtactaaatgccgtggtataatatagggaagaatggatgacttcaaagagaccatggttccgttggaggcataaaattgcctgcaaagaggcaaatgtaatttccagaccaattaatgacttgctgccctcgtaaatggatttaggacatctttgttccttgcttcttttgttaaaactcattcttagtttcattatcagctcactaataataccagtgttgttaagatgctcaaactagagcagaattgtatgctggatgtgacgctaggacctcagatcctttgatagtgcagttatgaccaggatctctttattctgtgcttcacgtcaacatcattaacccgatgaagcgaagcacaagtcataaaggcacatcagagaagccgagaaagcggggccgtacagagagcatcaaaatcaggtcagaaaaatgctgctttcctcttccaccaaaccttctccctgttgtttttacatgccccgtccctccagattcagcctccgttttgttctctctccttttccttttcctcctctcttccttaccttcccctgtgagatgcttttctgtccttttactgcacctcttccagacctatggcatttggggacgggtcacccttcctagagtgatcctgaatccagctgcctcttctttttttgtttttgtttttgtttttgagacagagtctctttctgtcgtccaggctggagtgcagtagcgcaatcttggctcactgcaacctctgcctcctgggttcaagcgattcttgtgcctcaacctcacgaggagctgggattgcaggcgcccgccaccacacccggctaatttttgtatttttagtagagacggagtttcaccatgttggccacgctggtcttgaagcccagacctcaagtgatccgcccgccttggcctcccaaagtgctgggattacaggcatgagccaccgcgcctggcctagttccctcttcttagatggagatttctgcacatgagctgtgagatccacagacatgtcactgagctcccccactctgtcagtggaagatgaatggaataaagcctgcttgcattgtggagtgcagctgtggggacagttgtcatttttgtgttttcagcttaactgtccagcatctcccctcccttcctacagcagggacatcatgccttagatataaacttagtggtgtgcagtacccaccgtggaagctgaagaagggaagtatttcctgtctctcaggcacaccccgcttccagccccataccagtcgggaagtggtcattgacctggggtggactacctggacccttgcttggggctatgagcctggagaatgtgacacaaatgaagggatgctgagactcatttcaaggaagccaccgtggtccggggttggtagtcatacagcaaggcaggtgggtagggctggcaggctgcagggatggtgtgtccactggtagcaatgtccagggatggcagcgtcctgggaatgtcatttctgctccactccttggactcgctgagctgtctccgcctccacctatcttcctacagacctcccttctagttttctgtcaattctttgagccagcaaactccatccagtacattctttcttctttcatgaaagagcttgagttggatgtaaatatatatgacctaacaattccacccctaggtgtataccctacagaaatgtgtacatgtgttcatccagagacatgctctaaatcttcacaaaaacactctccataataaccccgaacaggaaagcaccccaatgcccatgttggctggataagcacattagggtatattcacacgatggaatcccagactgcaatgggaatgagctgcaactccacccccaacttggagtgtattcaccaaccctagtgttgaacgagataaggcaaaaatgcaccataggattccatttatataaagtttaaaacccagcaaaattcatccatgcggttgcaagtagagatcagtcctaagaagacagtaaccagaagcgggcatgaggtggtgcttctggggtgttctgtttcttgatctggttgccggttacctgggtgctttccgtttgtgaacattcttggagctgtacacttttgatctgggcacttttctgtgtgtatgttatacttcaataaaaagttgggctttgtgactagc

SEQ ID NO: 146713 - DNA, 4978 bp, Artificial Sequence
  derived and/or modified sequence
cggtgccacagggacgaggcctggagagcagtcgctcctagaaccggggcgcgaagggcacccccgcctccagcacgcgccctccgccctcccggcctcgctccccccggagtgggggcctcgccggcccctggtccccgtcactcagcaacgtcgggtcagccttcgccgggttagtggcgacgcggccgcgcgaattcgcacaggtgacctcaaagcagaagctctgaattcacctctcatctgacgactgacagctgctgccaccgccagcctctgtcccttgcccaggcctgtcacacggctgcctctcagcaggggcagtagaatgaaagagggcatgtctaataacagcaccactagcatctcccaagccaggaaagctgtggagcagctaaagatggaagcctgtatggacagggtcaaggtctcccaggcagctgcggacctcctggcctactgtgaagctcacgtgcgggaagatcctctcatcattccagtgcctgcatcagaaaacccctttcgcgagaagaagttcttttgtaccattctctaactccgtgtgtgatgaaaacgcctccttttctgaccttcaaagtcccctgtagagaccatgcatgctctaagccttagggagtgagaccaacacccatccctgcccagccaacagtggccggggcttgtcttatgtttccatctgttttcttcgtggcattcaatttcatttttttccttttcattttcatgttattttcattattggcaaagaaaatcaaaatgtttatagccaaataacaaatgtgccatgtaaaagtaagtctggacttaagagtttaaaatttttaaacatcagtttccaagtttatatcatattaatacatttcagtggataatttattttaaaaaaaaaactatgcctaaatatcccttatttgcaatattcagtatcaaattagagcattttgaccaactgaaacatataacgttttcatctcctttcctggagaaagcagctgcagaggttctgtatttcctgcatttccatcatcctagtaaaaagacaacaacccacaggattggaatggttttcttttgttttttttttgttgttgttgttgttttgagatggagtctcgctctgtcacccaggctggagtgcaatggcgtgacctcagctcactgcgacctccacctcctgggttcaagcgattctcctgcctcagcctcctgagtagctgggatcataggcacgcgccaccacacccagctaattttttgtatttttagtaaagacggggtttcaccatgttggtcaggctggtctcaaactcctgacctcgtgatccacccgcctcggcctcccaaagcgctgggattacaggcgtgagccaccacacccggccgtggaatggttttcttagcatatcctcctggggccgtggcgccccggctgtgggccgtggtggatgtcccttgtttcagtggtcctacaaaggtagatggtgggcggacaccgaagtcaacttgactgtaaaagtaccccataccgttgacgcgctgtggcagacctgtgggtgcggtctcccctctccaaatgccacctcttcctgctccctcctcttttggctcctactcagtagttccattgtgggctgcagtaatataaggacctgttctggacacagcactgggcccgctggggttttagtagggcagccccttccctgcaggagtgaggcatggtgacagcagtcccctatgtgcccccaagtcatctgagcattggtgtgcattaaggtactcaatcttccaacaataaataccataagtgcatgtctgttttattttatttatttatctttttgagacagagtcttgctctgtcgcccgggctggaatgcaatggcacaatctcagctcaccgcaacctccactcgcaggttcaagtgatcctcatgtctcagcctccctagtagctgggatgacaagcacacgccaacatgcctggctcatttttgtatttttagtagagacggggtttcaccatgtcggccaggctggtctccaactactggcctcgagtgatctgcccaccttggcctcccaaagtgctgggattgcaggtgtgagccagtgcacccggccgtatgtcttagagtgaggggaaactgaggcacaaagcgtttatgtagtttgcccaaggttacacatggtaagcagaaaaactgggatttgagggcaggcagcccggccccagagttcccttagccccctgaactgtgctaccttccaggtctacctgtttgcaggtagggagacccacaaactatcataactgcacaccgtgaagcaaacacctttgttgcagtaacccgtggcacacttcacttcccacattctccaggaggaagccgtattctggtagtttaaggaaggtgattcatggatgccccaaggaaaggctagacatcgatgaattagctcttggattgtctaagatcaacctgaaggtcctacctaaaccaaactcatatgatcccgatgaaagaggagaatacacagtgggagcagagctctttgtgtaagtttgttctattctgtttatttggaaactgcctctctccctagttctgaaagagacttgctgtgtgatagagaacaggccatttgtgcctgaaatgttctaacctgcaaattgggtttaatggtaattatcctgcctttctgtctgggaggaaacagagatgctacatagatgaaagctctgattatcatttaaaacaaataaatgtactaaatgccgtggtataatatagggaagaatggatgacttcaaagagaccatggttccgttggaggcataaaattgcctgcaaagaggcaaatgtaatttccagaccaattaatgacttgctgccctcgtaaatggatttaggacatctttgttccttgcttcttttgttaaaactcattcttagtttcattatcagctcactaataataccagtgttgttaagatgctcaaactagagcagaattgtatgctggatgtgacgctaggacctcagatcctttgatagtgcagttatgaccaggatctctttattctgtgcttcacgtcaacatcattaacccgatgaagcgaagcacaagtcataaaggcacatcagagaagccgagaaagcggggccgtacagagagcatcaaaatcaggtcagaaaaatgctgctttcctcttccaccaaaccttctccctgttgtttttacatgccccgtccctccagattcagcctccgttttgttctctctccttttccttttcctcctctcttccttaccttcccctgtgagatgcttttctgtccttttactgcacctcttccagacctatggcatttggggacgggtcacccttcctagagtgatcctgaatccagctgcctcttctttttttgtttttgtttttgtttttgagacagagtctctttctgtcgtccaggctggagtgcagtagcgcaatcttggctcactgcaacctctgcctcctgggttcaagcgattcttgtgcctcaacctcacgaggagctgggattgcaggcgcccgccaccacacccggctaatttttgtatttttagtagagacggagtttcaccatgttggccacgctggtcttgaagcccagacctcaagtgatccgcccgccttggcctcccaaagtgctgggattacaggcatgagccaccgcgcctggcctagttccctcttcttagatggagatttctgcacatgagctgtgagatccacagacatgtcactgagctcccccactctgtcagtggaagatgaatggaataaagcctgcttgcattgtggagtgcagctgtggggacagttgtcatttttgtgttttcagcttaactgtccagcatctcccctcccttcctacagcagggacatcatgccttagatataaacttagtggtgtgcagtacccaccgtggaagctgaagaagggaagtatttcctgtctctcaggcacaccccgcttccagccccataccagtcgggaagtggtcattgacctggggtggactacctggacccttgcttggggctatgagcctggagaatgtgacacaaatgaagggatgctgagactcatttcaaggaagccaccgtggtccggggttggtagtcatacagcaaggcaggtgggtagggctggcaggctgcagggatggtgtgtccactggtagcaatgtccagggatggcagcgtcctgggaatgtcatttctgctccactccttggactcgctgagctgtctccgcctccacctatcttcctacagacctcccttctagttttctgtcaattctttgagccagcaaactccatccagtacattctttcttctttcatgaaagagcttgagttggatgtaaatatatatgacctaacaattccacccctaggtgtataccctacagaaatgtgtacatgtgttcatccagagacatgctctaaatcttcacaaaaacactctccataataaccccgaacaggaaagcaccccaatgcccatgttggctggataagcacattagggtatattcacacgatggaatcccagactgcaatgggaatgagctgcaactccacccccaacttggagtgtattcaccaaccctagtgttgaacgagataaggcaaaaatgcaccataggattccatttatataaagtttaaaacccagcaaaattcatccatgcggttgcaagtagagatcagtcctaagaagacagtaaccagaagcgggcatgaggtggtgcttctggggtgttctgtttcttgatctggttgccggttacctgggtgctttccgtttgtgaacattcttggagctgtacacttttgatctgggcacttttctgtgtgtatgttatacttcaataaaaagttgggctttgtgactagc

SEQ ID NO: 146714 - DNA, 228 bp, Artificial Sequence
  derived and/or modified sequence
atgaaggagggcatgagcaacaacagcaccaccagcatcagccaggccaggaaggctgtggagcagctgaagatggaggcctgcatggacagagtgaaggtgtcccaggccgctgctgacctgctggcctactgtgaggcccacgtgcgggaggaccccctcatcatccctgtgcctgccagcgagaaccccttccgggagaagaagttcttctgcaccatcctgtag

SEQ ID NO: 146715 - DNA, 228 bp, Artificial Sequence
  derived and/or modified sequence
atgaaggagggcatgagcaacaacagcaccaccagcatcagccaggctaggaaagctgtagagcagttgaaaatggaggcctgcatggatcgtgttaaagtctcgcaagccgctgccgatctcctggcttactgcgaagctcacgtgcgagaagatccactgattatcccggtgcctgcaagtgagaacccgttccgggaaaagaagttcttttgtaccattctctag

SEQ ID NO: 146716 - DNA, 228 bp, Artificial Sequence
  derived and/or modified sequence
atgaaggagggcatgagcaacaacagcaccaccagcatcagccaggcccgaaaagctgtggaacaactgaaaatggaggcctgcatggaccgggtgaaagtgagccaggctgccgcggacctgctcgcttattgcgaggcgcacgtgcgagaagacccgctaattatacctgtcccagcctctgagaacccgttcagagagaaaaaatttttctgtacaatcctttag

SEQ ID NO: 146717 - DNA, 228 bp, Artificial Sequence
  derived and/or modified sequence
atgaaggagggcatgagcaacaacagcaccaccagcatcagccaggccagaaaggccgtcgagcagctcaagatggaggcctgtatggaccgggtgaaagtttctcaggccgctgctgaccttttagcgtattgcgaggcccacgttcgtgaggacccactgatcatccccgtccctgcatcagaaaacccttttagggaaaagaagttcttttgcaccatcttgtag

SEQ ID NO: 146718 - DNA, 228 bp, Artificial Sequence
  derived and/or modified sequence
atgaaggagggcatgagcaacaacagcaccaccagcatcagccaggcccggaaggctgttgaacaactgaagatggaggcctgtatggatcgggtgaaagtgagccaggccgccgccgacctgctggcttactgcgaagcacacgtaagagaggacccactgataatcccagtgcccgccagcgagaatccttttcgcgagaagaaattcttttgtaccatcttgtag

SEQ ID NO: 146719 - DNA, 228 bp, Artificial Sequence
  derived and/or modified sequence
atgaaggaaggaatgtcaaacaacagtacaacgtctatcagccaggccaggaaagccgtagagcaactgaaaatggaagcttgcatggaccgggtaaaagtcagccaggccgctgccgatctccttgcttactgcgaggcccatgtcagagaagacccgttgattatccccgttcctgcttcagagaatccctttcgggaaaagaaatttttctgcaccattctctag

SEQ ID NO: 146720 - DNA, 228 bp, Artificial Sequence
  derived and/or modified sequence
atgaaggaggggatgtctaacaactccacaacttcaatcagtcaggccagaaaggccgtggagcagctgaagatggaagcttgcatggatagagtcaaggtaagtcaggcggcagctgacttactggcttattgtgaagcccatgtgcgggaggaccccctaattatacccgttcctgccagtgagaatccatttagagaaaaaaaatttttttgcaccattctgtag

SEQ ID NO: 146721 - DNA, 228 bp, Artificial Sequence
  derived and/or modified sequence
atgaaggagggcatgagcaacaattcgaccaccagtatcagccaggcaaggaaggccgtggaacagctgaagatggaagcctgcatggaccgggttaaagtgtctcaggcagcagccgaccttctggcatattgcgaggcccatgtccgggaagacccccttattatccccgttccagcatctgagaaccctttccgagagaagaagttcttttgcaccatcttgtag

SEQ ID NO: 146722 - DNA, 228 bp, Artificial Sequence
  derived and/or modified sequence
atgaaggaagggatgtcaaataatagcacaacttctatatcgcaagctcgcaaggcggtggaacagctcaagatggaggcatgcatggaccgagtcaaagtttcccaagcagccgctgacctgctggcctattgcgaagctcacgtgcgggaagaccctctcattatccccgtcccagcctccgagaatcccttccgggaaaagaaatttttctgtactatcttatag

SEQ ID NO: 146723 - protein, 286 aa, Artificial Sequence
  derived and/or modified sequence
MAVPQPMPSIPEDLESREAMVAFFNSAVASAEEEQARLRGQLKEQRVRCRRLAHLLASAQKEPEAAAPAPGTGGDSVCGETHRALQGAMEKLQSRFMELMQEKADLKERVEELEHRCIQLSGETDTIGEYIALYQSQRAVLKERHREKEEYISRLAQDKEEMKVKLLELQELVLRLVGDRNEWHGRFLAAAQNPADEPTSGAPAPQELGAANQQGDLCEVSLAGSVEPAQGEAREGSPRDNPTAQQIMQLLREMQNPRERPGLGSNPCIPFFYRADENDEVKITVI

SEQ ID NO: 146724 - protein, 1002 aa, Artificial Sequence
  derived and/or modified sequence
MWPQPRLPPRPAMSEETRQSKLAAAKKKLREYQQRNSPGVPTGAKKKKKIKNGSNPETTTSGGCHSPEDTPKDNAATLQPSDDTVLPGGVPSPGASLTSMAASQNHDADNVPNLMDETKTFSSTESLRQLSQQLNGLVCESATCVNGEGPASSANLKDLESRYQQLAVALDSSYVTNKQLNITIEKLKQQNQEITDQLEEEKKECHQKQGALREQLQVHIQTIGILVSEKAELQTALAHTQHAARQKEGESEDLASRLQYSRRRVGELERALSAVSTQQKKADRYNKELTKERDALRLELYKNTQSNEDLKQEKSELEEKLRVLVTEKAGMQLNLEELQKKLEMTELLLQQFSSRCEAPDANQQLQQAMEERAQLEAHLGQVMESVRQLQMERDKYAENLKGESAMWRQRMQQMSEQVHTLREEKECSMSRVQELETSLAELRNQMAEPPPPEPPAGPSEVEQQLQAEAEHLRKELEGLAGQLQAQVQDNEGLSRLNREQEERLLELERAAELWGEQAEARRQILETMQNDRTTISRALSQNRELKEQLAELQSGFVKLTNENMEITSALQSEQHVKRELGKKLGELQEKLSELKETVELKSQEAQSLQQQRDQYLGHLQQYVAAYQQLTSEKEVLHNQLLLQTQLVDQLQQQEAQGKAVAEMARQELQETQERLEAATQQNQQLRAQLSLMAHPGEGDGLDREEEEDEEEEEEEAVAVPQPMPSIPEDLESREAMVAFFNSAVASAEEEQARLRGQLKEQRVRCRRLAHLLASAQKEPEAAAPAPGTGGDSVCGETHRALQGAMEKLQSRFMELMQEKADLKERVEELEHRCIQLSGETDTIGEYIALYQSQRAVLKERHREKEEYISRLAQDKEEMKVKLLELQELVLRLVGDRNEWHGRFLAAAQNPADEPTSGAPAPQELGAANQQGDLCEVSLAGSVEPAQGEAREGSPRDNPTAQQIMQLLREMQNPRERPGLGSNPCIPFFYRADENDEVKITVI

SEQ ID NO: 146725 - protein, 194 aa, Artificial Sequence
  derived and/or modified sequence
MVTWSHSNSNKELKQENSALAEQLQVVLIDKAGMQCDLEELKKKLELTELTLQQLSSWCEAPDANQQLQQPTDERAQLEAHLGQVMEWLKYLQMEREQYAEYLHGESAMWWQRMREMSEQVHTLREERVHSMSRVQELETILAELRNQLNPCPRSLQQGPPKWSRSYKQRLSTCGRSWRIWQDSFKPKWKKMRA

SEQ ID NO: 146726 - DNA, 3009 bp, Artificial Sequence
  derived and/or modified sequence
atgtggccccagcccagactgccccccagacccgccatgagcgaggagaccagacagagcaagctggccgccgccaagaagaagctgagagagtaccagcagagaaacagccccggcgtgcccaccggcgccaagaagaagaagaagatcaagaacggcagcaaccccgagaccaccaccagcggcggctgccacagccccgaggacacccccaaggacaacgccgccaccctgcagcccagcgacgacaccgtgctgcccggcggcgtgcccagccccggcgccagcctgaccagcatggccgccagccagaaccacgacgccgacaacgtgcccaacctgatggacgagaccaagaccttcagcagcaccgagagcctgagacagctgagccagcagctgaacggcctggtgtgcgagagcgccacctgcgtgaacggcgagggccccgccagcagcgccaacctgaaggacctggagagcagataccagcagctggccgtggccctggacagcagctacgtgaccaacaagcagctgaacatcaccatcgagaagctgaagcagcagaaccaggagatcaccgaccagctggaggaggagaagaaggagtgccaccagaagcagggcgccctgagagagcagctgcaggtgcacatccagaccatcggcatcctggtgagcgagaaggccgagctgcagaccgccctggcccacacccagcacgccgccagacagaaggagggcgagagcgaggacctggccagcagactgcagtacagcagaagaagagtgggcgagctggagagagccctgagcgccgtgagcacccagcagaagaaggccgacagatacaacaaggagctgaccaaggagagagacgccctgagactggagctgtacaagaacacccagagcaacgaggacctgaagcaggagaagagcgagctggaggagaagctgagagtgctggtgaccgagaaggccggcatgcagctgaacctggaggagctgcagaagaagctggagatgaccgagctgctgctgcagcagttcagcagcagatgcgaggcccccgacgccaaccagcagctgcagcaggccatggaggagagagcccagctggaggcccacctgggccaggtgatggagagcgtgagacagctgcagatggagagagacaagtacgccgagaacctgaagggcgagagcgccatgtggagacagagaatgcagcagatgagcgagcaggtgcacaccctgagagaggagaaggagtgcagcatgagcagagtgcaggagctggagaccagcctggccgagctgagaaaccagatggccgagccccccccccccgagccccccgccggccccagcgaggtggagcagcagctgcaggccgaggccgagcacctgagaaaggagctggagggcctggccggccagctgcaggcccaggtgcaggacaacgagggcctgagcagactgaacagagagcaggaggagagactgctggagctggagagagccgccgagctgtggggcgagcaggccgaggccagaagacagatcctggagaccatgcagaacgacagaaccaccatcagcagagccctgagccagaacagagagctgaaggagcagctggccgagctgcagagcggcttcgtgaagctgaccaacgagaacatggagatcaccagcgccctgcagagcgagcagcacgtgaagagagagctgggcaagaagctgggcgagctgcaggagaagctgagcgagctgaaggagaccgtggagctgaagagccaggaggcccagagcctgcagcagcagagagaccagtacctgggccacctgcagcagtacgtggccgcctaccagcagctgaccagcgagaaggaggtgctgcacaaccagctgctgctgcagacccagctggtggaccagctgcagcagcaggaggcccagggcaaggccgtggccgagatggccagacaggagctgcaggagacccaggagagactggaggccgccacccagcagaaccagcagctgagagcccagctgagcctgatggcccaccccggcgagggcgacggcctggacagagaggaggaggaggacgaggaggaggaggaggaggaggccgtggccgtgccccagcccatgcccagcatccccgaggacctggagagcagagaggccatggtggccttcttcaacagcgccgtggccagcgccgaggaggagcaggccagactgagaggccagctgaaggagcagagagtgagatgcagaagactggcccacctgctggccagcgcccagaaggagcccgaggccgccgcccccgcccccggcaccggcggcgacagcgtgtgcggcgagacccacagagccctgcagggcgccatggagaagctgcagagcagattcatggagctgatgcaggagaaggccgacctgaaggagagagtggaggagctggagcacagatgcatccagctgagcggcgagaccgacaccatcggcgagtacatcgccctgtaccagagccagagagccgtgctgaaggagagacacagagagaaggaggagtacatcagcagactggcccaggacaaggaggagatgaaggtgaagctgctggagctgcaggagctggtgctgagactggtgggcgacagaaacgagtggcacggcagattcctggccgccgcccagaaccccgccgacgagcccaccagcggcgcccccgccccccaggagctgggcgccgccaaccagcagggcgacctgtgcgaggtgagcctggccggcagcgtggagcccgcccagggcgaggccagagagggcagccccagagacaaccccaccgcccagcagatcatgcagctgctgagagagatgcagaaccccagagagagacccggcctgggcagcaacccctgcatccccttcttctacagagccgacgagaacgacgaggtgaagatcaccgtgatctag

SEQ ID NO: 146727 - DNA, 3009 bp, Artificial Sequence
  derived and/or modified sequence
atgtggccccaacctcggctgcccccacgccccgctatgtctgaagaaacacgccagagcaagctagccgcggcaaaaaagaagctgcgggagtaccaacagaggaatagccccggggtccctacaggcgcgaagaaaaaaaaaaagattaaaaatggctctaaccccgagaccactacctccgggggttgtcactctccggaggacaccccgaaggacaacgctgccacgctgcagccgtcagatgataccgtgctgcccggaggagtgccctctccaggggcttccctgaccagtatggcggcttcccaaaatcacgacgcagataacgtccctaatctgatggacgagaccaaaactttctcgtccaccgagtctctgcggcaactgtcacagcaactgaatgggcttgtgtgtgagagcgctacctgcgtaaatggagaaggccctgccagctccgcaaatctgaaagaccttgaaagccgttaccagcagcttgcagtggccctcgatagcagctacgttacaaacaaacagctgaacattaccatcgagaagttgaagcagcaaaatcaggaaatcactgatcagttagaggaggaaaaaaaagaatgccaccagaagcaaggagctctgcgagagcagttgcaggtccacatccagaccatcggcatcctagttagtgaaaaagcggaactccagactgcactggcacacactcagcacgctgcccgccagaaggagggcgagtcagaagatctcgcttcacgcttacagtacagccggcgtcgcgttggcgaattggaaagagctctttccgctgtgtctacccaacaaaaaaaagccgaccggtataataaagagttgaccaaggaaagggacgccttaaggctcgaactgtataagaacacccagtcaaatgaagacttgaagcaggagaagtccgagctggaagagaagctcagggtgctggtgacagaaaaagccggaatgcagctcaatctcgaggagttacaaaagaaactcgagatgacagaattgctgctacagcagttctcctcaaggtgtgaagcccctgacgcgaaccagcagctgcagcaagccatggaggaacgtgctcagctcgaggcacacctcggccaggtgatggagagcgttaggcagcttcagatggagagggacaagtatgcggaaaacctcaagggtgagtcagctatgtggcgccaacggatgcagcagatgtcggaacaggtacatacacttagggaggaaaaggagtgtagcatgtcccgagtgcaggagttagagacatcactcgctgagctgaggaatcaaatggctgagcccccccccccagagcctccagcaggtccgtcggaggtggagcagcaactgcaggccgaggccgagcaccttcggaaagaactggaagggttggcaggtcagctgcaggcccaggtgcaggacaatgaggggcttagccggctcaatcgagaacaggaggaaagactgttggaactggaacgcgcggctgagctatggggcgagcaggccgaagcccgccgacaaatcctcgagacaatgcagaacgatagaaccacgattagcagagctctttctcaaaatcgcgagctcaaagaacagctcgccgaactccaatccggtttcgtcaaactgaccaatgagaatatggagattacaagtgcattacagagcgaacaacacgtcaagcgagagctggggaaaaaactcggagaactgcaagaaaaactgtccgagttgaaggagactgtggaactgaaaagccaggaagctcagagcctgcagcagcagcgagatcagtatctcggccatctgcagcagtacgttgcggcttatcagcagttaacctctgaaaaggaagtgctccataatcagttattattacagactcaactggtggatcagctgcagcagcaggaggcccagggcaaagctgtggccgagatggctaggcaggagttgcaggagactcaggaaaggctggaagccgccactcagcagaaccaacaactacgcgctcaacttagtctgatggctcaccccggggagggcgacggcctggacagagaggaagaggaggatgaggaggaagaggaggaggaagcagtcgccgtgccacagcctatgccttcaattcccgaggatctggagtctagagaggccatggtggcgttctttaattccgcagtggcatcagctgaggaagagcaggcacgcctgcgggggcagctgaaggagcagagagtgaggtgtcgtagacttgcgcacctactcgccagcgcccagaaagagccagaggccgccgcaccggctcctggcactggcggggattctgtatgtggcgagacacatcgcgctctacagggcgcaatggagaagctacagtcacgatttatggaactcatgcaggaaaaagccgatctgaaggagagggttgaggagctggagcaccggtgcatacagctatccggagagacagatacaatcggcgaatacattgcgctgtatcagagtcaacgcgccgtgctcaaagagagacacagggaaaaggaggaatacatctcgcgcctcgcccaggacaaggaagagatgaaggtgaaactactcgagttacaagagctggtcctaaggttggttggagataggaacgaatggcatggccgctttctggccgccgcccagaatcctgccgacgaacctacctctggggcaccagccccccaggaactaggcgctgcaaatcagcagggagatctttgtgaggtgtcccttgctggaagtgtggaacccgctcaaggggaggcacgcgaggggagtccccgcgataaccccacagctcagcagattatgcagctcctgagggaaatgcagaatcctagagagcggcccggcctaggttcgaatccctgcatcccctttttctatcgggctgacgaaaacgacgaagtgaagattaccgtgatttag

SEQ ID NO: 146728 - DNA, 4260 bp, Artificial Sequence
  derived and/or modified sequence
cgggatcgcgctgatgtggccccaaccccgcctccctccccgccccgcgatgtcggaagaaacccgacagagcaaattggccgcagcgaagaaaaagttgagagaatatcagcagaggaatagccctggtgttcctacaggagcgaaaaagaagaagaaaataaaaaatggcagtaaccctgagacaaccacttctggtggttgccactcacctgaggatacacccaaggacaatgctgctactctacaaccatctgatgacaccgtgttacctggcggtgtcccttcccctggtgccagtctcactagcatggcggcatctcagaatcatgatgctgacaatgtccctaatctcatggatgaaaccaagactttctcatcaaccgagagcctgcgacaactctcccaacagctcaatggtcttgtttgtgagtctgcgacatgtgtcaatggggagggccctgcatcgtctgctaacctgaaggatctggagagccggtaccaacagctagcggtagccctggactccagctatgtaacaaacaaacaactcaatatcacgatagagaaattgaaacaacagaaccaagaaattacggatcagttggaagaagaaaagaaagaatgccaccaaaagcagggagccctaagggagcagttacaggttcacattcagaccatagggatcctcgtatcagagaaagctgagttacagacagccctggctcacactcagcatgctgccaggcagaaagaaggagagtctgaagatctggccagccgcctgcagtattcccggcggcgtgtgggagagttggagcgggctctctctgctgtctccacgcagcagaagaaggcagacaggtacaacaaggagttaaccaaagagagagacgccctcaggctggagttatacaagaacacccaaagcaatgaggacctgaagcaagagaaatcagaattggaagagaagcttcgggtcctagtgactgagaaggctggcatgcagcttaacttggaagaattgcaaaagaagttagagatgacggaactcctgcttcaacagttttcaagccggtgtgaagcccctgatgctaaccagcagttacagcaggccatggaggagcgggcacagctggaagcacacctggggcaggtaatggagtcggttagacaactacaaatggagagagataaatatgcggagaatctcaaaggagagagcgccatgtggcggcagaggatgcagcagatgtcagagcaggtgcacacattgagagaggagaaggaatgtagcatgagtcgggtacaggagctggagacgagcttggctgaactgaggaaccagatggctgaacccccgcccccagagcccccagcagggccctccgaggtggagcagcagctacaagcggaggctgagcacctgcggaaggagctggagggtctggcaggacagcttcaagcccaggtgcaagacaatgagggcttgagtcgcctgaaccgggagcaggaggagaggctgctggagctggagcgggcggccgagctctggggggagcaggcggaggcgcgcaggcaaatcctggagaccatgcagaacgaccgcactaccatcagccgcgcactctcccagaaccgggagctcaaggagcagctggctgagctgcagagcggatttgtaaagctgactaatgagaacatggagatcaccagcgcactgcagtcggagcagcacgtcaagagggagctgggaaagaagctgggcgagctgcaggagaagctgagcgagctgaaggaaacggtggagctgaagagccaagaggctcaaagtctgcagcagcagcgagaccagtacctgggacacctgcagcagtatgtggccgcctatcagcagctgacctctgagaaggaggtgctgcataatcagctactgctgcagacccagctcgtggaccagctgcagcagcaggaagctcagggcaaagcggtggccgagatggcccgccaagagttgcaggaaacccaggagcgcctggaagctgccacccagcagaatcagcagctacgggcccagttgagcctcatggctcaccctggggaaggagatggactggaccgggaggaggaggaggatgaggaggaggaggaggaggaggcggtggcagtacctcagcccatgccaagcatcccggaggacctggagagccgggaagccatggtggcatttttcaactcagctgtagccagtgccgaggaggagcaggcaaggctacgtgggcagctgaaggagcaaagggtgcgctgccggcgcctggctcacctgctggcctcggcccagaaggagcctgaggcagcagccccagccccagggaccgggggtgattctgtgtgtggggagacccaccgggccctgcagggggccatggagaagctgcagagccgctttatggagctcatgcaggagaaggcagacctgaaggagagggtagaggaactggaacatcgctgcatccagctttctggagagacagacaccattggagagtacattgcactgtaccagagccagagggcagtgctgaaggagcggcaccgggagaaggaggagtacatcagcaggctggcccaagacaaggaggagatgaaggtgaagctgctggagctgcaggagctggtcttacggcttgtgggcgaccgcaacgagtggcatggcagattcctggcagctgcccagaaccctgctgatgagcccacttcaggggccccagccccccaggaacttggggctgccaaccagcagggtgatctttgcgaggtgagcctcgccggcagtgtggagcctgcccaaggagaggccagggagggttctccccgtgacaaccccactgcacagcagatcatgcagctgcttcgtgagatgcagaacccccgggagcgcccaggcttgggcagcaacccctgcattccttttttttaccgggctgacgagaatgatgaggtgaagatcactgtcatctaaaagccggctactgtcagcaaagcctgaagaagtggggctggataccctgcccccaccatatccctaccatcccttctcagtcaaccctttacccttacagtagcaagcatagacccctgtctaacgggggtagacaggtgcagatgaggtgaagatcactgtcatctaaaagctggccactaaattaaaaaaaaattaaaagttatgggattaaaaaaagttatgggataaaaaaggttatgggtaacttatggtataaaagttatgaaaaaaggccaggtgcagtggctcacgcctgtaatcccagcacttttgggaggctgaggttgggagttcaagaccagcctggtcaacatggtgaaactgtgtctctactaaaaatacaaaaattagccaggcatggtggcacgtgcctgtaatcccagctactcgggaggctgaggcaggagaatcgcttgaacctgggaggtggaggttgcagtgggctgagatcacgccattgcactccagcctgggcgacagagtgagactctgtctcaaaaaaaaaaaaaattatgaaaaaagttatgggattaaagaaagtcaggataaaaattttaaaaagcaggccactgtcagcaaagcctggagaagtggggccggaggctccgcccccatcatgtgcctgccaccccttcccagtcatccctttactcttacagtagcaaataagacccctgtctaatggggggagacaaatgtgtagacccttagccaccttggccagggctgactccttaaatttctggatgatgatgattgttatttaatagccagaggctcatataattggcctctttggaagaggcctcatggcctccttactctcaccaaagcaatttttccctcaggggggctcccatcttcttacacagagaggcagctgaggcaggacagtggggctaactgtagaccaggcgagggcacgggctgctggggtggccctgcttccccagtgtacatattgtatctgtgtaacattttgtatattccaggggtagggccgccccctgtatcatacctagcagaggttggagctggcacatggggaggaggttctaataattatttggggctgggaaacttatttattgatagcataggacagaggaaggaggcggggatggggtcgtggcgccctggtgatgcgactcctgtttattttgctttttatttcggaataaatggatttagccata

SEQ ID NO: 146729 - DNA, 3009 bp, Artificial Sequence
  derived and/or modified sequence
atgtggccccagccccggctgccccccaggcctgccatgtctgaggagacccggcagagcaagctggccgccgccaagaagaagctgcgggagtaccagcagaggaacagccctggggtgcccaccggggccaagaagaagaagaagatcaagaatggcagcaaccctgagaccaccaccagcggcggctgccacagccctgaggacacccccaaggacaatgctgccaccctgcagcccagtgatgacacagtgctgcctggaggagtgcccagccctggggccagcctgacctccatggccgccagccagaaccatgatgctgacaacgtgcccaacctgatggatgagaccaagaccttcagcagcacagagagcctgcggcagctgagccagcagctgaatggcctggtgtgtgagagcgccacctgtgtgaatggagagggccctgccagcagcgccaacctgaaggacctggagagccgctaccagcagctggccgtggccctggacagcagctatgtgaccaacaagcagctgaacatcaccatcgagaagctgaagcagcagaaccaggagatcacagaccagctggaggaggagaagaaggagtgccaccagaagcagggcgccctgcgggagcagctgcaggtgcacatccagaccatcggcatcctggtgtctgagaaggccgagctgcagacagccctggcccacacccagcacgccgcccggcagaaggagggggagagcgaggacctggccagccggctgcagtacagcagaagaagagtgggggagctggagcgggccctgtctgctgtgtccacccagcagaagaaggctgaccgctacaacaaggagctgaccaaggagagagatgccctgcggctggagctgtacaagaacacccagagcaatgaagacctgaagcaggagaagtctgagctggaggagaagctgcgggtgctggtgacagagaaggccggcatgcagctgaacctggaggagctgcagaagaagctggagatgacagagctgctgctgcagcagttcagcagccgctgtgaggccccagatgccaaccagcagctgcagcaggccatggaggagcgggcccagctggaggcccacctgggccaggtgatggagagcgtgcggcagctgcagatggagcgggacaagtatgcagagaacctgaagggggagagcgccatgtggaggcagaggatgcagcagatgtctgagcaggtgcacaccctgcgggaggagaaggagtgcagcatgagccgggtgcaggagctggagaccagcctggccgagctgaggaaccagatggccgagcccccacctcctgagcccccagctggccccagcgaggtggagcagcagctgcaggccgaggccgagcacctgaggaaggagctggagggcctggccggccagctgcaggcccaggtgcaggacaatgaaggcctgagccggctgaaccgggagcaggaggagcggctgctggagctggagagagctgctgagctgtggggcgagcaggccgaggcccggcggcagatcctggagaccatgcagaatgacaggaccaccatcagccgggccctgagccagaaccgggagctgaaggagcagctggccgagctgcagagcggctttgtgaagctgaccaatgaaaacatggagatcaccagcgccctgcagagcgagcagcacgtgaagcgggagctgggcaagaagctgggggagctgcaggagaagctgtctgagctgaaggagaccgtggagctgaagagccaggaggcccagagcctgcagcagcagagggaccagtacctgggccacctgcagcagtatgtggccgcctaccagcagctgaccagcgagaaggaggtgctgcacaaccagctgctgctgcagacccagctggtggaccagctgcagcagcaggaggcccagggcaaggctgtggccgagatggcccggcaggagctgcaggagacccaggagcggctggaggccgccacccagcagaaccagcagctgcgggcccagctgagcctgatggcccaccctggagaaggagatggcctggaccgggaggaggaggaggatgaggaggaggaggaggaggaggccgtggccgtgccccagcccatgcccagcatccctgaggacctggagagccgggaggccatggtggccttcttcaacagcgctgtggccagcgctgaggaggagcaggcccggctgcggggccagctgaaggagcagagggtgcgctgccggcggctggcccacctgctggccagcgcccagaaggagcctgaggccgccgccccagcccctggcaccggcggggacagcgtgtgtggggagacccaccgggccctgcagggcgccatggagaagctgcagagccgcttcatggagctgatgcaggagaaggctgacctgaaggagcgggtggaggagctggagcaccgctgcatccagctgtctggagaaacagacaccatcggggagtacatcgccctgtaccagagccagagagctgtgctgaaggagcggcaccgggagaaggaggagtacatcagccggctggcccaggacaaggaggagatgaaggtgaagctgctggagctgcaggagctggtgctgcggctggtgggggacagaaatgagtggcacggccgcttcctggccgccgcccagaacccagcagatgagcccaccagcggggccccagccccccaggagctgggcgccgccaaccagcagggcgacctgtgtgaggtgtccctggccggctctgtggagcccgcccagggcgaggcccgggagggcagcccccgggacaaccccacagcccagcagatcatgcagctgctgcgggagatgcagaacccccgggagaggcctggcctgggcagcaacccctgcatccccttcttctacagagcagatgaaaatgatgaggtgaagatcaccgtcatctag

SEQ ID NO: 146730 - DNA, 3009 bp, Artificial Sequence
  derived and/or modified sequence
atgtggccccagccccggctgcccccccggcccgccatgagcgaggagacacggcagtccaagctggccgcagcgaagaaaaagctgcgggagtaccaacagcgcaatagccccggagttcccacaggtgctaagaagaaaaagaaaatcaagaacgggtccaacccagaaaccaccacgagtggaggttgccacagtcctgaagacacgcctaaggataacgctgctacactgcagcccagcgacgacactgttctgcctgggggtgtaccctcacccggcgcctccctgactagcatggccgcaagtcaaaaccatgacgccgacaacgttcccaacctaatggacgaaacgaaaacctttagcagcacagagtcgctgcgacaactgagtcagcagctgaacgggcttgtgtgcgaatcagcaacatgtgtgaacggggaggggcccgcctcttccgcgaatctgaaggacctggaatcccgttaccaacaacttgccgttgccctggatagctcatacgtgaccaataaacaactaaatattactatcgagaaactgaaacaacaaaatcaggagatcacagaccagcttgaagaggagaagaaggaatgtcatcagaagcagggtgctttacgggagcagctgcaggtccacatccagaccataggcatcttagtgtctgagaaagccgaactgcagacagccctggcacatacacagcatgctgcgaggcaaaaggaaggcgagagcgaagatttggcatcccgccttcagtatagccgccggagagtcggcgaactggagagagccctctcagcagtcagtacacaacagaagaaggcagacagatacaacaaagagctcactaaagagcgtgacgcactgagattggagttgtataaaaatacccagagtaacgaggatctaaagcaggagaagagcgaactggaggaaaagctgagggtgctagtgacagaaaaggcgggcatgcaactgaacctcgaggaattgcagaagaaactcgagatgaccgaactgcttctgcaacagttctccagccggtgtgaagctcctgatgccaaccaacagttgcagcaagctatggaggagcgcgctcagctcgaggcccatctggggcaggtgatggaatccgtgaggcaactacagatggagcgggataaatacgctgagaatctgaaaggagaatcagctatgtggcggcagcggatgcagcaaatgtccgagcaagtgcatactctccgcgaagagaaggaatgctctatgagcagagtccaggaactagagaccagccttgccgagttgcggaaccagatggccgaaccgccgccacccgagccccccgcagggccaagcgaggtcgagcagcagctgcaggccgaggctgaacatttgagaaaggagctagaaggcttggcagggcaacttcaggcccaggtgcaggataacgaagggctttcacggcttaatagagagcaggaagagcgcctccttgaactggagcgggctgccgaactatggggcgagcaagctgaagcccggcgacagatcttggaaacaatgcagaacgatcgtaccacaatctctcgcgcgctatctcagaatcgagagctcaaagagcaactggcagagctgcagtcaggctttgtgaagctgaccaatgagaatatggaaataacctcagccttacaatccgaacagcatgtgaagcgagagctaggtaagaaactgggggagttacaggaaaaactgagcgagctgaaggaaacagtggaactgaagtcgcaggaggctcagagcctacagcagcaacgggaccagtaccttggacatctgcaacagtatgtagctgcctatcagcagctgacctccgaaaaggaggttttacataaccaattgctgctgcagacacagttggtagatcagctgcaacagcaagaagcccagggaaaagcagtggccgaaatggccaggcaggagcttcaggagacacaggaacggctcgaggccgctactcaacagaatcagcagctgagagctcaactgtcactgatggcccatccaggagagggcgatggcctcgaccgcgaggaggaggaggacgaagaggaagaagaagaagaagctgtggcagttccgcaaccaatgccttcgatcccggaagatcttgagtctagagaagccatggtggccttcttcaattcggccgtggcatcagctgaggaggaacaggcaagactgcggggccagttaaaagagcaacgggttcgctgtcgcagactggcccacttgctggcttccgcacagaaagaacctgaagccgctgcccccgctcctggaacagggggtgattctgtgtgtggcgagactcacagggccttgcagggggcgatggaaaaactccagagtcgttttatggagcttatgcaggagaaggccgacctgaaagagcgggtggaagaactagagcacagatgcattcagctctcaggagagaccgacaccataggagaatacatcgctttgtaccagagtcaaagagcagtcttgaaggagagacaccgggagaaagaggagtacattagtagactggcacaggataaggaggagatgaaggtcaaactgctggagcttcaagaactggtgcttcgtctagtgggcgatcggaacgaatggcacggacggttcctggcagccgctcagaatccagcagatgaacctacctctggcgctccggccccgcaggaacttggagcggccaaccagcagggcgacctgtgcgaagtttccttggccgggtcagtcgaacccgcccaaggagaggcccgtgaagggtctcccagggacaatcctaccgcacagcagattatgcagctcctaagagagatgcagaacccacgcgagcggcccggactcggcagtaatccatgtatcccttttttttaccgggctgatgagaatgatgaagtaaagataacagttatctag

SEQ ID NO: 146731 - DNA, 3009 bp, Artificial Sequence
  derived and/or modified sequence
atgtggccacagccacggctgcctccacgtcccgcaatgtcagaagaaactcgccagagtaagctagctgctgctaagaagaagctcagagagtaccagcaaaggaacagcccaggcgtgcctacaggggcaaaaaagaaaaaaaagattaaaaatggatcaaatccggaaacgactacaagcggtggctgtcacagtcccgaagacaccccaaaggacaatgcagctaccctgcagccctcggacgatacagtgctgcctggtggtgtgccgagcccaggagcatcactaacatccatggccgcttcacagaaccacgacgcagacaacgttcctaatctgatggatgagacgaagaccttctctagtacagagagcttgcgccaactgtcccagcagctcaacgggctcgtctgcgaaagtgctacctgtgtgaatggagagggaccagcttcatccgctaacctgaaggatctggagtcaaggtaccaacagctggcggtggctctggactcctcgtacgtaacaaacaaacagttaaatatcacaatagagaagctgaagcaacaaaaccaggaaatcacggaccaactcgaagaggagaaaaaggaatgtcatcagaaacagggagctctgcgagagcaactgcaagtccatattcagacgattgggatcctggtgagcgagaaagccgagctccaaaccgcactcgctcatacacagcacgcagccaggcaaaaagagggagaaagcgaggacctggctagccggctgcagtattctcgtcgccgagtgggagagttagaacgggctctcagcgcggtgagcacccagcagaaaaaggctgataggtataacaaggaacttaccaaagaacgagacgccttgagattggaactgtacaagaatacgcaatcaaatgaggaccttaagcaagaaaaatctgagctggaagaaaaactacgcgtcttggtgacagagaaggcaggaatgcaactgaatcttgaagaactacaaaaaaagctggagatgacagagctccttttgcagcagttttctagcaggtgcgaagcacctgacgcgaaccagcagctccaacaggctatggaggagagagcccaactggaggcccacttgggccaggttatggaatccgtaaggcagctgcaaatggagcgtgacaagtacgctgaaaacctgaagggtgagtccgccatgtggagacagcgcatgcagcagatgtccgagcaggttcatacactccgggaggagaaggagtgctctatgagcagagtgcaggaacttgagacctctctggcagagctcagaaaccagatggctgaaccccctccaccggaacctcctgctggcccatcagaagtggagcagcagctgcaggccgaagctgaacacctgcggaaagagcttgagggacttgcagggcaactgcaggcacaggttcaggataacgaggggctgagtaggctcaaccgggagcaggaggagcggttgctcgagcttgagcgggctgcagaactctggggtgagcaggccgaggcccgacgccaaattcttgagaccatgcagaacgatagaacaactattagtcgggcactgtcacaaaaccgcgagttgaaggaacagttggccgaactccagagtggctttgtaaaactaactaatgagaatatggagatcacatccgccctgcagtccgaacagcatgtgaaacgtgagctcgggaagaagctgggggagctccaagaaaaattgtctgaactaaaagagaccgtagaactgaagagtcaagaagcccaatctctgcaacaacagagggaccagtatctgggccatcttcagcagtatgttgctgcatatcaacaattgacgtccgaaaaagaggtgctgcacaatcagctcttgttacaaacacagcttgtcgatcagctgcaacagcaagaagcccaaggaaaagccgtcgccgagatggctcgacaagagttgcaggaaacccaggaacggctcgaggctgccacacagcagaatcaacaattgcgcgctcaactctctctgatggcacatcctggcgaaggagacggactggatagagaggaggaggaagatgaagaggaggaagaggaggaggctgtggcagtgccccagcctatgccctctatcccagaagacctggagagccgcgaagctatggtcgcctttttcaattctgcagttgccagcgctgaggaagagcaggcgagactccgcggacagctaaaagagcagcgggtgcgctgccgcagactggctcacctgctggctagcgcccagaaggaacccgaggccgcagctccagcacctggaactggaggtgattccgtctgtggagagacacaccgggcactacaaggggctatggagaagttgcagagccggttcatggagctgatgcaggagaaagcggacctgaaggagagagtagaagaactggagcaccggtgtattcaactgagcggtgaaactgacacaattggagagtacattgcactctatcaaagccagcgagccgtgctgaaggagcgccacagggagaaagaggagtacatttcgcgactggcacaggataaagaggagatgaaagttaagctgctcgagcttcaagaactcgtgctgcgattggtgggagaccgcaacgagtggcacggacgttttctggcagccgctcaaaaccctgcagatgaacctacgagcggcgcaccggctccacaagagctcggcgctgccaatcagcagggggacttatgtgaagtgtcactggctggatcagtcgagccggctcaaggtgaagccagagagggctcacctcgggataatccaacggcccaacagattatgcagttgttacgagaaatgcagaacccacgggagcgtcccggtctcgggagcaatccatgcataccttttttctatcgagctgacgagaacgatgaagtgaagataaccgtcatatag

SEQ ID NO: 146732 - protein, 3259 aa, Artificial Sequence
  derived and/or modified sequence
MLSRLSGLANVVLHELSGDDDTDQNMRAPLDPELHQESDMEFNNTTQEDVQERLAYAEQLVVELKDIIRQKDVQLQQKDEALQEERKAADNKIKKLKLHAKAKLTSLNKYIEEMKAQGGTVLPTEPQSEEQLSKHDKSSTEEEMEIEKIKHKLQEKEELISTLQAQLTQAQAEQPAQSSTEMEEFVMMKQQLQEKEEFISTLQAQLSQTQAEQAAQQVVREKDARFETQVRLHEDELLQLVTQADVETEMQQKLRVLQRKLEEHEESLVGRAQVVDLLQQELTAAEQRNQILSQQLQQMEAEHNTLRNTVETEREESKILLEKMELEVAERKLSFHNLQEEMHHLLEQFEQAGQAQAELESRYSALEQKHKAEMEEKTSHILSLQKTGQELQSACDALKDQNSKLLQDKNEQAVQSAQTIQQLEDQLQQKSKEISQFLNRLPLQQHETASQTSFPDVYNEGTQAVTEENIASLQKRVVELENEKGALLLSSIELEELKAENEKLSSQITLLEAQNRTGEADREVSEISIVDIANKRSSSAEESGQDVLENTFSQKHKELSVLLLEMKEAQEEIAFLKLQLQGKRAEEADHEVLDQKEMKQMEGEGIAPIKMKVFLEDTGQDFPLMPNEESSLPAVEKEQASTEHQSRTSEEISLNDAGVELKSTKQDGDKSLSAVPDIGQCHQDELERLKSQILELELNFHKAQEIYEKNLDEKAKEISNLNQLIEEFKKNADNNSSAFTALSEERDQLLSQVKELSMVTELRAQVKQLEMNLAEAERQRRLDYESQTAHDNLLTEQIHSLSIEAKSKDVKIEVLQNELDDVQLQFSEQSTLIRSLQSQLQNKESEVLEGAERVRHISSKVEELSQALSQKELEITKMDQLLLEKKRDVETLQQTIEEKDQQVTEISFSMTEKMVQLNEEKFSLGVEIKTLKEQLNLLSRAEEAKKEQVEEDNEVSSGLKQNYDEMSPAGQISKEELQHEFDLLKKENEQRKRKLQAALINRKELLQRVSRLEEELANLKDESKKEIPLSETERGEVEEDKENKEYSEKCVTSKCQEIEIYLKQTISEKEVELQHIRKDLEEKLAAEEQFQALVKQMNQTLQDKTNQIDLLQAEISENQAIIQKLITSNTDASDGDSVALVKETVVISPPCTGSSEHWKPELEEKILALEKEKEQLQKKLQEALTSRKAILKKAQEKERHLREELKQQKDDYNRLQEQFDEQSKENENIGDQLRQLQIQVRESIDGKLPSTDQQESCSSTPGLEEPLFKATEQHHTQPVLESNLCPDWPSHSEDASALQGGTSVAQIKAQLKEIEAEKVELELKVSSTTSELTKKSEEVFQLQEQINKQGLEIESLKTVSHEAEVHAESLQQKLESSQLQIAGLEHLRELQPKLDELQKLISKKEEDVSYLSGQLSEKEAALTKIQTEIIEQEDLIKALHTQLEMQAKEHDERIKQLQVELCEMKQKPEEIGEESRAKQQIQRKLQAALISRKEALKENKSLQEELSLARGTIERLTKSLADVESQVSAQNKEKDTVLGRLALLQEERDKLITEMDRSLLENQSLSSSCESLKLALEGLTEDKEKLVKEIESLKSSKIAESTEWQEKHKELQKEYEILLQSYENVSNEAERIQHVVEAVRQEKQELYGKLRSTEANKKETEKQLQEAEQEMEEMKEKMRKFAKSKQQKILELEEENDRLRAEVHPAGDTAKECMETLLSSNASMKEELERVKMEYETLSKKFQSLMSEKDSLSEEVQDLKHQIEGNVSKQANLEATEKHDNQTNVTEEGTQSIPGETEEQDSLSMSTRPTCSESVPSAKSANPAVSKDFSSHDEINNYLQQIDQLKERIAGLEEEKQKNKEFSQTLENEKNTLLSQISTKDGELKMLQEEVTKMNLLNQQIQEELSRVTKLKETAEEEKDDLEERLMNQLAELNGSIGNYCQDVTDAQIKNELLESEMKNLKKCVSELEEEKQQLVKEKTKVESEIRKEYLEKIQGAQKEPGNKSHAKELQELLKEKQQEVKQLQKDCIRYQEKISALERTVKALEFVQTESQKDLEITKENLAQAVEHRKKAQAELASFKVLLDDTQSEAARVLADNLKLKKELQSNKESVKSQMKQKDEDLERRLEQAEEKHLKEKKNMQEKLDALRREKVHLEETIGEIQVTLNKKDKEVQQLQENLDSTVTQLAAFTKSMSSLQDDRDRVIDEAKKWERKFSDAIQSKEEEIRLKEDNCSVLKDQLRQMSIHMEELKINISRLEHDKQIWESKAQTEVQLQQKVCDTLQGENKELLSQLEETRHLYHSSQNELAKLESELKSLKDQLTDLSNSLEKCKEQKGNLEGIIRQQEADIQNSKFSYEQLETDLQASRELTSRLHEEINMKEQKIISLLSGKEEAIQVAIAELRQQHDKEIKELENLLSQEEEENIVLEEENKKAVDKTNQLMETLKTIKKENIQQKAQLDSFVKSMSSLQNDRDRIVGDYQQLEERHLSIILEKDQLIQEAAAENNKLKEEIRGLRSHMDDLNSENAKLDAELIQYREDLNQVITIKDSQQKQLLEVQLQQNKELENKYAKLEEKLKESEEANEDLRRSFNALQEEKQDLSKEIESLKVSISQLTRQVTALQEEGTLGLYHAQLKVKEEEVHRLSALFSSSQKRIAELEEELVCVQKEAAKKVGEIEDKLKKELKHLHHDAGIMRNETETAEERVAELARDLVEMEQKLLMVTKENKGLTAQIQSFGRSMSSLQNSRDHANEELDELKRKYDASLKELAQLKEQGLLNRERDALLSETAFSMNSTEENSLSHLEKLNQQLLSKDEQLLHLSSQLEDSYNQVQSFSKAMASLQNERDHLWNELEKFRKSEEGKQRSAAQPSTSPAEVQSLKKAMSSLQNDRDRLLKELKNLQQQYLQINQEITELHPLKAQLQEYQDKTKAFQIMQEELRQENLSWQHELHQLRMEKSSWEIHERRMKEQYLMAISDKDQQLSHLQNLIRELRSSSSQTQPLKVQYQRQASPETSASPDGSQNLVYETELLRTQLNDSLKEIHQKELRIQQLNSNFSQLLEEKNTLSIQLCDTSQSLRENQQHYGDLLNHCAVLEKQVQELQAGPLNIDVAPGAPQEKNGVHRKSDPEELREPQQSFSEAQQQLCNTRQEVNELRKLLEEERDQRVAAENALSVAEEQIRRLEHSEWDSSRTPIIGSCGTQEQALLIDLTSNSCRRTRSGVGWKRVLRSLCHSRTRVPLLAAIYFLMIHVLLILCFTGHL

SEQ ID NO: 146733 - DNA, 9780 bp, Artificial Sequence
  derived and/or modified sequence
atgctttctcggctaagtggcttggccaacgtggtcctccatgaactgagtggcgatgacgataccgatcagaacatgagagctccgctggatcctgaacttcaccaagagtcagatatggaattcaataataccacgcaggaggatgtccaggaacggctagcctacgcggagcaactggtggtcgaattgaaggatattattcggcagaaagacgtccagctgcagcagaaagatgaagccttacaggaagagcgaaaggcagccgacaataagatcaaaaaactcaagctgcatgccaaagcaaaattgacaagcttaaataagtatatagaagagatgaaggcacaaggtggtacagtcctcccgacagagccccagagtgaagaacagttgtcaaaacatgataaatcctctaccgaagaagaaatggagattgagaaaattaaacataagctgcaggaaaaggaagagttgatatcaactctacaggctcagctgacacaagcacaggcagagcagcctgctcagagtagtactgaaatggaagagtttgtcatgatgaagcagcagctgcaggagaaggaggaattcatctctacactccaggcgcagctatctcagacacaggctgaacaggccgctcagcaggttgtcagggaaaaggatgcgaggtttgagacacaggttaggctgcacgaggatgaactcctccagctagttacccaggctgacgtagagactgaaatgcagcaaaagctgagggtgctgcaacggaaattagaagagcacgaagaatccctcgtgggcagagcccaggtagtggatttactccaacaagagttaactgctgccgaacagaggaatcagatcctgagccagcaactgcagcagatggaggcggaacacaatacgctgcgtaacaccgtggagacagaacgcgaagaatctaaaatcctccttgagaagatggagctggaggtcgctgaacgcaaactgtcattccataatctgcaggaggaaatgcatcatctgctcgaacagttcgaacaggctggacaagcacaggctgagctggagtctcgatactcagctctggaacagaagcacaaagcggagatggaagagaaaacctcacacattctttctctgcagaagacaggacaagaactgcagtcagcctgtgacgcccttaaagatcagaattcgaaactactccaagacaaaaacgaacaggccgttcagtctgcgcaaactatccaacaacttgaggaccaactgcagcaaaagagcaaggagatctcccagttccttaaccgactccctctgcaacagcacgagaccgcctcacagacctcattcccagacgtgtataacgagggaacccaggctgtcactgaggagaacattgcttccttgcagaagcgggtcgtagaactggaaaatgaaaagggtgccctcttattgtctagcatcgagttggaagagctaaaggctgagaatgagaagctgtcctcacagatcaccctgctcgaggcccagaaccgcactggtgaggcggatagggaagtaagcgaaatcagcatagtagacatcgccaacaagcgcagctcctcagcggaagaatcaggtcaagatgtcttggaaaatacctttagccaaaaacacaaggagttgagcgtgctgctgctggagatgaaggaggcccaagaagagattgcatttctgaaactacagttgcaaggcaagagggcagaggaggctgaccacgaagtcttggatcagaaggaaatgaagcagatggaaggggaggggattgcccccataaagatgaaagtctttctcgaggacacagggcaggattttcccttgatgccaaacgaggaatcaagcctgcccgcagtcgagaaggagcaggccagcacagaacaccaatcacgcactagtgaggaaatctccctgaatgacgccggcgtggagctaaagagcaccaagcaggacggcgataagtcactttcagctgtgccagacatcggacagtgtcatcaggacgaactggagcggctcaagagtcaaatcctagaactggagttgaactttcataaagcacaggagatttacgagaagaaccttgacgaaaaagccaaggagataagtaatctcaaccagctcatagaagagttcaagaagaatgccgataataacagttctgcattcacagccctctccgaggaacgtgaccagctactgtcacaggtgaaagagctctctatggtgacagagctacgggcacaggtcaagcaacttgaaatgaatctcgcagaagcggaaagacagcgccggttggattatgaatcacaaaccgctcacgacaacctgttgaccgaacagattcacagtttaagtatcgaagccaaaagtaaagacgttaaaattgaggtgctgcagaatgagctggacgatgtccagctccagttctctgaacagagtactttgattcgatccctccagagtcagctacagaataaggaatccgaggtcctcgagggggccgagcgcgtgagacacatctcatcaaaggtggaagaattatcacaagccctgtctcaaaaagagctggagattaccaagatggatcagcttctgctcgagaaaaagcgggacgtagaaacactgcaacagacgatcgaagagaaggaccaacaagttaccgagatcagttttagcatgacggagaaaatggtgcagctgaatgaagaaaagtttagcctcggggtggagatcaaaaccctgaaggaacagctgaatctgttatctagggcagaggaagccaagaaagagcaggttgaggaggataacgaggtcagcagcggactgaaacaaaactatgatgaaatgtctccagccggccagatcagcaaagaagagctccagcacgagttcgaccttctgaaaaaggaaaatgagcagaggaagcgcaagctgcaggcggctctcattaacagaaaggagcttctccagcgcgtgtctcgcctcgaggaagaactcgctaatcttaaagacgaatctaagaaggagatcccactgtctgaaacagagcggggagaagtcgaggaggataaggagaacaaggaatattccgagaagtgcgtcacctccaagtgccaggagattgaaatatacctcaaacagactataagcgaaaaggaggtggagctgcagcatataaggaaggatctagaggagaagctggcagcagaagagcagtttcaggccctggtgaagcaaatgaatcagacgctccaggataagacgaaccaaatagacctgcttcaggcagaaatctcagaaaaccaggcaataattcaaaaactcataacatcaaacaccgacgcaagcgacggcgactccgtcgccttggtgaaagagacagttgtaattagccctccctgtacaggatcttccgagcactggaagcctgagctggaggagaaaatcctggctctggagaaggagaaggaacagttacagaaaaagctgcaggaagctttgacatcccggaaggcgatccttaaaaaggcacaggagaaagaacggcatttgagggaggagctaaagcagcagaaggacgattataaccgcctacaggagcagttcgatgaacagtcaaaggaaaatgagaatatcggcgatcagttaaggcaactccaaatccaggtgagagagagcatcgatggaaaactgcccagcaccgatcagcaggaatcttgctcatcaacccccgggctcgaagaacctctgtttaaagccaccgaacagcatcacacccagcctgtgttagagtctaatttgtgcccggactggccttcccactcagaggacgcatcagcactgcaaggggggacatctgtggcccagattaaagcccagttgaaggaaatcgaggcggagaaagttgagctggaactcaaggtctcctccacgacctcagagctcaccaagaagagcgaagaggtgttccagctccaagagcagattaataaacaaggactggagatcgaatcgctgaaaacggtgagtcacgaagccgaggtccatgccgagtcacttcagcagaagcttgaatctagccaactgcagatcgctggccttgagcacctcagggaactgcaacccaaactagacgaactccaaaagctcatcagtaagaaagaagaagatgtcagttacctgagcggccagctatcagagaaagaagctgcgttgactaaaattcagacggagattatcgagcaggaagacctgatcaaggcactgcatacacagctggaaatgcaagccaaggaacatgacgagaggatcaagcagcttcaggtggaattatgtgagatgaagcagaaacccgaggagatcggcgaagagtctcgcgcaaaacaacagatccaaaggaagctgcaggcggccctgatctcacggaaggaggctctgaaggagaacaagtctctgcaggaggaattgagcctggcgcgaggaacgattgagcgcctcacaaaaagtctggcagacgttgagagccaggtctctgcccagaataaggagaaagataccgtgctgggccgcctcgcattgctacaagaggaacgagacaagctcattaccgagatggatcggtccttgttggagaatcaatccctgtcttccagctgtgagagcttaaaactggcgttggaaggtctgaccgaggataaggagaaactggttaaggagattgaatcactgaagtcttcgaagatagccgaaagtacagaatggcaggaaaagcataaagagttgcagaaagagtacgagatcctcttgcaaagctacgagaacgtaagcaacgaggccgagcggattcagcatgtggtggaagccgttcgtcaagaaaaacaggaactgtacggaaagctccgcagtaccgaggcaaataagaaagagactgagaaacagctgcaggaagccgaacaggagatggaggagatgaaagaaaagatgaggaaattcgccaagtctaaacagcaaaagatcctcgagctggaagaggaaaatgaccggctgagagccgaggttcaccctgctggcgatactgcaaaggagtgcatggagactctgcttagcagcaacgctagcatgaaggaagagttggaacgggtgaagatggagtacgagacccttagcaagaagttccagagcctcatgtctgagaaagactccctgagcgaagaggtccaagacttaaagcaccagatcgaggggaacgtaagtaagcaggcgaatttagaggccacagaaaagcacgacaatcagacgaacgtaaccgaagagggcacccagagtatcccgggagagactgaagagcaagacagcttatctatgagcacacgccccacctgtagcgagagcgtgccctctgctaagagtgctaatcctgccgtttccaaagattttagtagccacgatgaaattaataattacctccagcaaatcgatcagctcaaagagaggatcgcaggtctggaggaagagaaacagaaaaacaaggaattctcccaaaccctggaaaacgagaagaataccctgctgagtcagatttccactaaggatggtgaactcaaaatgctccaggaggaagtgactaaaatgaacttactcaaccagcagatccaggaggaactttctcgggtcacaaaactgaaggaaaccgctgaggaggagaaagacgatctggaggaacgattgatgaaccagttagcagagctcaatggaagcatcggtaactattgtcaagatgtgaccgatgcccagattaagaatgagctattggagagcgaaatgaagaacctaaaaaagtgcgtcagcgagttagaggaggaaaagcagcagctggtgaaagaaaaaacaaaggtcgaaagcgaaattcggaaggaatacctggaaaaaatccagggggcccagaaggagcctgggaataaatctcatgctaaggagctgcaagaacttctgaaggagaagcagcaggaggtcaagcagctgcagaaagactgcattagatatcaagagaagatcagtgcactcgagcgcacagtgaaagccctggaattcgtgcagacggagtcacagaaagatttagagatcactaaagagaacttggcacaggcagtggagcacaggaaaaaagcccaggcggagttggcgagttttaaggtgctcctggacgacacccaaagtgaagccgcccgtgtgctcgctgataaccttaagctcaagaaagagctgcaaagcaataaggaatccgtgaagtcccaaatgaagcagaaagatgaggacttagaacgaaggttagagcaggccgaggagaagcatttgaaagagaagaaaaacatgcaggaaaagctggacgcgctcaggagggagaaagtccatctggaagagaccatcggcgaaattcaagttactctcaacaagaaagataaagaggtgcaacagttgcaggagaatctggattcgacagtcacccagctggctgccttcaccaaatccatgagttcccttcaggatgaccgagacagggtgatcgacgaggctaaaaagtgggaaaggaagttcagtgatgccattcagtccaaagaagaggagattcgcctgaaggaagataattgctccgtgcttaaagaccaactgcggcagatgtcaatacatatggaagaactcaaaataaatatctctcgcttggagcacgacaaacagatctgggagagcaaagcacagacagaggttcagctccagcagaaagtttgcgacacattgcagggagagaacaaagaactcctgtctcaactcgaggaaactcggcacctttatcattcctcccagaatgaactggctaagctggaaagcgagctcaagtcattgaaagaccaactgacagacctgtctaattccctcgagaaatgcaaggagcagaaggggaatcttgaaggcatcataaggcagcaggaggccgacatccagaactctaagttttcctatgagcagctcgagaccgatcttcaggcatctagggaacttacatcccgtctgcacgaggagatcaacatgaaagagcaaaagattattagcctcttgtcgggaaaggaggaggcaatccaggtcgcaattgctgaactgagacaacagcacgacaaggagatcaaagagctggaaaacttactatcccaggaagaggaggaaaatattgtgctggaggaggaaaacaagaaggcagttgataaaactaaccagctgatggaaacattaaagacaatcaagaaggaaaacatccagcagaaagcccagctggatagtttcgtgaaatctatgtctagcctgcagaatgacagggataggattgtgggagactaccaacagttggaggagcggcatctgtccatcatcctcgaaaaggatcagctcatacaggaggccgctgcagagaacaacaaactgaaggaggagattagaggtctccgatcacacatggatgatcttaacagcgaaaatgctaagctcgacgccgaactgattcagtatcgagaggacctcaaccaggtgatcacgattaaggattcccagcaaaagcagctgttggaggtgcaactccaacaaaataaagaacttgaaaacaagtacgccaagctcgaagaaaagttgaaggagtcagaagaagcgaatgaagacctacgtagaagcttcaacgctctgcaggaggagaagcaggacttatccaaggagatcgagtctctgaaagtttctatttcgcagctcacccggcaggtgacagcgctccaggaagaaggcactctcggcctatatcacgcacagctcaaggtgaaagaagaagaggtacatcgtttatcggccttgtttagctcctcccagaagagaattgccgaactggaagaggaactggtatgcgtacagaaagaggcagccaagaaggtgggcgagatcgaagataaattgaagaaggagctgaaacacctccatcacgacgcaggcattatgagaaacgaaactgagacagctgaggaaagggtagctgaactggctcgagacttggtggagatggagcagaagctacttatggtgactaaggagaacaaggggctgaccgcgcagattcagagttttggtcgtagcatgtcttccttacagaattcacgggaccacgccaatgaggaactggatgagctcaagcgtaagtacgatgcatctctgaaagagctcgcgcaactgaaggaacaggggcttctgaacagagagagggacgcgctgctgtctgagaccgcattctccatgaactctaccgaagaaaactcactcagtcatctggaaaagctgaaccagcaactgctgtccaaagacgaacagcttctgcatctctcttcacagctcgaggactcttataaccaggtccagtccttttccaaggccatggcttccctacagaatgagcgcgaccatttatggaatgaactggagaagttccgtaaatccgaagagggaaaacagagatccgccgctcagcctagcacatctccagccgaggtacaaagcctgaagaaggctatgagtagcctgcagaacgaccgagatcgactattgaaggagcttaagaaccttcaacaacagtacctgcagattaatcaagagatcaccgaattacaccctctgaaggcacagctccaggagtatcaggacaaaaccaaggcattccaaattatgcaggaggaattgcgccaggaaaacttatcctggcaacacgaactgcaccagctacgaatggagaaatcctcctgggaaatccatgagaggagaatgaaagaacagtacttgatggctatcagtgacaaggaccaacagttaagtcacctccagaatctgattagagagctgcgaagttcgtcgagtcaaactcagccactgaaggtgcagtaccaacgtcaagcctctcccgagacatcagcgtcaccagatggtagccagaacttggtgtatgagacagagctgctaagaacacaattaaatgacagcctgaaagaaattcatcagaaagaactacgcatccagcagctgaacagcaatttctcacaactgctcgaagaaaagaatacactctctattcagctgtgtgacaccagccaaagtctccgtgagaatcagcagcattacggcgacctgctgaatcactgcgccgtactcgaaaagcaagtgcaggaactccaggccggacccctgaatatagacgtggctcctggtgctccccaggagaaaaacggcgtgcaccggaagtccgatcccgaagaattgagggaacctcagcagtcattctcagaagcccaacagcagttgtgtaatacaaggcaggaagtcaatgaactgagaaaactgctagaggaagaacgagatcagcgcgtggctgctgagaacgccctgtctgtggcagaggagcagatccgacgcttagagcatagcgagtgggacagctctcgcactcctattatcggttcttgtggcactcaagaacaagccctgctcattgatttgaccagcaattcttgtcgacgcactcgttccggcgtcgggtggaaacgcgtgttaagatccctatgccattccagaacccgtgtcccattgttggcagccatctacttcctcatgattcacgtgctgctcattctgtgcttcacaggacacctctag

SEQ ID NO: 146734 - DNA, 11187 bp, Artificial Sequence
  derived and/or modified sequence
aactgctagtggctgagtccctggcggggcgcggcggtggaaggtgtcgcgtacgggcttcccgagctgacgtggcttgaattgggaggggggcagctggagcctcaggcggcagcgcttctagaaatgctgagccgattatcaggattagcaaatgttgttttgcatgaattatcaggagatgatgacactgatcagaatatgagggctcccctagaccctgaattacaccaagaatctgacatggaatttaataatactacacaagaagatgttcaggagcgcctggcttatgcagagcaattggtggtggagctaaaagatattattagacagaaggatgttcaactgcagcagaaagatgaagctctacaggaagagagaaaagctgctgataacaaaattaaaaaactaaaacttcatgcgaaggccaaattaacttctttgaataaatacatagaagaaatgaaagcacaaggagggactgttctgcctacagaacctcagtcagaggagcaactttccaagcatgacaagagttctacagaggaagagatggaaatagaaaagataaaacataagctccaggagaaggaggaactaatcagcactttgcaagcccagcttactcaggcacaggcagaacaacctgcacagagttctacagagatggaagaatttgtaatgatgaagcaacagctccaggagaaggaagaattcattagcactttacaagcccagctcagccagacacaggcagagcaagctgcacagcaggtggtccgagagaaagatgcccgctttgaaacacaagttcgtcttcatgaagatgagcttcttcagttagtaacccaggcagatgtggaaacagagatgcaacagaaattgagggtgctgcaaaggaagcttgaggaacacgaagaatccttggtgggccgtgctcaggtcgttgacttgctgcaacaggagctgactgctgctgagcagagaaaccagattctctctcagcagttacagcagatggaagctgagcataatactttgaggaacactgtggaaacagaaagagaggagtccaagattctactggaaaagatggaacttgaagtggcagagagaaaattatccttccataatctgcaggaagaaatgcatcatcttttagaacagtttgagcaagcaggccaagcccaggctgaactagagtctcggtatagtgctttggagcagaagcacaaagcagaaatggaagagaagacctctcatattttgagtcttcaaaagactggacaagagctgcagtctgcctgtgatgctctaaaggatcaaaattcaaagcttctccaagataagaatgagcaagcagttcagtcagcccagaccattcagcaactggaagatcagctccagcaaaaatccaaagaaattagccaatttctaaatagactgcccttgcaacaacatgaaacagcatctcagacttctttcccagatgtttataatgagggcacacaggcagtcactgaggagaatattgcttctttgcagaagagagtggtagaactagagaatgaaaagggagccttgctccttagttctatagagctggaggagctgaaagctgagaatgaaaaactgtcttctcagattactctcctagaggctcagaatagaactggggaggcagacagagaagtcagtgagatcagcattgttgatattgccaacaagaggagctcttctgctgaggaaagtggacaagatgttctagaaaacacattttctcagaaacataaagaattatcagttttattgttggaaatgaaagaagctcaagaggaaattgcatttcttaaattacagctccagggaaaaagggctgaggaagcagatcatgaggtccttgaccagaaagaaatgaaacagatggagggtgagggaatagctccaattaaaatgaaagtatttcttgaagatacagggcaagattttcccttaatgccaaatgaagagagcagtcttccagcagttgaaaaagaacaggcgagcactgaacatcaaagtagaacatctgaggaaatatctttaaatgatgctggagtagaattgaaatcaacaaagcaggatggtgataaatccctttctgctgtaccagatattggtcagtgtcatcaggatgagttggaaaggttaaaaagtcaaattttggagctcgagctaaactttcataaagcacaagaaatctatgagaaaaatttagatgagaaagctaaggaaattagcaacctaaaccagttgattgaggagtttaagaaaaatgctgacaacaacagcagtgcattcactgctttgtctgaagaaagagaccagcttctctctcaggtgaaggaacttagcatggtaacagaattgagggctcaggtaaagcaactggaaatgaaccttgcagaagcagaaaggcaaagaagacttgattatgaaagccaaactgcccatgacaacctgctcactgaacagatccatagtctcagcatagaagccaaatctaaagatgtgaaaattgaagttttacagaatgaactggatgatgtgcagcttcagttttctgagcagagtaccctgataagaagcctgcaaagccagctgcaaaataaggaaagtgaagtgcttgagggggcagaacgtgtaaggcatatctcaagtaaagtggaagaactgtcccaggctctttcacagaaggaacttgaaataacaaaaatggatcagctcttactagagaaaaagagagatgtggaaaccctccaacaaaccatcgaggagaaggatcaacaagtgacagaaatcagctttagtatgactgagaaaatggttcagcttaatgaagagaagttttctcttggggttgaaattaagactcttaaagaacagctaaatttattatccagagctgaggaagcaaaaaaagagcaggtggaagaagataatgaagtttcttctggccttaaacaaaattatgatgagatgagcccagcaggacaaataagtaaggaagaacttcagcatgaatttgaccttctgaagaaagaaaatgagcagagaaagagaaagctccaggcagctcttattaacagaaaggagcttctgcaaagagtcagtagattggaagaagaattagccaacttgaaagatgaatctaagaaagaaatcccactcagtgagactgagaggggagaagtggaagaagataaagaaaacaaagaatactcagaaaaatgtgtgacttctaagtgccaagaaatagaaatttatttaaaacagacaatatctgagaaagaagtggaactacagcatataaggaaggatttggaagaaaagctggcagctgaagagcaattccaggctctggtcaaacagatgaatcagaccttgcaagataaaacaaaccaaatagatttgctccaagcagaaatcagtgaaaaccaagcaattatccagaagttaatcacaagtaacacggatgcaagtgatggggactccgtagcacttgtaaaggaaacagtggtgataagtccaccttgtacaggtagtagtgaacactggaaaccagaactagaagaaaagatactggcccttgaaaaagaaaaggagcaacttcaaaagaagctacaggaagccttaacctcccgcaaggcaattcttaaaaaggcacaggagaaagaaagacatctcagggaggagctaaagcaacagaaagatgactataatcgcttgcaagaacagtttgatgagcaaagcaaggaaaatgagaatattggagaccagctaaggcaactccagattcaagtaagggaatccatagacggaaaactcccaagcacagaccagcaggaatcgtgttcttccactccaggtttagaagaacctttattcaaagccacagaacagcatcacactcaacctgttttagagtccaacttgtgcccagactggccttctcattctgaagatgcgagtgctctgcagggcggaacttctgttgcccagattaaggcccagctgaaggaaatagaggctgagaaagtagagttagaattgaaagttagttctacaacaagtgagcttactaaaaaatcagaagaggtatttcagttacaagagcagataaataaacagggtttagaaatcgagagtctaaagacagtatcccatgaagctgaagtccatgccgaaagcctgcagcagaaattggaaagcagccaactacaaattgctggcctagaacatctaagagaattgcaacctaaactggatgaactgcaaaaactcataagcaaaaaggaagaagacgttagctacctttctggacaacttagtgagaaagaagcagctctcactaaaatacagacagagataatagaacaagaagatttaattaaggctctgcatacacagctagaaatgcaagccaaagagcatgatgagaggataaagcagctacaggtggaactttgtgaaatgaagcaaaaaccagaagagattggagaagaaagtagagcaaagcaacaaatacaaaggaaactgcaagctgcccttatttcccgaaaagaagcactaaaagaaaacaaaagtctccaagaggaattgtctttggccagaggtaccattgaacgtctcaccaagtctctggcagatgtggaaagccaagtttctgctcaaaataaagaaaaagatacggtcttaggaaggttagctcttcttcaagaagaaagagacaaactcattacagaaatggacaggtctttattggaaaatcagagtctcagcagctcctgtgaaagtctaaaactagctctagagggtcttactgaagacaaggaaaagttagtgaaggaaattgaatctttgaaatcttctaagattgcagaaagtactgagtggcaagagaaacacaaggagctacaaaaagagtatgaaattcttctgcagtcctatgagaatgttagtaatgaagcagaaaggattcagcatgtggtggaagctgtgaggcaagagaaacaagaactgtatggcaagttaagaagcacagaggcaaacaagaaggagacagaaaagcagttgcaggaagctgagcaagaaatggaggaaatgaaagaaaagatgagaaagtttgctaaatctaaacagcagaaaatcctagagctggaagaagagaatgaccggcttagggcagaggtgcaccctgcaggagatacagctaaagagtgtatggaaacacttctttcttccaatgccagcatgaaggaagaacttgaaagggtcaaaatggagtatgaaaccctttctaagaagtttcagtctttaatgtctgagaaagactctctaagtgaagaggttcaagatttaaagcatcagatagaaggtaatgtatctaaacaagctaacctagaggccaccgagaaacatgataaccaaacgaatgtcactgaagagggaacacagtctataccaggtgagactgaagagcaagactctctgagtatgagcacaagacctacatgttcagaatcggttccatcagcgaagagtgccaaccctgctgtaagtaaggatttcagctcacatgatgaaattaataactacctacagcagattgatcagctcaaagaaagaattgctggattagaggaggagaagcagaaaaacaaggaatttagccagactttagaaaatgagaaaaataccttactgagtcagatatcaacaaaggatggtgaactaaaaatgcttcaggaggaagtaaccaaaatgaacctgttaaatcagcaaatccaagaagaactctccagagttaccaaactaaaggagacagcagaagaagagaaagatgatttggaagagaggcttatgaatcaattagcagaacttaatggaagcattgggaattactgtcaggatgttacagatgcccaaataaaaaatgagctattggaatctgaaatgaagaaccttaaaaagtgtgtgagtgaattggaagaagaaaagcagcagttagtcaaggaaaaaactaaggtggaatcagaaatacgaaaggaatatttggagaaaatacaaggtgctcagaaagaacccggaaataaaagccatgcaaaggaacttcaggaactgttaaaagaaaaacaacaagaagtaaagcagctacagaaggactgcatcaggtatcaagagaaaattagtgctctggagagaactgttaaagctctagaatttgttcaaactgaatctcaaaaagatttggaaataaccaaagaaaatctggctcaagcagttgaacaccgcaaaaaggcacaagcagaattagctagcttcaaagtcctgctagatgacactcaaagtgaagcagcaagggtcctagcagacaatctcaagttgaaaaaggaacttcagtcaaataaagaatcagttaaaagccagatgaaacaaaaggatgaagatcttgagcgaagactggaacaggcagaagagaagcacctgaaagagaagaagaatatgcaagagaaactggatgctttgcgcagagaaaaagtccacttggaagagacaattggagagattcaggttactttgaacaagaaagacaaggaagttcagcaacttcaggaaaacttggacagtactgtgacccagcttgcagcctttactaagagcatgtcttccctccaggatgatcgtgacagggtgatagatgaagctaagaaatgggagaggaagtttagtgatgcgattcaaagcaaagaagaagaaattagactcaaagaagataattgcagtgttctaaaggatcaacttagacagatgtccatccatatggaagaattaaagattaacatttccaggcttgaacatgacaagcagatttgggagtccaaggcccagacagaggtccagcttcagcagaaggtctgtgatactctacagggggaaaacaaagaacttttgtcccagctagaagagacacgccacctataccacagttctcagaatgaattagctaagttggaatcagaacttaagagtctcaaagaccagttgactgatttaagtaactctttagaaaaatgtaaggaacaaaaaggaaacttggaagggatcataaggcagcaagaggctgatattcaaaattctaagttcagttatgaacaactggagactgatcttcaggcctccagagaactgaccagtaggctgcatgaagaaataaatatgaaagagcaaaagattataagcctgctttctggcaaggaagaggcaatccaagtagctattgctgaactgcgtcagcaacatgataaagaaattaaagagctggaaaacctgctgtcccaggaggaagaggagaatattgttttagaagaggagaacaaaaaggctgttgataaaaccaatcagcttatggaaacactgaaaaccatcaaaaaggaaaacattcagcaaaaggcacagttggattcctttgttaaatccatgtcttctctccaaaatgatcgagaccgcatagtgggtgactatcaacagctggaagagcgacatctctctataatcttggaaaaagaccaactcatccaagaggctgctgcagagaataataagcttaaagaagaaatacgaggcttgagaagtcatatggatgatctcaattctgagaatgccaagctagatgcagaactgatccaatatagagaagacctgaaccaagtgataacaataaaggacagccaacaaaagcagcttcttgaagttcaacttcagcaaaataaggagctggaaaataaatatgctaaattagaagaaaagctgaaggaatctgaggaagcaaatgaggatctgcggaggtcctttaatgccctacaagaagagaaacaagatttatctaaagagattgagagtttgaaagtatctatatcccagctaacaagacaagtaacagccttgcaagaagaaggtactttaggactctatcatgcccagttaaaagtaaaagaagaagaggtacacaggttaagtgctttgttttcctcctctcaaaagagaattgcagaactggaagaagaattggtttgtgttcaaaaggaagctgccaagaaggtaggtgaaattgaagataaactgaagaaagaattaaagcatcttcatcatgatgcagggataatgagaaatgaaactgaaacagcagaagagagagtggcagagctagcaagagatttggtggagatggaacagaaattactcatggtcaccaaagaaaataaaggtctcacagcacaaattcagtcttttggaaggtctatgagttccttgcaaaatagtagagatcatgccaatgaggaacttgatgaactgaaaaggaaatatgatgccagtctgaaggaattggcacagttgaaagaacagggactcttaaacagagagagagatgctcttctttctgaaaccgccttttcaatgaactccactgaggagaatagcttgtctcaccttgagaaacttaaccaacagctcctatccaaagatgagcaattgcttcacttgtcctcacaactagaagattcttataaccaagtgcagtccttttccaaggctatggccagtctgcagaatgagagagatcacctgtggaatgagctggagaaatttcgaaagtcagaggaagggaagcagaggtctgcagctcagccttccaccagcccagctgaagtacagagtttaaaaaaagctatgtcttcactccaaaatgacagagacagactactgaaggaattgaagaatctgcagcagcaatacttacagattaatcaagagatcactgagttacatccactgaaggctcaacttcaggagtatcaagataagacaaaagcatttcagattatgcaagaagagctcaggcaggaaaacctctcctggcagcatgagctgcatcagctcaggatggagaagagttcctgggaaatacatgagaggagaatgaaggaacagtaccttatggctatctcagataaagatcagcagctcagtcatctgcagaatcttataagggaattgaggtcttcttcctcccagactcagcctctcaaagtgcaataccaaagacaggcatccccagagacatcagcttccccagatgggtcacaaaatctggtttatgagacagaacttctcaggacccagctcaatgacagcttaaaggaaattcaccaaaaggagttaagaattcagcaactgaacagcaacttctctcagctactggaagagaaaaacaccctttccattcagctctgcgataccagtcagagtcttcgtgagaaccagcagcactatggtgaccttttaaatcactgtgcagtcttggagaagcaggttcaagagctgcaggcggggccactaaatatagatgttgctccaggagctccccaggaaaagaatggagttcacagaaagagtgaccctgaggaactaagggaaccgcagcaaagcttttctgaagctcagcagcagctatgcaacaccagacaggaagtgaatgaattaaggaagctgctggaagaagaacgagaccaaagagtggctgctgagaatgctctctctgtggccgaggagcagatcagacggttagagcacagtgaatgggactcttcccggactcctatcattggctcctgtggcactcaggagcaggcactgttaatagatcttacaagcaacagttgtcgaaggacccggagtggcgttggatggaagcgagtcctgcgttcactctgtcattcacggacccgagtgccacttctagcagccatctactttctaatgattcatgtcctgctcattctgtgttttacgggccatctatagacttagttgttactctttggaccactcccctcaaaacttggaattctctcacctctaacatcagaacatcaattccagtggaacagtcttcccatttacaggtcttctctccaactcttcacggaaagtgcctgcaaaaacagaggtggatacgaggacaggttggagctgcagggactggcgagtctgctttcttctactgccctgagcctgaacgcttctgcttaatctgagaatcacatttggtttgttgagcctaatatttgttgagattttgcaggaccctgatcttttgtggtcctgtaaaagatactgaggaatgtctttcagccaagccaagaggatggtttcaataaacctaataatctgaagttcagtatcattttgattgataactttctttgccttgtttgcctgtattttctcctgtttcagggggaaggtggctctgccataaacagagttcagggaaatgaacatgtcacctcataggacatctgatttaggtctcttgcagaatagggtggtgaaagctgaaggaactccctaggggttttagctgttagatcacatgggaggacagcatcttcttccctgccaatttcagatataattggagggagaatttcaggtcttagactataaggatagaatccctttgcttttgcccttgatcacatgtatactaaggtattaagtggcccaagtctttcctttcaccaaagggcagggagaagtgtctatggacagcagggttccaattcttgtcattccaggaatatctgaatattcctggaatgtggaccctgagacagtgctcaggggccactgggagccaatattaggcattgactctcagccaggagtctgactggtctaacaccacactgcaactcctgacctcttgaagtactaagctactttgctgttagtgacagttattacagtttctcagccccattgtctctgccctctgtggcaatggaaggagaatatagagaagacaaaattaaatatagatagacctgagaaggacagccaggatagaattccatttgtgcctattccctgcctcccctcccctcccccatcctaccagttggttattttctcattgcatacgtgatgtgttcactgcctagcctctccctaaagaagagagaagacaagtgggctgactgatctgctctaaatctactgtggtgattaaatcttggttacaacatcctgggaagtttcctgaacaactgtaaaataataaaattattttcagaatgaaga

SEQ ID NO: 146735 - DNA, 9780 bp, Artificial Sequence
  derived and/or modified sequence
atgctgagccggctgagcggcctggccaacgtggtgctgcacgagctgtctggagatgatgacacagaccagaacatgagggcccccctggaccctgagctgcaccaggagagtgacatggagttcaacaacaccacccaggaggatgtgcaggagcggctggcctatgcagagcagctggtggtggagctgaaggacatcatccggcagaaggatgtgcagctgcagcagaaggatgaggccctgcaggaggagaggaaggctgctgacaacaagatcaagaagctgaagctgcacgccaaggccaagctgaccagcctgaacaagtacatcgaggagatgaaggcccagggcggcaccgtgctgcccacagagccccagagcgaggagcagctgagcaagcatgacaagagcagcacagaggaggagatggagattgagaagatcaagcacaagctgcaggagaaggaggagctgatcagcaccctgcaggcccagctgacccaggcccaggccgagcagcctgcccagagcagcacagagatggaggagtttgtgatgatgaagcagcagctgcaggagaaggaggagttcatcagcaccctgcaggcccagctgagccagacccaggccgagcaggccgcccagcaggtggtgcgggagaaggatgccaggtttgagacccaggtgcggctgcatgaagatgagctgctgcagctggtgacccaggctgatgtggagacagagatgcagcagaagctgcgggtgctgcagaggaagctggaggagcacgaggagagcctggtgggccgggcccaggtggtggacctgctgcagcaggagctgacagctgctgagcagaggaaccagatcctgagccagcagctgcagcagatggaggccgagcacaacaccctgaggaacacagtggagacagagcgggaggagagcaagatcctgctggagaagatggagctggaggtggccgagaggaagctgtccttccacaacctgcaggaggagatgcaccacctgctggagcagtttgagcaggccggccaggcccaggccgagctggagagccgctacagcgccctggagcagaagcacaaggccgagatggaggagaagaccagccacatcctgagcctgcagaagacaggccaggagctgcagagcgcctgtgatgccctgaaggaccagaacagcaagctgctgcaggacaagaatgagcaggccgtgcagagcgcccagaccatccagcagctggaggaccagctgcagcagaagagcaaggagatcagccagttcctgaaccggctgcccctgcagcagcacgagacagccagccagaccagcttcccagatgtgtacaatgaaggcacccaggccgtgacagaggagaacatcgccagcctgcagaagagggtggtggagctggagaatgagaagggggccctgctgctgagcagcattgagctggaggagctgaaggccgagaatgagaagctgagcagccagatcaccctgctggaggcccagaacagaactggagaggccgaccgggaggtgtctgagatcagcatcgtggacatcgccaacaagaggagcagcagcgctgaggagagcggccaggatgtgctggagaacaccttcagccagaagcacaaggagctgtctgtgctgctgctggagatgaaggaggcccaggaggagatcgccttcctgaagctgcagctgcagggcaagagagctgaggaggccgaccacgaggtgctggaccagaaggagatgaagcagatggagggggagggcatcgcccccatcaagatgaaggtgttcctggaggacaccggccaggacttccccctgatgcccaatgaggagagcagcctgcctgctgtggagaaggagcaggccagcacagagcaccagagcaggaccagcgaggagatcagcctgaatgatgctggggtggagctgaagagcaccaagcaggatggagacaagagcctgtctgctgtgcctgacatcggccagtgccaccaggatgagctggagcggctgaagagccagatcctggagctggagctgaacttccacaaggcccaggagatctatgagaagaacctggatgagaaggccaaggagatcagcaacctgaaccagctgattgaggagttcaagaagaatgctgacaacaacagcagcgccttcaccgccctgtctgaggagcgggaccagctgctgagccaggtgaaggagctgtccatggtgacagagctgcgggcccaggtgaagcagctggagatgaacctggccgaggccgagcggcagaggcggctggactatgagagccagacagcccatgacaacctgctgacagagcagatccacagcctgagcattgaggccaagagcaaggatgtgaagattgaggtgctgcagaatgagctggatgatgtgcagctgcagttcagcgagcagagcaccctcatccgcagcctgcagagccagctgcagaacaaggagagcgaggtgctggagggcgctgagcgggtgcgccacatcagcagcaaggtggaggagctgagccaggccctgagccagaaggagctggagatcaccaagatggaccagctgctgctggagaagaagagagatgtggagaccctgcagcagaccatcgaggagaaggaccagcaggtgacagagatctccttctccatgacagagaagatggtgcagctgaatgaggagaagttcagcctgggcgtggagatcaagaccctgaaggagcagctgaacctgctgagcagagctgaggaggccaagaaggagcaggtggaggaggacaatgaggtgagcagcggcctgaagcagaactatgatgagatgagccctgctggccagatcagcaaggaggagctgcagcatgaatttgacctgctgaagaaggaaaatgagcagaggaagaggaagctgcaggccgccctgatcaacaggaaggagctgctgcagagggtgtcccggctggaggaggagctggccaacctgaaggatgagagcaagaaggagatccccctgtctgaaacagagcggggggaggtggaggaggacaaggagaacaaggagtacagcgagaagtgtgtgaccagcaagtgccaggagattgagatctacctgaagcagaccatcagcgagaaggaggtggagctgcagcacatcaggaaggacctggaggagaagctggccgctgaggagcagttccaggccctggtgaagcagatgaaccagaccctgcaggacaagaccaaccagattgacctgctgcaggccgagatcagcgagaaccaggccatcatccagaagctgatcaccagcaacacagatgccagtgatggagacagcgtggccctggtgaaggagaccgtggtgatcagccccccctgcaccggcagcagcgagcactggaagccagagctggaggagaagatcctggccctggagaaggagaaggagcagctgcagaagaagctgcaggaggccctgaccagcaggaaggccatcctgaagaaggcccaggagaaggagcggcacctgcgggaggagctgaagcagcagaaggatgactacaaccggctgcaggagcagtttgatgagcagagcaaagaaaatgaaaatattggagaccagctgcggcagctgcagatccaggtgcgggagagcattgatggcaagctgcccagcacagaccagcaggagagctgcagcagcaccccaggcctggaggagcccctcttcaaggccacagagcagcaccacacccagcctgtgctggagagcaacctgtgcccagactggcccagccacagtgaagatgccagcgccctgcagggcggcacctctgtggcccagatcaaggcccagctgaaggagattgaggccgagaaggtggagctggagctgaaggtgagcagcaccaccagcgagctgaccaagaagtctgaggaggtgttccagctgcaggagcagatcaacaagcagggcctggagattgagagcctgaagacagtgtcccatgaagctgaggtgcatgctgagagcctgcagcagaagctggagagcagccagctgcagattgctggcctggagcacctgcgggagctgcagcccaagctggatgagctgcagaagctgatcagcaagaaggaggaggatgtgtcctacctgagcggccagctgtctgagaaggaggccgccctgaccaagatccagacagagatcatcgagcaggaggacctgatcaaggccctgcacacccagctggagatgcaggccaaggagcatgatgagcgcatcaagcagctgcaggtggagctgtgtgagatgaagcagaagccagaggagattggagaggagagccgggccaagcagcagatccagaggaagctgcaggccgccctgatcagcaggaaggaggccctgaaggagaacaagagcctgcaggaggagctgagcctggcccggggcaccatcgagcggctgaccaagagcctggctgatgtggagagccaggtgtctgcccagaacaaggagaaggacacagtgctgggccgcctggccctgctgcaggaggagcgggacaagctgatcacagagatggacaggagcctgctggagaaccagagcctgagcagcagctgtgagagcctgaagctggccctggagggcctgacagaggacaaggagaagctggtgaaggagattgagagcctgaagagcagcaagattgctgagagcacagagtggcaggagaagcacaaggagctgcagaaggagtatgagatcctgctgcagagctatgaaaatgtgtccaatgaagctgagcgcatccagcacgtggtggaggccgtgcggcaggagaagcaggagctgtatggcaagctgcggagcacagaggccaacaagaaggagacagagaagcagctgcaggaggccgagcaggagatggaggagatgaaggagaagatgaggaagtttgccaagagcaagcagcagaagatcctggagctggaggaggagaatgaccggctgcgggcagaggtgcaccctgctggggacacagccaaggagtgcatggagaccctgctgagcagcaatgcctccatgaaggaggagctggagcgggtgaagatggagtatgagaccctgagcaagaagttccagagcctgatgtctgagaaggacagcctgtctgaggaggtgcaggacctgaagcaccagatcgagggcaatgtgtccaagcaggccaacctggaggccacagagaagcatgacaaccagaccaacgtgacagaggagggcacccagagcatccctggagaaacagaggagcaggacagcctgtccatgagcacccggcccacctgcagcgagagcgtgcccagcgccaagagcgccaacccagctgtgtccaaggacttcagcagccatgatgagatcaacaactacctgcagcagattgaccagctgaaggagagaattgctggcctggaggaggagaagcagaagaacaaggagttcagccagaccctggagaatgagaagaacaccctgctgagccagatcagcaccaaggatggagagctgaagatgctgcaggaggaggtgaccaagatgaacctgctgaaccagcagatccaggaggagctgagccgggtgaccaagctgaaggagacagctgaggaggagaaggatgacctggaggagcggctgatgaaccagctggccgagctgaatggcagcatcggcaactactgccaggatgtgacagatgcccagatcaagaatgagctgctggagagcgagatgaagaacctgaagaagtgtgtgtctgagctggaggaggagaagcagcagctggtgaaggagaagaccaaggtggagagcgagatcaggaaggagtacctggagaagatccagggcgcccagaaggagcccggcaacaagagccacgccaaggagctgcaggagctgctgaaggagaagcagcaggaggtgaagcagctgcagaaggactgcatccgctaccaggagaagatcagcgccctggagaggacagtgaaggccctggagtttgtgcagacagagagccagaaggacctggagatcaccaaggagaacctggcccaggccgtggagcacaggaagaaggcccaggccgagctggccagcttcaaggtgctgctggatgacacccagagcgaggccgcccgggtgctggccgacaacctgaagctgaagaaggagctgcagagcaacaaggagagcgtgaagagccagatgaagcagaaggatgaggacctggagcggcggctggagcaggccgaggagaagcacctgaaggagaagaagaacatgcaggagaagctggatgccctgcggcgggagaaggtgcacctggaggagaccatcggggagatccaggtgaccctgaacaagaaggacaaggaggtgcagcagctgcaggagaacctggacagcacagtgacccagctggccgccttcaccaagtccatgagcagcctgcaggatgaccgggacagagtgattgatgaggccaagaagtgggagaggaagttcagtgatgccatccagagcaaggaggaggagatccggctgaaggaggacaactgcagcgtgctgaaggaccagctgcggcagatgagcatccacatggaggagctgaagatcaacatcagccggctggagcatgacaagcagatctgggagagcaaggcccagacagaggtgcagctgcagcagaaggtgtgtgacaccctgcagggcgagaacaaggagctgctgagccagctggaggagaccaggcacctgtaccacagcagccagaatgagctggccaagctggagagcgagctgaagagcctgaaggaccagctgacagacctgagcaacagcctggagaagtgcaaggagcagaagggcaacctggagggcatcatccggcagcaggaggccgacatccagaacagcaagttctcctatgagcagctggagacagacctgcaggccagccgggagctgaccagccggctgcacgaggagatcaacatgaaggagcagaagatcatcagcctgctgagcggcaaggaggaggccatccaggtggccatcgccgagctgcggcagcagcacgacaaggagatcaaggagctggagaacctgctgagccaggaggaggaggagaacatcgtgctggaggaggagaacaagaaggctgtggacaagaccaaccagctgatggagaccctgaagaccatcaagaaggagaacatccagcagaaggcccagctggacagctttgtgaagtccatgagcagcctgcagaatgaccgggaccgcatcgtgggggactaccagcagctggaggagcggcacctgagcatcatcctggagaaggaccagctgatccaggaggccgctgctgagaacaacaagctgaaggaggagatccggggcctgcggagccacatggatgacctgaacagtgaaaatgccaagctggatgctgagctgatccagtaccgggaggacctgaaccaggtgatcaccatcaaggacagccagcagaagcagctgctggaggtgcagctgcagcagaacaaggagctggagaacaagtatgccaagctggaggagaagctgaaggagagcgaggaggccaatgaagacctgcggcgctccttcaatgccctgcaggaggagaagcaggacctgagcaaggagattgagagcctgaaggtgtccatcagccagctgacccggcaggtgacagccctgcaggaggagggcaccctgggcctgtaccacgcccagctgaaggtgaaggaggaggaggtgcaccggctgagcgccctcttcagcagcagccagaagagaattgctgagctggaggaggagctggtgtgtgtgcagaaggaggccgccaagaaggtgggggagattgaggacaagctgaagaaggagctgaagcacctgcaccatgatgctggcatcatgagaaatgaaacagaaacagctgaggagcgggtggccgagctggcccgggacctggtggagatggagcagaagctgctgatggtgaccaaggaaaataaaggcctgacagcccagatccagagctttggccgctccatgagcagcctgcagaacagccgggaccacgccaatgaggagctggatgagctgaagaggaaatatgatgccagcctgaaggagctggcccagctgaaggagcagggcctgctgaaccgggagagagatgccctgctgtctgaaacagccttctccatgaacagcacagaggagaacagcctgagccacctggagaagctgaaccagcagctgctgagcaaggatgagcagctgctgcacctgagcagccagctggaggacagctacaaccaggtgcagagcttcagcaaggccatggccagcctgcagaatgaaagagaccacctgtggaatgagctggagaagttcaggaagtctgaggagggcaagcagaggtctgctgcccagcccagcaccagccctgctgaggtgcagagcctgaagaaggccatgagcagcctgcagaatgaccgggaccggctgctgaaggagctgaagaacctgcagcagcagtacctgcagatcaaccaggagatcacagagctgcaccccctgaaggcccagctgcaggagtaccaggacaagaccaaggccttccagatcatgcaggaggagctgcggcaggagaacctgtcctggcagcacgagctgcaccagctgaggatggagaagagctcctgggagatccacgagaggaggatgaaggagcagtacctgatggccatcagtgacaaggaccagcagctgagccacctgcagaacctgatccgggagctgcggagcagcagcagccagacccagcccctgaaggtgcagtaccagaggcaggccagccctgagaccagcgccagcccagatggcagccagaacctggtgtatgaaacagagctgctgcggacccagctgaatgacagcctgaaggagatccaccagaaggagctgcgcatccagcagctgaacagcaacttcagccagctgctggaggagaagaacaccctgagcatccagctgtgtgacaccagccagagcctgcgggagaaccagcagcactatggagacctgctgaaccactgtgctgtgctggagaagcaggtgcaggagctgcaggccggccccctgaacattgatgtggcccctggggccccccaggagaagaatggagtgcacaggaagagtgaccctgaggagctgcgggagccccagcagagcttcagcgaggcccagcagcagctgtgcaacacccggcaggaggtgaatgagctgaggaagctgctggaggaggagcgggaccagagggtggccgcagaaaatgccctgtctgtggccgaggagcagatccggcggctggagcacagcgagtgggacagcagcaggacccccatcatcggcagctgtggcacccaggagcaggccctgctgattgacctgaccagcaacagctgcaggaggaccaggtctggagtgggctggaagagggtgctgcggagcctgtgccacagcaggaccagggtgcccctgctggccgccatctacttcctgatgatccacgtgctgctgatcctgtgcttcaccggccacctgtag

SEQ ID NO: 146736 - DNA, 9780 bp, Artificial Sequence
  derived and/or modified sequence
atgctgagccggctgagcggcctggccaacgtggtgctgcacgagctgagtggcgacgacgatacagatcagaatatgcgggcgcctcttgaccccgaactgcaccaggagtcagacatggagttcaataacacaacgcaggaggatgtccaagagaggctggcctacgcagaacagttggtcgttgagcttaaggatatcatccgccaaaaggatgtgcagctccagcagaaggacgaagcgctgcaggaggagagaaaggcagctgataacaagattaagaagctgaaattgcatgcgaaggccaaactgactagcctgaacaagtacatcgaggagatgaaagcacaggggggaaccgtcctccctacagaacctcagtcagaagaacagctaagtaaacacgacaaatcatcaaccgaggaggagatggagatcgagaagattaaacacaagctccaggagaaagaagaactgatttcaacgctgcaagcacagttaacacaggcccaggcagagcagcccgcacagtcttccactgagatggaagagttcgtcatgatgaaacagcaactgcaggaaaaagaagagtttatttcgactctccaagcacagctctcacagacccaggctgagcaggctgcccagcaagttgtacgtgagaaagatgcaagattcgaaacccaggtccgacttcacgaagatgaattactccagctcgtgacccaagccgacgttgagacagaaatgcagcagaaactgcgcgtgctgcagcgcaaactggaagagcacgaagagtctcttgtgggacgtgcacaggtggtggaccttttgcagcaggagctcaccgccgccgagcagaggaaccagatcctgtcccagcagctgcagcagatggaagccgagcacaacacactgcgcaataccgtagaaacagaacgcgaggagtcaaagatccttctggagaagatggagctggaggttgccgaacgcaaactttcattccataacctgcaggaggagatgcaccatctgcttgagcaattcgagcaagccgggcaggcccaggccgagcttgagagtagatacagcgcactggagcagaaacataaggcagagatggaagagaaaacctctcacattttgagtttgcagaaaaccgggcaggaactgcaatccgcatgtgacgccctgaaagaccagaattctaaactgctccaggacaaaaatgaacaggccgtccagagcgcacaaacaatccaacagctggaggatcagcttcaacagaagtccaaggagatctctcagtttcttaatcggctacccctgcagcagcacgagacagccagccagacaagtttccctgacgtctataacgagggaacccaggcagtaacagaggaaaatatcgccagtctgcaaaaacgggtggtagagttggagaatgaaaagggcgccctcctgctttccagcatcgagctggaggaactcaaggctgagaacgaaaagttaagttcccagattaccctcctagaagctcagaaccggacaggcgaggcagatcgagaagtctccgaaatttcaatcgttgacatcgccaataagagatcctctagcgccgaagagagtggccaagatgtgctggaaaatacattcagccaaaagcacaaagaactgtccgtcctgctgttggagatgaaagaggctcaggaagagatcgcgtttttgaaactgcagctgcagggcaagagggccgaggaagccgaccacgaagtgctagaccagaaggagatgaagcagatggaaggtgagggcattgctcctataaagatgaaggtgtttctggaggacactggtcaggatttccccctcatgcctaatgaagaatcttccctccccgccgtggaaaaagagcaggcctcaaccgagcaccagtcacggacctcagaggaaatatcccttaatgacgccggggtggagttgaaatccactaagcaggacggcgacaagtcgctctctgcagtgccagacataggtcagtgccaccaggatgagcttgagcggctcaagtcgcagatcctggagttggagctcaatttccataaggcccaagaaatatatgagaagaatctggatgaaaaagccaaggaaattagcaatctgaaccagctgatcgaggagtttaagaaaaacgctgacaacaactcttccgcgtttaccgccctgtcagaagagagagatcagctactgtctcaggtcaaagagctgtctatggtgacggaattgcgggcacaggttaaacaattggaaatgaaccttgccgaggctgaacggcagcgccgtctcgattacgagagtcagacagcccatgataatctacttacagagcaaattcatagcttgtccattgaggccaagtcgaaggatgtgaagatcgaagttctgcagaatgagcttgatgatgttcagctgcaatttagcgaacagagtacgctcattagatctctgcaatctcaactacagaataaggaaagtgaggtgctcgagggtgccgagcgtgttaggcacatctccagcaaggtggaggaacttagccaggcactttcccagaaggaattggagatcacaaagatggatcaactcttattggaaaagaagagggacgtggagacgctgcagcagacaatcgaagaaaaggaccagcaggttactgaaatttccttctccatgactgaaaagatggtgcaactcaacgaggaaaagttttcactgggcgtcgaaataaagactctcaaggagcagttaaatctcctctctagggcggaagaggccaagaaagagcaggttgaagaggataacgaggtctcttccggtttaaagcagaattacgacgaaatgagtcccgccggccaaatttcgaaagaggagctgcagcacgagtttgacctgctgaagaaagaaaatgagcagcgaaagcgcaaacttcaggctgctctgattaacagaaaagagctcctacaaagggtctcacgcctggaagaagagctcgcaaatttgaaagatgaatcaaagaaagagatccccctgagcgaaactgaacgcggagaagtagaagaggacaaggagaacaaagaatactcggagaagtgtgtgacaagcaagtgtcaagagatcgagatatacttaaaacagaccatctccgagaaggaagtggagttgcagcatataagaaaggacctagaggagaagctagcagcagaggaacaatttcaggccctggttaaacagatgaatcaaaccctccaggataaaaccaatcaaattgacctgctgcaggctgagattagtgaaaatcaggctatcatccagaagctgattacgtctaacaccgatgcctccgatggcgattcagtggcgctggtgaaggaaacagtggtgatttctcccccatgcaccgggagcagcgaacactggaagcctgagctcgaggagaaaattttggcccttgaaaaagagaaagaacaacttcagaagaagctgcaggaagcactgaccagcaggaaggcgattttgaagaaagcacaggagaaggagcgacatctaagagaggaactgaagcagcagaaggatgactacaacaggctgcaagaacaatttgacgagcagtctaaggagaatgaaaatatcggtgaccagctccggcagctgcaaattcaggtgcgggaaagcatcgatggcaaattgccttccacggaccagcaagaatcttgttcatccacccccgggctggaggagccattatttaaagccactgagcagcaccacacccagccagtgctggaaagtaacctgtgccccgattggccgagtcactctgaggatgccagtgcgctgcaggggggcacttcagtggcccagatcaaagcgcagctgaaagagatcgaggcagaaaaagtggaactggagttgaaggtgtcctccaccaccagcgagctcactaagaaatccgaggaggtgtttcagctccaggagcagatcaacaaacaagggctcgaaatcgagtctctcaaaactgtctcgcacgaggccgaagtgcatgccgagagtttgcaacagaaactcgaatcttctcagctgcagattgccgggctggagcaccttcgcgaacttcagcccaaacttgacgagctgcaaaaactcatctcgaaaaaggaggaggacgtcagctacctctccggacaactgagtgagaaagaggcggccttgacaaaaatccagacggagattattgagcaggaggatctgattaaagccctccatacccagctagagatgcaagccaaggagcacgacgaacggatcaaacaactccaggtggagctgtgcgaaatgaagcagaagcctgaggagatcggagaagagagccgcgcaaagcaacagatccagcgcaaactccaggcagcccttatctcccgaaaagaagctctgaaagagaataagagcctgcaggaggagctctcactggcgagggggactatagaacggctgactaaaagcctggcagacgtcgaatcccaagtcagcgcgcagaataaagaaaaggataccgtactcggacgtcttgctttgctacaggaggaacgagacaaacttatcacagaaatggaccgctctctcctggagaaccaatctctaagtagtagttgtgaaagtctcaaactggctctcgagggactgactgaggataaggagaaactggtcaaggagatcgaaagtctgaagtcatccaagatagccgaatcaactgagtggcaggagaagcataaggagttacagaaggaatatgagattcttcttcagtcatacgagaacgtctctaatgaggccgaacggattcaacatgtcgtcgaagctgtgcggcaggaaaaacaagaactctatggcaagctgagatccacggaggcaaataagaaggagacagagaagcagttgcaggaggcggagcaggagatggaggagatgaaggagaaaatgaggaagttcgcgaaatcgaaacaacaaaagattctggagcttgaggaagagaacgatcgtctaagagcggaagtgcaccccgctggagacacagctaaggagtgtatggagaccctgcttagtagcaacgcttcaatgaaggaggagcttgaacgggtgaagatggagtatgagactctgtccaaaaagtttcaatctctgatgtctgaaaaggacagccttagcgaggaggttcaggatctcaaacaccagattgagggaaatgtctccaaacaagcaaatctcgaggcaactgagaaacatgacaatcagactaatgttaccgaggaaggcacacagagcatacccggcgagaccgaagaacaggacagcctcagtatgtctacaaggcccacatgcagtgagtccgtgccttctgctaaaagcgccaatcctgccgtcagtaaggacttttctagccatgacgagatcaacaattacctgcaacagatcgaccagctgaaagagagaatcgcgggactcgaagaagagaaacagaaaaacaaagagtttagtcagacactcgaaaacgaaaaaaacaccctgctgagccagatttcgaccaaagatggagagcttaaaatgctgcaggaagaagtgaccaagatgaacttactgaaccaacagatccaagaggagctgagccgggtgaccaaactgaaagagacggccgaggaggaaaaagatgatctggaggaacgcttgatgaaccagctggccgaattgaatgggtccatcgggaactattgtcaagacgttactgatgcccagattaagaacgagctcctggaatctgagatgaagaatttaaagaagtgtgtgtctgagctggaggaggaaaagcagcaactggttaaagagaagaccaaggtcgagagcgagatccggaaggagtatctcgaaaagatccagggtgctcagaaagagcccggtaacaagtcccacgccaaagaactgcaggagcttcttaaggagaaacagcaggaagttaaacagctgcagaaagattgtatcaggtatcaagagaagattagcgccctggagagaacggtcaaggctttagaatttgttcagacagaatcacagaaggacctagagattaccaaagagaatctagcacaggccgtcgagcacaggaaaaaagcacaagctgagctcgcatcctttaaagtcctacttgatgacactcaatccgaagccgcacgggtattagctgataatctgaagctcaagaaggaattgcagagcaataaggagtctgtcaaatctcagatgaagcagaaggatgaggacttagaacgccgtctggagcaggcagaagaaaaacatttgaaagaaaagaagaatatgcaggagaagctggatgccctgaggagagagaaggtccacctggaagaaacaataggtgagattcaagtcacactgaacaaaaaggataaggaggtacagcagttacaggaaaacctggacagcacagtcacccagttggctgccttcacaaagagcatgtcctcgctgcaggatgaccgcgatagggtgattgacgaggcaaaaaaatgggagaggaagttctccgatgccattcagtcgaaagaagaggaaattaggctgaaggaggataactgctccgtgcttaaggatcagttaaggcaaatgtctattcacatggaggagctcaagatcaacatctctaggcttgagcacgataaacaaatctgggagagcaaggctcaaactgaggtgcaattgcaacagaaggtttgcgacacccttcagggtgagaacaaagagttgctgtcccagttggaggagacgagacacctctaccactcctcacaaaatgaactagccaagctcgagtcagagttgaaaagtcttaaagatcagctgaccgacctctccaattctctggagaagtgcaaggaacagaaaggtaatctcgagggcatcatcaggcaacaggaagccgacattcaaaactccaagttttcctatgaacagctggagactgacctgcaagcctctagagaacttacatctcgactgcatgaagagattaatatgaaggagcagaaaatcatctcgttactgtctggaaaagaggaagcaattcaggttgcaatcgccgaactgaggcaacaacacgacaaggagatcaaagagctggaaaatcttctctctcaggaggaagaagaaaatattgtacttgaagaagagaataagaaggccgtggataaaaccaaccaactgatggagaccctcaaaactataaagaaagaaaatattcaacagaaggctcagttggacagtttcgtcaaaagcatgagtagcctccagaatgatcgagacaggatcgtaggcgattaccagcagctggaggagagacatctttctataattttagaaaaggaccagctgatccaggaggcagccgctgagaacaacaagctgaaagaggagattcgaggtctgagatcccacatggacgacttaaatagcgaaaatgccaagcttgatgccgagttaattcaatatagggaggacctcaaccaagtaatcactatcaaggactctcagcagaaacaattgctggaagtgcagttacaacagaacaaggagctggaaaataaatatgccaagcttgaggagaagctgaaggaatccgaagaagcaaatgaggacctgcggagatcctttaacgccttgcaggaagaaaaacaggatctttcaaaagagatcgagtccctgaaagtttctatctcccagctaacccgccaggtcacagctctccaggaggaaggcacactgggactataccatgctcagcttaaagtaaaggaggaagaggtgcaccgccttagtgctttgttctccagtagccaaaaaagaatcgccgaattggaagaggagctagtgtgtgttcagaaagaggccgcaaagaaggttggagagatcgaggacaaactcaaaaaggagctgaagcacctgcatcatgacgctggcatcatgaggaatgagacagagaccgcggaggaacgagtggcggagctagcccgggacctggtagagatggaacagaagctactgatggtgacaaaagaaaacaaaggcctcactgctcaaatacagagctttggcaggtctatgtcaagcctgcagaatagtcgagaccatgccaatgaagagttagatgagctgaaaagaaagtatgatgcctccctcaaagagctggctcagctgaaggagcagggcttactgaatcgcgaaagggatgctttactgtccgaaaccgccttttcgatgaactctacagaggagaattcattatctcatctggagaagctgaatcagcagcttttgtcaaaagacgaacaactgttgcatctttcctctcagcttgaggatagttataaccaggtccagagtttctccaaggccatggctagcttacagaatgagcgggaccacctctggaatgagctggaaaagttcaggaaaagcgaggagggaaagcaacgatcggccgctcagcccagcaccagtcctgctgaggtgcagtcactcaaaaaggcaatgtcatcactgcagaatgaccgcgaccggctgctgaaagagcttaagaacctacagcagcagtacctgcagatcaaccaggaaatcacagaactgcatcccctaaaagctcagctacaggagtaccaggacaaaaccaaggcgtttcagattatgcaggaagagttgcgccaagagaacttgtcctggcaacacgagctacaccagctcaggatggagaagtcctcttgggaaatacacgagcggcgtatgaaagagcagtatctcatggctattagtgataaggatcaacaactctcgcacctgcagaacctcattcgggaactaaggtcctctagctctcagacccagcccttgaaagtgcagtatcagcgccaagccagcccagaaacaagcgcttccccggatggcagccagaacctggtctatgaaacagagctgctgcggacccagctgaacgattcgctaaaggagattcatcagaaagaactgcgcattcaacagttaaatagcaatttttcccagctgctcgaagaaaagaatacattgtccattcaactgtgtgataccagccaatcgctgcgggagaaccaacagcactatggtgatctgctgaaccactgtgcagtgctggaaaagcaggtgcaggaactgcaggcaggtccactcaacatagatgtagcccctggagctcctcaggagaaaaacggcgtccatcgcaagtcagatcctgaggagttacgcgagcctcagcagagtttctcagaggcccaacagcaactatgcaatacccgccaggaggtgaacgaactaaggaagttactggaggaagagcgagaccagagagtcgctgccgagaacgcactgagcgtagcagaggaacaaatcaggcgcttggaacattccgagtgggactcctctcgcaccccaatcatcggttcctgcggaacacaggaacaggcattacttatagatctcaccagcaactcctgtcggcgtacacgctccggagttggctggaaaagggtacttcgcagcctgtgccacagtcggaccagagttcccctcctggcagctatatatttcctgatgattcatgttctcctgattctgtgtttcacgggtcatctctag

SEQ ID NO: 146737 - DNA, 9779 bp, Artificial Sequence
  derived and/or modified sequence
atgttgtcgcggcttagcggtttagcaaatgtcgtgttacatgagttgtcaggagatgatgatactgaccagaatatgcgagctccgcttgacccggagcttcatcaggagagcgacatggaattcaataacaccacccaggaggatgtccaggagaggctggcatatgctgagcaactcgttgttgagctcaaagatatcatccggcaaaaagacgtacagctccagcagaaagacgaggccttacaggaagaacgaaaagctgctgacaacaaaatcaaaaagttgaagttgcatgcgaaagctaagctgacaagcttaaacaaatacatcgaggagatgaaggcgcagggagggacagttttgcccaccgagccccagtccgaagagcaactttcgaagcacgacaaaagttctacagaagaagagatggagattgaaaagatcaagcacaagctgcaggagaaggaagagttgatcagcaccttacaggctcagctcacccaagcacaagccgaacaacctgctcaaagctccacagagatggaggagttcgtcatgatgaaacaacaactacaggaaaaggaagaattcatttcaacactgcaggcacaactctctcagacccaagccgagcaggctgcacagcaggtcgtaagggaaaaagacgcaagatttgagacacaagttaggctgcacgaggacgagctgcttcagctcgttacccaggctgatgtggaaacagaaatgcaacaaaaactgcgagtgctacagcgcaagttggaagaacacgaggagagcttggtggggagggcgcaggtagtggacctcctgcaacaggagttaaccgccgctgagcagcgcaaccagatcctgtcccagcagttacagcaaatggaagcagagcacaacacccttcggaacaccgtggaaacggagagagaagagtcgaagattctgctggaaaagatggagttggaagtggcagaacggaaactaagttttcacaatctgcaagaggaaatgcaccatctgcttgaacagttcgaacaggccggacaggcccaggctgaacttgagtctcggtatagcgctctcgaacagaaacataaggccgagatggaggaaaaaactagccacattttgagcttgcagaagactggccaggagttacagagcgcctgtgacgccctcaaggaccagaattctaagcttcttcaagataaaaatgaacaggccgtccagtctgcccagaccattcagcagctcgaggatcagcttcagcagaaatctaaagagatctctcagtttcttaatcgtctcccactccagcagcacgagactgcatcgcaaacatcctttcccgacgtgtacaatgaggggacgcaggccgtcaccgaggagaacattgcgtctctgcaaaaacgggtggtcgagctggaaaacgaaaagggggcactgctgctgagcagcattgagctggaggaactcaaagctgaaaacgaaaaactttccagtcagataaccctattggaggcacagaacagaaccggtgaggccgatcgcgaggtgtccgagatatcaatcgtggacatagcaaataaaaggagctcttctgcggaagagagtggacaggacgtcctcgagaatactttcagtcaaaaacacaaggagttgagtgtgcttctcctagagatgaaggaggctcaggaagagatagcctttctgaaactccagttgcagggcaaacgtgctgaggaggccgaccatgaggttctggaccagaaggaaatgaaacaaatggaaggggagggaattgctcctattaagatgaaggtttttctggaggatactggccaagattttcctctgatgcctaatgaagaatcttccctccctgcagtggagaaggagcaagcctccaccgaacatcagagtcgcacatccgaagagatttctctgaatgacgcaggggtcgaactgaaatcaacaaaacaggatggcgacaaaagcctgtctgctgttcctgatattgggcagtgtcaccaggacgagttggaaagactgaagtcccagatcctggaactcgaattgaactttcacaaagcccaagagatctatgaaaagaacctggacgagaaggcaaaagaaatttcgaatctgaaccaactgatcgaagagtttaaaaaaaatgccgacaacaatagttccgcgtttacagctttaagtgaggaacgggatcagctgctctctcaggtgaaggaattatcaatggtgacagagctgcgtgcacaggttaaacaactagagatgaatctagccgaagcagaacggcaacgccgactcgactacgagtctcaaacggcccatgacaacctactgactgaacagattcactccctcagtattgaggcaaagtcaaaagatgtcaagatcgaggtgctgcagaacgaattagatgacgtgcagctccaattcagcgaacagagcaccttgatacggtcccttcagtcccagctacagaacaaagaatccgaagtcctcgagggtgctgaaagggtccggcacatctcttcaaaggttgaagaacttagtcaggcactgagccagaaggagctcgagatcacgaagatggatcagcttctccttgagaaaaagcgagatgtggagaccttacagcagactattgaagagaaggaccagcaggttaccgagatttctttcagcatgacggagaagatggtacagctgaacgaggagaaattttcattaggtgttgagatcaagaccctcaaagagcaactgaacctgctctcccgcgcagaggaggctaagaaagagcaagtggaagaggataacgaggtaagctctggcctgaagcaaaactatgatgaaatgagccctgcaggacaaatttctaaggaagagctgcaacacgaattcgacctgctgaagaaggagaacgaacagcggaagcgaaagctgcaggccgcactgataaatcggaaggaattgctgcagcgtgtcagccggttggaagaggagctcgccaacctgaaggacgagtccaaaaaggaaatcccattgtccgagacagagcgcggtgaagtcgaagaggacaaagagaacaaagagtacagcgaaaagtgtgttacatcaaagtgtcaggagattgagatctacctgaagcagaccatcagtgaaaaggaagtcgaacttcagcatatcagaaaggatcttgaggagaaactggctgcggaagaacagttccaagcactggtgaagcagatgaatcagaccttgcaggataagactaaccagatcgaccttctccaggccgagatttcagaaaaccaggccatcatacagaagttaatcaccagcaacactgatgcgtccgacggtgatagtgttgctcttgtaaaagagaccgtggttatcagtcccccttgcactggcagttcagagcactggaagcccgagctggaagaaaagattctagcactggagaaagaaaaggagcaattacaaaagaagcttcaggaagccctgactagcaggaaagcaatcctgaaaaaggcccaagaaaaggaaaggcatctgcgggaagagcttaaacagcaaaaagatgattacaatcggttgcaggaacagtttgacgaacagtcaaaggagaacgagaatataggggaccagctgagacagctgcagattcaagttagggaatccattgacggtaaattgccatctactgatcagcaggagtcttgctcaagcacaccaggcctggaggagccgctgttcaaggctacagaacagcaccacacacagcccgttctggaatccaatctgtgccctgattggcctagccacagtgaagatgcttctgctctacaaggtggcaccagtgtcgcccagatcaaagcccagctgaaagagatcgaggctgaaaaggtcgaactggaactgaaagtgagctccacaacatctgaactcaccaaaaaaagcgaggaggtatttcaactgcaggagcagatcaacaagcaggggctggagatcgaaagcttgaagacagtgtcacatgaggctgaagttcacgcagagtctttacagcagaagctagagtcctcgcaactgcagattgcaggtctcgagcatcttagagagctgcagcccaaactcgatgagttgcagaaactgatcagtaagaaggaagaagacgtctcttacctctccggacagctctcagaaaaggaggcagccttgaccaagattcagaccgaaattatcgagcaggaggatctgatcaaggcactccatactcagctggagatgcaggcaaaagaacacgacgaaaggatcaaacagctgcaggttgagctgtgcgaaatgaagcagaagccagaagagatcggcgaggagtcacgggctaaacaacagatccagaggaaattgcaggcagctcttatatccaggaaagaggcactgaaagaaaataagtctctgcaagaggagctgagcctggccagaggcactatagagcggttgactaagtcactcgctgacgtagagagtcaagtttccgcccagaacaaagaaaaggacacggtcttaggccgtttagctctgttacaagaggagcgtgataagctgatcactgaaatggacaggtcccttctggaaaaccaatcgctctcgagctcgtgtgagtctctgaagctggcactggaagggttgactgaggacaaggaaaagttggttaaagagatagagtcgctcaaaagtagcaagattgccgagtccacagaatggcaggaaaaacacaaggagctgcagaaggaatacgagattctcctgcagagttatgaaaacgtctcgaacgaggccgagcgcattcaacacgtggtcgaagcagtcaggcaagaaaagcaagagctatatggaaaacttcggtcgacggaggcgaacaagaaagaaactgagaagcaactgcaggaagccgagcaggagatggaagagatgaaggagaagatgcggaaatttgcaaagtctaagcagcagaagatcctggaactggaggaggaaaacgacagactgagagctgaggtccaccctgcgggtgatactgctaaggagtgcatggagacactgttgagcagcaacgccagcatgaaggaggagttagaacgggttaagatggagtacgagacactgtccaaaaagtttcagtccctcatgagcgaaaaagactccctctcagaggaggtgcaagatttaaagcaccagatcgagggaaatgtttccaaacaggcaaatctggaagcaactgagaagcacgacaatcagactaatgtcaccgaggaagggactcaatcaataccaggagaaactgaagagcaggattcgctgagtatgagcaccagaccaacatgcagcgaatcggtgcctagcgccaagagcgccaacccggctgtgtccaaggacttcagcagtcacgatgaaataaataattacctgcaacagattgaccagttgaaggagaggattgctggtcttgaggaggaaaaacagaaaaacaaggagttttcccaaactctggaaaacgagaaaaacaccctgctctcccagatctctacgaaggatggggaactcaagatgctgcaggaagaggtaactaagatgaacctactgaatcagcagatccaagaggaactgagtagagtaaccaaactgaaagagaccgccgaagaagagaaagacgatcttgaggagagactcatgaaccagctggcagagcttaacgggtctatcggaaactactgccaagatgtgacggatgcccagatcaagaacgaactcctggagtccgagatgaaaaatctgaaaaaatgtgtctccgaactggaagaggagaaacaacaattggtgaaggaaaagacgaaggttgaaagcgaaatcaggaaggaatacctggaaaaaattcagggggctcagaaagagccgggtaataaaagccatgccaaggaattgcaggagctgctgaaagaaaagcagcaggaagtgaagcaattacagaaagattgcattagataccaagaaaaaatttccgcactggaacggacagtaaaagcgctagaatttgtgcagaccgagtcacagaaggatctggaaataactaaggagaatctggcccaggctgtggaacaccgcaaaaaagcccaggctgagttagcatcattcaaggtcctgctcgacgacacccagagcgaggccgcacgggtccttgcggacaacctgaagcttaagaaggagctccagagcaataaggaatctgtgaagagccagatgaaacaaaaagacgaagatctggagcgcagattggaacaagcagaagaaaaacacctgaaagagaagaagaacatgcaggagaagctggatgctctgagacgggaaaaggtccaccttgaagagacgattggcgaaatccaggtgactttgaataaaaaagacaaggaggtgcaacagctgcaggagaacctggactccactgttacacagctggctgcatttacaaagagcatgtcctctctccaggacgacagagacagggtaatcgatgaggccaagaagtgggagaggaagttctctgatgccattcaatctaaggaagaggagatacgcctcaaggaggacaactgctccgtgcttaaggatcagctcagacagatgagcattcatatggaggagttaaaaatcaacatctccaggctagaacatgataagcagatatgggaatcaaaggctcagactgaggttcagctgcagcagaaagtgtgcgacaccctacagggagagaataaagagctcctgagccagttggaagagactcggcacctgtaccatagcagccagaacgagctggctaaactcgaaagcgaactaaagtcccttaaggaccagctaactgacctcagcaactccctggagaagtgtaaggagcagaaaggtaacctggaaggaattatcagacaacaggaagcagacattcagaattctaaattctcatacgagcaactggaaaccgatttacaggcctctcgcgagctcacttctaggttacatgaagagattaatatgaaagagcagaaaattatttccctcctctctggtaaggaggaggccatacaagtggccatcgccgagttgaggcagcaacatgataaagaaatcaaggagctagaaaacctcctgtctcaagaggaggaggagaatatcgtccttgaagaggagaacaagaaggctgtggataagacaaaccagctaatggaaacactgaagaccattaaaaaggagaatatccagcaaaaggcgcagttagactctttcgttaaaagcatgtcatccctacagaatgaccgcgataggatcgtgggcgattatcaacagttagaggagcgacacctcagcataattctggagaaggatcagttgatacaggaggccgctgccgaaaacaacaagcttaaggaagagattagaggactgcggtcccacatggacgatctgaatagcgagaacgctaaactggatgcggagctgattcagtacagggaggatctgaaccaggtcataacaataaaggattcacaacagaagcaactgctggaggtgcagctgcagcagaacaaggaactggagaataaatatgcgaaactggaggagaagctgaaagagtcggaagaggctaacgaggacctcagaaggagcttcaatgccctccaggaagaaaaacaggacctgtccaaagaaatcgagagccttaaggtgagtatttctcagttgaccaggcaggtgacagccctacaagaagaggggactctaggactttatcacgcccagttgaaagttaaagaggaagaggtgcaccgactcagcgcactcttcagtagctcccagaaaagaatcgcggaactggaagaagaactggtttgcgtccagaaggaggcggcaaaaaaagtcggcgagattgaagataaacttaagaaggagctgaagcacctgcatcacgatgcaggaattatgcgtaatgaaacagaaactgccgaagagagggtagccgagttagccagggacctggtcgagatggagcagaagttgttgatggtgaccaaggaaaataaaggtttgacagcccagatacagtccttcggccgttccatgagcagcctacaaaattccagagaccatgcaaatgaggaactagatgagctgaagcgtaagtacgatgcctcccttaaagaactggctcaactgaaggaacagggattgttgaatagagagagggacgcgttattgtccgagactgcattttctatgaattcaacagaagagaactcacttagccatctagaaaaacttaaccaacagctgctttctaaggacgaacagttactacatctctccagtcagcttgaggacagctacaaccaggtccagagcttctcaaaggccatggcctccctgcagaacgagcgggatcacttatggaacgagctagagaaattccgaaaaagcgaggagggcaagcaaagatctgccgctcaaccaagcaccagcccagccgaggtgcagagccttaagaaagccatgtcatccttacagaatgacagagaccggcttctgaaggagctgaagaaccttcagcagcaatatttgcaaatcaatcaggagatcactgagcttcaccctttgaaagcccagctacaggaatatcaagataaaacaaaggcctttcaaattatgcaggaagagctgcgccaggaaaacttgagttggcaacatgagctccatcagctcaggatggagaaaagcagctgggagatacatgaaagacgtatgaaagaacagtatctcatggctattagcgataaagaccagcagctctcccacctccagaacttaattcgcgagttacggtctagctcaagtcagacccaaccactcaaggtacagtaccagcggcaggctagcccagagacctctgcctctcctgatggcagccagaatctcgtgtatgagaccgagttgttgcgcacacaactcaacgactcactgaaggagatccaccagaaagagctgaggattcagcagctgaacagcaatttcagtcagctcctggaagagaaaaatacattgtcgatccagctgtgtgatacttctcaatctctcagagaaaaccagcagcactacggggacttactcaatcattgcgctgtgctggaaaagcaggtccaggagctgcaagccggacccttgaacatcgacgtggcccctggagccccacaggagaaaaatggcgtgcacaggaaatcagaccccgaggaactgcgggagccacagcaaagcttttcagaggctcagcagcagctgtgcaatacacgccaggaggtcaacgaactaaggaagctgctagaggaagagagagaccagcgcgttgccgcagaaaatgctctgagcgttgctgaagagcaaattaggcggctcgagcactccgaatgggattcttctaggacacccataattggcagttgcggaacacaagagcaggccttactgatcgacctcacctcaaattcctgccggaggactagaagcggagtgggttggaagagggttctgagaagtctgtgtcacagccggacacgggtgcctctcttggctgctatttacttcctgatgatccatgtgctgctgatcctctgctttacaggtcatctcta

SEQ ID NO: 146738 - DNA, 9780 bp, Artificial Sequence
  derived and/or modified sequence
atgctgagcagactgagcggcctggccaacgtggtgctgcacgagctgagcggcgacgacgacaccgaccagaacatgagagcccccctggaccccgagctgcaccaggagagcgacatggagttcaacaacaccacccaggaggacgtgcaggagagactggcctacgccgagcagctggtggtggagctgaaggacatcatcagacagaaggacgtgcagctgcagcagaaggacgaggccctgcaggaggagagaaaggccgccgacaacaagatcaagaagctgaagctgcacgccaaggccaagctgaccagcctgaacaagtacatcgaggagatgaaggcccagggcggcaccgtgctgcccaccgagccccagagcgaggagcagctgagcaagcacgacaagagcagcaccgaggaggagatggagatcgagaagatcaagcacaagctgcaggagaaggaggagctgatcagcaccctgcaggcccagctgacccaggcccaggccgagcagcccgcccagagcagcaccgagatggaggagttcgtgatgatgaagcagcagctgcaggagaaggaggagttcatcagcaccctgcaggcccagctgagccagacccaggccgagcaggccgcccagcaggtggtgagagagaaggacgccagattcgagacccaggtgagactgcacgaggacgagctgctgcagctggtgacccaggccgacgtggagaccgagatgcagcagaagctgagagtgctgcagagaaagctggaggagcacgaggagagcctggtgggcagagcccaggtggtggacctgctgcagcaggagctgaccgccgccgagcagagaaaccagatcctgagccagcagctgcagcagatggaggccgagcacaacaccctgagaaacaccgtggagaccgagagagaggagagcaagatcctgctggagaagatggagctggaggtggccgagagaaagctgagcttccacaacctgcaggaggagatgcaccacctgctggagcagttcgagcaggccggccaggcccaggccgagctggagagcagatacagcgccctggagcagaagcacaaggccgagatggaggagaagaccagccacatcctgagcctgcagaagaccggccaggagctgcagagcgcctgcgacgccctgaaggaccagaacagcaagctgctgcaggacaagaacgagcaggccgtgcagagcgcccagaccatccagcagctggaggaccagctgcagcagaagagcaaggagatcagccagttcctgaacagactgcccctgcagcagcacgagaccgccagccagaccagcttccccgacgtgtacaacgagggcacccaggccgtgaccgaggagaacatcgccagcctgcagaagagagtggtggagctggagaacgagaagggcgccctgctgctgagcagcatcgagctggaggagctgaaggccgagaacgagaagctgagcagccagatcaccctgctggaggcccagaacagaaccggcgaggccgacagagaggtgagcgagatcagcatcgtggacatcgccaacaagagaagcagcagcgccgaggagagcggccaggacgtgctggagaacaccttcagccagaagcacaaggagctgagcgtgctgctgctggagatgaaggaggcccaggaggagatcgccttcctgaagctgcagctgcagggcaagagagccgaggaggccgaccacgaggtgctggaccagaaggagatgaagcagatggagggcgagggcatcgcccccatcaagatgaaggtgttcctggaggacaccggccaggacttccccctgatgcccaacgaggagagcagcctgcccgccgtggagaaggagcaggccagcaccgagcaccagagcagaaccagcgaggagatcagcctgaacgacgccggcgtggagctgaagagcaccaagcaggacggcgacaagagcctgagcgccgtgcccgacatcggccagtgccaccaggacgagctggagagactgaagagccagatcctggagctggagctgaacttccacaaggcccaggagatctacgagaagaacctggacgagaaggccaaggagatcagcaacctgaaccagctgatcgaggagttcaagaagaacgccgacaacaacagcagcgccttcaccgccctgagcgaggagagagaccagctgctgagccaggtgaaggagctgagcatggtgaccgagctgagagcccaggtgaagcagctggagatgaacctggccgaggccgagagacagagaagactggactacgagagccagaccgcccacgacaacctgctgaccgagcagatccacagcctgagcatcgaggccaagagcaaggacgtgaagatcgaggtgctgcagaacgagctggacgacgtgcagctgcagttcagcgagcagagcaccctgatcagaagcctgcagagccagctgcagaacaaggagagcgaggtgctggagggcgccgagagagtgagacacatcagcagcaaggtggaggagctgagccaggccctgagccagaaggagctggagatcaccaagatggaccagctgctgctggagaagaagagagacgtggagaccctgcagcagaccatcgaggagaaggaccagcaggtgaccgagatcagcttcagcatgaccgagaagatggtgcagctgaacgaggagaagttcagcctgggcgtggagatcaagaccctgaaggagcagctgaacctgctgagcagagccgaggaggccaagaaggagcaggtggaggaggacaacgaggtgagcagcggcctgaagcagaactacgacgagatgagccccgccggccagatcagcaaggaggagctgcagcacgagttcgacctgctgaagaaggagaacgagcagagaaagagaaagctgcaggccgccctgatcaacagaaaggagctgctgcagagagtgagcagactggaggaggagctggccaacctgaaggacgagagcaagaaggagatccccctgagcgagaccgagagaggcgaggtggaggaggacaaggagaacaaggagtacagcgagaagtgcgtgaccagcaagtgccaggagatcgagatctacctgaagcagaccatcagcgagaaggaggtggagctgcagcacatcagaaaggacctggaggagaagctggccgccgaggagcagttccaggccctggtgaagcagatgaaccagaccctgcaggacaagaccaaccagatcgacctgctgcaggccgagatcagcgagaaccaggccatcatccagaagctgatcaccagcaacaccgacgccagcgacggcgacagcgtggccctggtgaaggagaccgtggtgatcagccccccctgcaccggcagcagcgagcactggaagcccgagctggaggagaagatcctggccctggagaaggagaaggagcagctgcagaagaagctgcaggaggccctgaccagcagaaaggccatcctgaagaaggcccaggagaaggagagacacctgagagaggagctgaagcagcagaaggacgactacaacagactgcaggagcagttcgacgagcagagcaaggagaacgagaacatcggcgaccagctgagacagctgcagatccaggtgagagagagcatcgacggcaagctgcccagcaccgaccagcaggagagctgcagcagcacccccggcctggaggagcccctgttcaaggccaccgagcagcaccacacccagcccgtgctggagagcaacctgtgccccgactggcccagccacagcgaggacgccagcgccctgcagggcggcaccagcgtggcccagatcaaggcccagctgaaggagatcgaggccgagaaggtggagctggagctgaaggtgagcagcaccaccagcgagctgaccaagaagagcgaggaggtgttccagctgcaggagcagatcaacaagcagggcctggagatcgagagcctgaagaccgtgagccacgaggccgaggtgcacgccgagagcctgcagcagaagctggagagcagccagctgcagatcgccggcctggagcacctgagagagctgcagcccaagctggacgagctgcagaagctgatcagcaagaaggaggaggacgtgagctacctgagcggccagctgagcgagaaggaggccgccctgaccaagatccagaccgagatcatcgagcaggaggacctgatcaaggccctgcacacccagctggagatgcaggccaaggagcacgacgagagaatcaagcagctgcaggtggagctgtgcgagatgaagcagaagcccgaggagatcggcgaggagagcagagccaagcagcagatccagagaaagctgcaggccgccctgatcagcagaaaggaggccctgaaggagaacaagagcctgcaggaggagctgagcctggccagaggcaccatcgagagactgaccaagagcctggccgacgtggagagccaggtgagcgcccagaacaaggagaaggacaccgtgctgggcagactggccctgctgcaggaggagagagacaagctgatcaccgagatggacagaagcctgctggagaaccagagcctgagcagcagctgcgagagcctgaagctggccctggagggcctgaccgaggacaaggagaagctggtgaaggagatcgagagcctgaagagcagcaagatcgccgagagcaccgagtggcaggagaagcacaaggagctgcagaaggagtacgagatcctgctgcagagctacgagaacgtgagcaacgaggccgagagaatccagcacgtggtggaggccgtgagacaggagaagcaggagctgtacggcaagctgagaagcaccgaggccaacaagaaggagaccgagaagcagctgcaggaggccgagcaggagatggaggagatgaaggagaagatgagaaagttcgccaagagcaagcagcagaagatcctggagctggaggaggagaacgacagactgagagccgaggtgcaccccgccggcgacaccgccaaggagtgcatggagaccctgctgagcagcaacgccagcatgaaggaggagctggagagagtgaagatggagtacgagaccctgagcaagaagttccagagcctgatgagcgagaaggacagcctgagcgaggaggtgcaggacctgaagcaccagatcgagggcaacgtgagcaagcaggccaacctggaggccaccgagaagcacgacaaccagaccaacgtgaccgaggagggcacccagagcatccccggcgagaccgaggagcaggacagcctgagcatgagcaccagacccacctgcagcgagagcgtgcccagcgccaagagcgccaaccccgccgtgagcaaggacttcagcagccacgacgagatcaacaactacctgcagcagatcgaccagctgaaggagagaatcgccggcctggaggaggagaagcagaagaacaaggagttcagccagaccctggagaacgagaagaacaccctgctgagccagatcagcaccaaggacggcgagctgaagatgctgcaggaggaggtgaccaagatgaacctgctgaaccagcagatccaggaggagctgagcagagtgaccaagctgaaggagaccgccgaggaggagaaggacgacctggaggagagactgatgaaccagctggccgagctgaacggcagcatcggcaactactgccaggacgtgaccgacgcccagatcaagaacgagctgctggagagcgagatgaagaacctgaagaagtgcgtgagcgagctggaggaggagaagcagcagctggtgaaggagaagaccaaggtggagagcgagatcagaaaggagtacctggagaagatccagggcgcccagaaggagcccggcaacaagagccacgccaaggagctgcaggagctgctgaaggagaagcagcaggaggtgaagcagctgcagaaggactgcatcagataccaggagaagatcagcgccctggagagaaccgtgaaggccctggagttcgtgcagaccgagagccagaaggacctggagatcaccaaggagaacctggcccaggccgtggagcacagaaagaaggcccaggccgagctggccagcttcaaggtgctgctggacgacacccagagcgaggccgccagagtgctggccgacaacctgaagctgaagaaggagctgcagagcaacaaggagagcgtgaagagccagatgaagcagaaggacgaggacctggagagaagactggagcaggccgaggagaagcacctgaaggagaagaagaacatgcaggagaagctggacgccctgagaagagagaaggtgcacctggaggagaccatcggcgagatccaggtgaccctgaacaagaaggacaaggaggtgcagcagctgcaggagaacctggacagcaccgtgacccagctggccgccttcaccaagagcatgagcagcctgcaggacgacagagacagagtgatcgacgaggccaagaagtgggagagaaagttcagcgacgccatccagagcaaggaggaggagatcagactgaaggaggacaactgcagcgtgctgaaggaccagctgagacagatgagcatccacatggaggagctgaagatcaacatcagcagactggagcacgacaagcagatctgggagagcaaggcccagaccgaggtgcagctgcagcagaaggtgtgcgacaccctgcagggcgagaacaaggagctgctgagccagctggaggagaccagacacctgtaccacagcagccagaacgagctggccaagctggagagcgagctgaagagcctgaaggaccagctgaccgacctgagcaacagcctggagaagtgcaaggagcagaagggcaacctggagggcatcatcagacagcaggaggccgacatccagaacagcaagttcagctacgagcagctggagaccgacctgcaggccagcagagagctgaccagcagactgcacgaggagatcaacatgaaggagcagaagatcatcagcctgctgagcggcaaggaggaggccatccaggtggccatcgccgagctgagacagcagcacgacaaggagatcaaggagctggagaacctgctgagccaggaggaggaggagaacatcgtgctggaggaggagaacaagaaggccgtggacaagaccaaccagctgatggagaccctgaagaccatcaagaaggagaacatccagcagaaggcccagctggacagcttcgtgaagagcatgagcagcctgcagaacgacagagacagaatcgtgggcgactaccagcagctggaggagagacacctgagcatcatcctggagaaggaccagctgatccaggaggccgccgccgagaacaacaagctgaaggaggagatcagaggcctgagaagccacatggacgacctgaacagcgagaacgccaagctggacgccgagctgatccagtacagagaggacctgaaccaggtgatcaccatcaaggacagccagcagaagcagctgctggaggtgcagctgcagcagaacaaggagctggagaacaagtacgccaagctggaggagaagctgaaggagagcgaggaggccaacgaggacctgagaagaagcttcaacgccctgcaggaggagaagcaggacctgagcaaggagatcgagagcctgaaggtgagcatcagccagctgaccagacaggtgaccgccctgcaggaggagggcaccctgggcctgtaccacgcccagctgaaggtgaaggaggaggaggtgcacagactgagcgccctgttcagcagcagccagaagagaatcgccgagctggaggaggagctggtgtgcgtgcagaaggaggccgccaagaaggtgggcgagatcgaggacaagctgaagaaggagctgaagcacctgcaccacgacgccggcatcatgagaaacgagaccgagaccgccgaggagagagtggccgagctggccagagacctggtggagatggagcagaagctgctgatggtgaccaaggagaacaagggcctgaccgcccagatccagagcttcggcagaagcatgagcagcctgcagaacagcagagaccacgccaacgaggagctggacgagctgaagagaaagtacgacgccagcctgaaggagctggcccagctgaaggagcagggcctgctgaacagagagagagacgccctgctgagcgagaccgccttcagcatgaacagcaccgaggagaacagcctgagccacctggagaagctgaaccagcagctgctgagcaaggacgagcagctgctgcacctgagcagccagctggaggacagctacaaccaggtgcagagcttcagcaaggccatggccagcctgcagaacgagagagaccacctgtggaacgagctggagaagttcagaaagagcgaggagggcaagcagagaagcgccgcccagcccagcaccagccccgccgaggtgcagagcctgaagaaggccatgagcagcctgcagaacgacagagacagactgctgaaggagctgaagaacctgcagcagcagtacctgcagatcaaccaggagatcaccgagctgcaccccctgaaggcccagctgcaggagtaccaggacaagaccaaggccttccagatcatgcaggaggagctgagacaggagaacctgagctggcagcacgagctgcaccagctgagaatggagaagagcagctgggagatccacgagagaagaatgaaggagcagtacctgatggccatcagcgacaaggaccagcagctgagccacctgcagaacctgatcagagagctgagaagcagcagcagccagacccagcccctgaaggtgcagtaccagagacaggccagccccgagaccagcgccagccccgacggcagccagaacctggtgtacgagaccgagctgctgagaacccagctgaacgacagcctgaaggagatccaccagaaggagctgagaatccagcagctgaacagcaacttcagccagctgctggaggagaagaacaccctgagcatccagctgtgcgacaccagccagagcctgagagagaaccagcagcactacggcgacctgctgaaccactgcgccgtgctggagaagcaggtgcaggagctgcaggccggccccctgaacatcgacgtggcccccggcgccccccaggagaagaacggcgtgcacagaaagagcgaccccgaggagctgagagagccccagcagagcttcagcgaggcccagcagcagctgtgcaacaccagacaggaggtgaacgagctgagaaagctgctggaggaggagagagaccagagagtggccgccgagaacgccctgagcgtggccgaggagcagatcagaagactggagcacagcgagtgggacagcagcagaacccccatcatcggcagctgcggcacccaggagcaggccctgctgatcgacctgaccagcaacagctgcagaagaaccagaagcggcgtgggctggaagagagtgctgagaagcctgtgccacagcagaaccagagtgcccctgctggccgccatctacttcctgatgatccacgtgctgctgatcctgtgcttcaccggccacctgtag

SEQ ID NO: 146739 - protein, 560 aa, Artificial Sequence
  derived and/or modified sequence
MLRGTLLCAVLGLLRAQPFPCPPACKCVFRDAAQCSGGDVARISALGLPTNLTHILLFGMGRGVLQSQSFSGMTVLQRLMISDSHISAVAPGTFSDLIKLKTLRLSRNKITHLPGALLDKMVLLEQLFLDHNALRGIDQNMFQKLVNLQELALNQNQLDFLPASLFTNLENLKLLDLSGNNLTHLPKGLLGAQAKLERLLLHSNRLVSLDSGLLNSLGALTELQFHRNHIRSIAPGAFDRLPNLSSLTLSRNHLAFLPSALFLHSHNLTLLTLFENPLAELPGVLFGEMGGLQELWLNRTQLRTLPAAAFRNLSRLRYLGVTLSPRLSALPQGAFQGLGELQVLALHSNGLTALPDGLLRGLGKLRQVSLRRNRLRALPRALFRNLSSLESVQLDHNQLETLPGDVFGALPRLTEVLLGHNSWRCDCGLGPFLGWLRQHLGLVGGEEPPRCAGPGAHAGLPLWALPGGDAECPGPRGPPPRPAADSSSEAPVHPALAPNSSEPWVWAQPVTTGKGQDHSPFWGFYFLLLAVQAMITVIIVFAMIKIGQLFRKLIRERALG

SEQ ID NO: 146740 - DNA, 1683 bp, Artificial Sequence
  derived and/or modified sequence
atgctgagaggcaccctgctgtgcgccgtgctgggcctgctgagagcccagcccttcccctgcccccccgcctgcaagtgcgtgttcagagacgccgcccagtgcagcggcggcgacgtggccagaatcagcgccctgggcctgcccaccaacctgacccacatcctgctgttcggcatgggcagaggcgtgctgcagagccagagcttcagcggcatgaccgtgctgcagagactgatgatcagcgacagccacatcagcgccgtggcccccggcaccttcagcgacctgatcaagctgaagaccctgagactgagcagaaacaagatcacccacctgcccggcgccctgctggacaagatggtgctgctggagcagctgttcctggaccacaacgccctgagaggcatcgaccagaacatgttccagaagctggtgaacctgcaggagctggccctgaaccagaaccagctggacttcctgcccgccagcctgttcaccaacctggagaacctgaagctgctggacctgagcggcaacaacctgacccacctgcccaagggcctgctgggcgcccaggccaagctggagagactgctgctgcacagcaacagactggtgagcctggacagcggcctgctgaacagcctgggcgccctgaccgagctgcagttccacagaaaccacatcagaagcatcgcccccggcgccttcgacagactgcccaacctgagcagcctgaccctgagcagaaaccacctggccttcctgcccagcgccctgttcctgcacagccacaacctgaccctgctgaccctgttcgagaaccccctggccgagctgcccggcgtgctgttcggcgagatgggcggcctgcaggagctgtggctgaacagaacccagctgagaaccctgcccgccgccgccttcagaaacctgagcagactgagatacctgggcgtgaccctgagccccagactgagcgccctgccccagggcgccttccagggcctgggcgagctgcaggtgctggccctgcacagcaacggcctgaccgccctgcccgacggcctgctgagaggcctgggcaagctgagacaggtgagcctgagaagaaacagactgagagccctgcccagagccctgttcagaaacctgagcagcctggagagcgtgcagctggaccacaaccagctggagaccctgcccggcgacgtgttcggcgccctgcccagactgaccgaggtgctgctgggccacaacagctggagatgcgactgcggcctgggccccttcctgggctggctgagacagcacctgggcctggtgggcggcgaggagccccccagatgcgccggccccggcgcccacgccggcctgcccctgtgggccctgcccggcggcgacgccgagtgccccggccccagaggccccccccccagacccgccgccgacagcagcagcgaggcccccgtgcaccccgccctggcccccaacagcagcgagccctgggtgtgggcccagcccgtgaccaccggcaagggccaggaccacagccccttctggggcttctacttcctgctgctggccgtgcaggccatgatcaccgtgatcatcgtgttcgccatgatcaagatcggccagctgttcagaaagctgatcagagagagagccctgggctag

SEQ ID NO: 146741 - DNA, 3493 bp, Artificial Sequence
  derived and/or modified sequence
agttactttggagtgcagaaccatttcagacatgctgagggggactctactgtgcgcggtgctcgggcttctgcgcgcccagcccttcccctgtccgccagcttgcaagtgtgtcttccgggacgccgcgcagtgctcggggggcgacgtggcgcgcatctccgcgctaggcctgcccaccaacctcacgcacatcctgctcttcggaatgggccgcggcgtcctgcagagccagagcttcagcggcatgaccgtcctgcagcgcctcatgatctccgacagccacatttccgccgttgcccccggcaccttcagtgacctgataaaactgaaaaccctgaggctgtcgcgcaacaaaatcacgcatcttccaggtgcgctgctggataagatggtgctcctggagcagttgtttttggaccacaatgcgctaaggggcattgaccaaaacatgtttcagaaactggttaacctgcaggagctcgctctgaaccagaatcagctcgatttccttcctgccagtctcttcacgaatctggagaacctgaagttgttggatttatcgggaaacaacctgacccacctgcccaaggggttgcttggagcacaggctaagctcgagagacttctgctccactcgaaccgccttgtgtctctggattcggggctgttgaacagcctgggcgccctgacggagctgcagttccaccgaaatcacatccgttccatcgcacccggggccttcgaccggctcccaaacctcagttctttgacgctttcgagaaaccaccttgcgtttctcccctctgcgctctttcttcattcgcacaatctgactctgttgactctgttcgagaacccgctggcagagctcccgggggtgctcttcggggagatggggggcctgcaggagctgtggctgaaccgcacccagctgcgcaccctgcccgccgccgccttccgcaacctgagccgcctgcggtacttaggggtgactctgagcccgcggctgagcgcgcttccgcagggcgccttccagggccttggcgagctccaggtgctcgccctgcactccaacggcctgaccgccctccccgacggcttgctgcgcggcctcggcaagctgcgccaggtgtccctgcgccgcaacaggctgcgcgccctgccccgtgccctcttccgcaatctcagcagcctggagagcgtccagctcgaccacaaccagctggagaccctgcctggcgacgtgtttggggctctgccccggctgacggaggtcctgttggggcacaactcctggcgctgcgactgtggcctggggcccttcctggggtggctgcggcagcacctaggcctcgtgggcggggaagagcccccacggtgcgcaggccctggggcgcacgccggcctgccgctctgggccctgccggggggtgacgcggagtgcccgggcccccggggcccgcctccccgccccgctgcggacagctcctcggaagcccctgtccacccagccttggctcccaacagctcagaaccctgggtgtgggcccagccggtgaccacgggcaaaggtcaagatcatagtccgttctgggggttttattttctgcttttagctgttcaggccatgatcaccgtgatcatcgtgtttgctatgattaaaattggccaactctttcgaaaattaatcagagagagagcccttgggtaaaccaatgggaaaatcttctaattacttagaacctgaccagatgtggctcggaggggaatccagacccgctgctgtcttgctctccctcccctccccactcctcctctcttcttcctcttctctctcactgccacgccttcctttccctcctcctccccctctccgctctgtgctcttcattctcacaggcccgcaacccctcctctctgtgtcccccgcccgttcctggaaactgagcttgacgtttgtaaactgtggttgcctgccttccccagctcccacgcgggtgtgcgctgacactgccgggggcgctggactgtgttggacccatccgtgctccgctgtgcctggcttggcgtctggtggagagaggggcctcttcagtgtctactgagtaaggggacagctccaggccggggcctgtctcctgcacagagtaagccggtaaatgtttgtgaaatcaatgcgtggataaaggaacacatgccatccaagtgatgatggcttttcctggagggaaaggataggctgttgctctatctaattttttgtttttgtttttggacagtctagctctgtggcccaggctggcgtgcagtgggccgtctcagttcactgcagcctccgcctcccaggttcaagtgattctcatgcctcagcgttctgagtagctgggattagaggcgtgtgccactacacccggctaatttttgtactttttaaagtagagacggggctttgccatattggcctggctgatctcaaactcctggtcttgaactcctggccacaagtgatctgcccgccttggcctcccaaagtgctgggattacaggcgtaagccactacacctggccctcttcatcgaattttatttgagaagtagagctcttgccattttttcccttgctccatttttctcactttatgtctctctgacctatgggctacttgggagagcactggactccattcatgcatgagcattttcaggataagcgacttctgtgaggctgagagaggaagaaaacacggagccttccctccaggtgcccagtgtaggtccagcgtgtttcctgagcctcctgtgagtttccacttgctttacatccatgcaacatgtcattttgaaactggattgatttgcatttcctggaactctgccacctcatttcacaagcatttatggagcagttaacatgtgactggtattcatgaatataatgataagcttgattctagttcagctgctgtcacagtctcatttgttcttccaactgaaagccgtaaaacctttgttgctttaattgaatgtctgtgcttatgagaggcagtggttaaaacaggggctggcgagttgacaactgtgggttcaaatcccagctctaccacttactaactgcatgggactttgggtaagacacctgcttacattctctaagccttggtttcctgaaccttaaaacaggataacatagtacctgcttcgtagagtttttgtgagaattaaaggcaataaagcatataatgacttagcccagcggcctgcaggcaatacatgttaatgaatgttagctattattactaaaggatgagcaattattattggcatcatgatttctaaagaagagctttgagttggtatttttctctgtgtataagggtaagtccgaactttctcagactggaggttacattcacatcagtctgtcttcccctgcggatggcctcagccctgggtggccagactctgtgctcacaatccagagcaatggatcc

SEQ ID NO: 146742 - DNA, 3534 bp, Artificial Sequence
  derived and/or modified sequence
ggatcccagggttcagtacaggcgcgaacgctcctgtgtgttgaccacactcccacggttgctttttcagacatgctgagggggactctactgtgcgcggtgctcgggcttctgcgcgcccagcccttcccctgtccgccagcttgcaagtgtgtcttccgggacgccgcgcagtgctcggggggcgacgtggcgcgcatctccgcgctaggcctgcccaccaacctcacgcacatcctgctcttcggaatgggccgcggcgtcctgcagagccagagcttcagcggcatgaccgtcctgcagcgcctcatgatctccgacagccacatttccgccgttgcccccggcaccttcagtgacctgataaaactgaaaaccctgaggctgtcgcgcaacaaaatcacgcatcttccaggtgcgctgctggataagatggtgctcctggagcagttgtttttggaccacaatgcgctaaggggcattgaccaaaacatgtttcagaaactggttaacctgcaggagctcgctctgaaccagaatcagctcgatttccttcctgccagtctcttcacgaatctggagaacctgaagttgttggatttatcgggaaacaacctgacccacctgcccaaggggttgcttggagcacaggctaagctcgagagacttctgctccactcgaaccgccttgtgtctctggattcggggctgttgaacagcctgggcgccctgacggagctgcagttccaccgaaatcacatccgttccatcgcacccggggccttcgaccggctcccaaacctcagttctttgacgctttcgagaaaccaccttgcgtttctcccctctgcgctctttcttcattcgcacaatctgactctgttgactctgttcgagaacccgctggcagagctcccgggggtgctcttcggggagatggggggcctgcaggagctgtggctgaaccgcacccagctgcgcaccctgcccgccgccgccttccgcaacctgagccgcctgcggtacttaggggtgactctgagcccgcggctgagcgcgcttccgcagggcgccttccagggccttggcgagctccaggtgctcgccctgcactccaacggcctgaccgccctccccgacggcttgctgcgcggcctcggcaagctgcgccaggtgtccctgcgccgcaacaggctgcgcgccctgccccgtgccctcttccgcaatctcagcagcctggagagcgtccagctcgaccacaaccagctggagaccctgcctggcgacgtgtttggggctctgccccggctgacggaggtcctgttggggcacaactcctggcgctgcgactgtggcctggggcccttcctggggtggctgcggcagcacctaggcctcgtgggcggggaagagcccccacggtgcgcaggccctggggcgcacgccggcctgccgctctgggccctgccggggggtgacgcggagtgcccgggcccccggggcccgcctccccgccccgctgcggacagctcctcggaagcccctgtccacccagccttggctcccaacagctcagaaccctgggtgtgggcccagccggtgaccacgggcaaaggtcaagatcatagtccgttctgggggttttattttctgcttttagctgttcaggccatgatcaccgtgatcatcgtgtttgctatgattaaaattggccaactctttcgaaaattaatcagagagagagcccttgggtaaaccaatgggaaaatcttctaattacttagaacctgaccagatgtggctcggaggggaatccagacccgctgctgtcttgctctccctcccctccccactcctcctctcttcttcctcttctctctcactgccacgccttcctttccctcctcctccccctctccgctctgtgctcttcattctcacaggcccgcaacccctcctctctgtgtcccccgcccgttcctggaaactgagcttgacgtttgtaaactgtggttgcctgccttccccagctcccacgcgggtgtgcgctgacactgccgggggcgctggactgtgttggacccatccgtgctccgctgtgcctggcttggcgtctggtggagagaggggcctcttcagtgtctactgagtaaggggacagctccaggccggggcctgtctcctgcacagagtaagccggtaaatgtttgtgaaatcaatgcgtggataaaggaacacatgccatccaagtgatgatggcttttcctggagggaaaggataggctgttgctctatctaattttttgtttttgtttttggacagtctagctctgtggcccaggctggcgtgcagtgggccgtctcagttcactgcagcctccgcctcccaggttcaagtgattctcatgcctcagcgttctgagtagctgggattagaggcgtgtgccactacacccggctaatttttgtactttttaaagtagagacggggctttgccatattggcctggctgatctcaaactcctggtcttgaactcctggccacaagtgatctgcccgccttggcctcccaaagtgctgggattacaggcgtaagccactacacctggccctcttcatcgaattttatttgagaagtagagctcttgccattttttcccttgctccatttttctcactttatgtctctctgacctatgggctacttgggagagcactggactccattcatgcatgagcattttcaggataagcgacttctgtgaggctgagagaggaagaaaacacggagccttccctccaggtgcccagtgtaggtccagcgtgtttcctgagcctcctgtgagtttccacttgctttacatccatgcaacatgtcattttgaaactggattgatttgcatttcctggaactctgccacctcatttcacaagcatttatggagcagttaacatgtgactggtattcatgaatataatgataagcttgattctagttcagctgctgtcacagtctcatttgttcttccaactgaaagccgtaaaacctttgttgctttaattgaatgtctgtgcttatgagaggcagtggttaaaacaggggctggcgagttgacaactgtgggttcaaatcccagctctaccacttactaactgcatgggactttgggtaagacacctgcttacattctctaagccttggtttcctgaaccttaaaacaggataacatagtacctgcttcgtagagtttttgtgagaattaaaggcaataaagcatataatgacttagcccagcggcctgcaggcaatacatgttaatgaatgttagctattattactaaaggatgagcaattattattggcatcatgatttctaaagaagagctttgagttggtatttttctctgtgtataagggtaagtccgaactttctcagactggaggttacattcacatcagtctgtcttcccctgcggatggcctcagccctgggtggccagactctgtgctcacaatccagagcaatggatcc

SEQ ID NO: 146743 - DNA, 1683 bp, Artificial Sequence
  derived and/or modified sequence
atgctgagaggaacactgttatgtgccgtgctgggtctgctccgggcccaaccgtttccatgtcctcccgcctgcaagtgcgttttccgtgacgcggcccaatgtagcggaggcgacgtggctagaatctctgcactgggcctgccaacaaatctcactcacattctgctttttggcatgggccgcggcgtactgcagtctcagagtttctccggcatgaccgtcctccaacgcctgatgatcagcgattcccacatcagcgcggttgctccaggtacattcagtgatctgataaagcttaagactttacgcctctcccgcaacaaaattacacatctacctggagccctgcttgacaagatggttctgctggagcaactattccttgaccataacgccctccgcgggattgaccagaatatgtttcaaaaactggttaacttgcaggaattggcactcaatcaaaatcaactagatttcttgcccgcatcattattcacaaacctggaaaaccttaagcttctcgacttgagcggtaataatttaacccacctaccgaagggactgctcggcgcccaagcaaaactcgagcgactgttgctccactccaatcgactggtgagcctcgacagcgggctcctcaatagcctgggcgccctgaccgagttgcaattccatcgcaatcatatccgtagcatcgcgcccggagcctttgaccgcttgccaaacctctcgagcctgactctgtcccggaaccatttagcattcctgccatctgccctcttccttcattctcacaaccttactctcctgaccctgttcgagaaccctctggcggaactgccaggcgtgctgttcggcgagatggggggcctgcaggaactgtggctaaatcgaacccagctgcgaacccttcctgcagccgctttccggaaccttagcaggctcagatatctaggagtaaccctctctccaaggctgtctgcgttgccacagggggcgttccagggactgggggaactgcaagttttggctctgcactctaacggtcttacagctctccccgatggcctgctaagaggcctgggcaagttgcgccaggtcagcctacggcgaaacagactaagagctctgccccgggccctgttccgaaacctgtcctccctggagtctgtccagctggatcacaaccagttggaaacgctacccggcgatgtgttcggcgcactcccacgcctgacagaagtgcttctgggccacaacagctggcgctgtgattgcggccttggtccattcctgggatggctccgccagcacctaggccttgtcggaggcgaggagcccccccgctgtgccggacctggggctcatgctggcctcccgctgtgggctctgcccggaggcgatgcagagtgccccggacctcggggtcccccccctcggcccgcggccgactctagctccgaggctccggtccaccctgctctggcccctaatagttcagagccctgggtgtgggctcagccagtgaccacggggaagggacaggatcacagtcccttctggggcttctatttcctgttgctggcggtgcaggcaatgataacggtgattatcgtgttcgccatgattaaaatcgggcagctgttccgaaagttgatacgggaacgggccctgggttag

SEQ ID NO: 146744 - DNA, 1683 bp, Artificial Sequence
  derived and/or modified sequence
atgctgcgggggacactgttgtgcgccgttctcggtctcctaagggcccagccattcccttgcccaccagcctgcaagtgcgtgttccgtgacgctgcacaatgctctggaggtgacgtagctaggatttctgcgcttggcttgcctactaatctgactcacatcctgctctttggcatgggccgcggagtcctgcagtctcagtctttttcgggaatgaccgtgctacagagactcatgattagtgattcccatattagtgctgtggcccctggcaccttttctgacctgattaaattgaagaccctccgtctgagcaggaataagattacacatttacctggggccctgcttgataagatggtgctactcgagcagttgttcctcgaccataatgccttacgaggaatcgaccagaatatgttccagaagctggtgaatcttcaggaactggccctcaatcagaatcaattggactttctgccggcctcactgttcaccaatctggaaaatctgaagctgctggacctgtctggcaacaaccttacgcaccttccaaaaggacttctaggcgcccaggctaagctcgagagattgttgctccactccaatagactcgtgtctctggattccggcctgctcaattccctgggtgccctgactgagttgcaattccaccggaaccatatccggtctatcgcgcctggggcgttcgatcgcctgccaaacctgtcgtctctgaccctcagcaggaaccacctggcctttctcccgagtgccctttttctgcatagccataacctgacactcttgaccctctttgaaaacccactagcagagctcccgggggtgctctttggagagatgggtggcttgcaggaactttggctgaatcgcacacaacttcggaccctgcctgccgcagccttccgaaacctgagcagactgcggtatctgggcgtcaccttgtcacctcggcttagcgctctacctcagggcgcgttccagggcctgggcgaactacaggttctagcgctccactcgaatgggctcaccgctcttcctgacggcctgctgcgtggattaggcaagttaaggcaagtgtctcttaggcgcaaccgattgcgggccttaccaagagccctttttcggaacctctcgtctctggaatctgtgcagctggatcacaaccaactggaaacactccccggggacgtctttggagcactccccaggcttactgaggtgctgctaggccataattcttggagatgcgattgtgggctggggccctttctggggtggctacgacagcacctggggctcgtgggaggcgaagagccaccgagatgcgccggcccaggcgcccacgccgggttaccactttgggctttgcccggtggcgacgctgaatgcccagggcctagaggccctcccccacgccccgctgccgacagttccagcgaagctccagttcatcccgcgctggcccccaactcatctgaaccttgggtctgggcgcagcccgtaacaacagggaagggccaggaccactcacccttctggggattttactttttgctgctggcagtgcaggccatgattacggtgatcatagtgttcgcaatgataaaaatcggacagttgtttcgcaaactcattcgcgaacgggcgctcgggtag

SEQ ID NO: 146745 - DNA, 1683 bp, Artificial Sequence
  derived and/or modified sequence
atgctgcggggcaccctgctgtgtgctgtgctgggcctgctgcgggcccagcccttcccctgccccccagcctgcaagtgtgtgttcagagatgctgcccagtgcagcggaggagatgtggcccgcatcagcgccctgggcctgcccaccaacctgacccacatcctgctgtttggcatgggccggggcgtgctgcagagccagagcttcagcggcatgacagtgctgcagaggctgatgatcagtgacagccacatctctgctgtggcccctggcaccttcagtgacctgatcaagctgaagaccctgcggctgagcaggaacaagatcacccacctgcccggggccctgctggacaagatggtgctgctggagcagctgttcctggaccacaatgccctgcggggcatcgaccagaacatgttccagaagctggtgaacctgcaggagctggccctgaaccagaaccagctggacttcctgcctgccagcctcttcaccaacctggagaacctgaagctgctggacctgagcggcaacaacctgacccacctgcccaagggcctgctgggcgcccaggccaagctggagcggctgctgctgcacagcaaccggctggtgtccctggacagcggcctgctgaacagcctgggcgccctgacagagctgcagttccacaggaaccacatccgcagcatcgcccctggggcctttgaccggctgcccaacctgagcagcctgaccctgagcaggaaccacctggccttcctgcccagcgccctcttcctgcacagccacaacctgaccctgctgaccctgtttgagaaccccctggccgagctgcccggggtgctgtttggagagatgggcggcctgcaggagctgtggctgaacagaacccagctgcggaccctgcctgctgctgccttcaggaacctgagccggctgcgctacctgggcgtgaccctgagcccccggctgagcgccctgccccagggcgccttccagggcctgggggagctgcaggtgctggccctgcacagcaatggcctgacagccctgcctgatggcctgctgcggggcctgggcaagctgcggcaggtgtccctgcggaggaaccggctgcgggccctgccccgggccctcttcaggaacctgagcagcctggagagcgtgcagctggaccacaaccagctggagaccctgcctggagatgtgtttggagccctgccccggctgacagaggtgctgctgggccacaacagctggaggtgtgactgtggcctgggccccttcctgggctggctgcggcagcacctgggcctggtgggcggggaggagcccccaagatgtgccggccctggggcccacgccggcctgcccctgtgggccctgcctggaggagatgctgaatgtcctggcccccggggccccccacccaggcctgctgctgacagcagcagcgaggcccctgtgcacccagccctggcccccaacagcagcgagccctgggtgtgggcccagcctgtgaccaccgggaagggccaggaccacagccccttctggggcttctacttcctgctgctggccgtgcaggccatgatcaccgtcatcatcgtgtttgccatgatcaagattggccagctgttcaggaagctgatccgggagcgggccctgggctag

SEQ ID NO: 146746 - DNA, 1683 bp, Artificial Sequence
  derived and/or modified sequence
atgctgcggggcaccctgctgtgcgccgtgctgggcctgctgcgggctcaacctttcccttgcccacctgcgtgcaagtgtgtgtttcgcgacgcggcccaatgtagtgggggggacgtcgccaggataagcgctctcgggctcccaaccaaccttacacatatcctgctctttggcatggggcggggggtcttgcagtcccagagcttcagcggtatgacagtcctgcagcggctcatgatcagtgactctcacattagtgccgtggcgccaggaaccttttccgaccttatcaaactgaagactctgaggctcagcaggaataagatcacccacttacccggtgcattactggataagatggtcctgctcgaacaactctttctggatcacaatgcactgcgcgggatcgaccaaaacatgttccagaaactggttaacctgcaagagctggcattgaaccaaaaccaactggacttcttaccagcttcactgtttactaatttggagaacctgaagttactggacttgtcagggaataacctgacccatcttcccaagggcctgctgggagcccaggccaagctggagagacttcttttgcactccaatagacttgtctctctggactctggtctgcttaactcactgggcgccctcaccgagctgcagttccacagaaatcatatacggagtatcgcccctggtgcgtttgataggcttcccaatttgtcctccctgaccctaagcagaaatcacctggccttccttccgagtgccctgttccttcattctcataaccttactctgctcacgctgttcgagaaccctctggcggagctccctggcgtcctgtttggggaaatgggagggctgcaagagctgtggctgaaccgaactcagctgcggaccctccccgccgccgctttccgaaatctatctcgattgagatatctgggcgttacacttagtccccgacttagcgccctaccccaaggggcattccaggggctaggggaactgcaggtattagcacttcacagcaacgggctaacagccctgcccgatgggctcctgcggggtcttggcaaactccgacaggtttctctaagacggaacagattaagggctcttcctcgcgccctgtttcggaatcttagctcactcgagtctgtccagctcgaccacaaccagctagaaaccctcccaggagatgttttcggagccctgcctaggttgacagaagttctactgggacacaattcttggcgatgtgactgtggtctgggtccttttctcggctggctcagacaacacctcggcttggtgggaggggaggagccccccagatgtgccggccccggggcacacgccggactccccctgtgggctctgcccggcggtgacgctgagtgcccaggcccaaggggcccccccccccggcctgccgccgattctagtagcgaagccccggtccacccagctttagctcccaacagctcagaaccttgggtgtgggcccagccagtgactactggcaagggtcaggatcatagtccattctggggattttactttctgttgctggcagttcaagcaatgatcaccgttatcatcgtcttcgccatgataaagataggtcagctgttcaggaaactcatcagagagcgcgccttgggctag

SEQ ID NO: 146747 - DNA, 1683 bp, Artificial Sequence
  derived and/or modified sequence
atgctgcggggcaccctgctgtgcgccgtgctgggcctgctgcgggcccagccgttcccatgtccacctgcctgtaagtgtgtgtttcgagacgcagcccagtgttcgggcggggatgtggctaggatctcagccttgggactcccaacgaacctgacacatatcctgttatttggaatgggccggggagtgctgcagtcgcaatctttctcagggatgaccgtgctgcagaggctcatgatctccgacagtcatatcagtgctgttgcgcctggcaccttcagcgacctgatcaaactgaaaactctaagactctcgcgcaacaagatcacgcatctccccggcgctctgctagacaaaatggttctgttggagcagctattcttggaccacaatgccctgaggggcatcgaccagaacatgttccagaagctggtaaacctgcaggagcttgctctgaatcagaaccagctggacttcctgcctgcttcactctttacaaatctggagaacctaaagttgttagacctgagcggcaataacctaacccatcttccaaaaggactgcttggcgcccaagccaaactcgagcgattgctgctccactcgaatcgtctagtgtcactagattcggggctgcttaacagtcttggcgccctgactgagttgcagtttcatcgcaaccatatccgcagtattgcccctggcgcctttgatcgcctgcctaacctctcctccctgaccttgagccggaaccacctggcattcctccccagcgccttgttcctgcattcccacaaccttacactgctcactctctttgagaacccactggcagagcttccaggggtgctcttcggcgaaatgggaggcctgcaggagctctggcttaaccgaactcaactgcgtaccctgcccgcagccgccttcaggaacttgtcccgtttgcgctatctgggcgtgaccctgagccctcgcctgtccgccctgcctcaaggtgctttccagggcctgggggagctccaagttctggctctgcactcaaatggcttgacagctctcccagacggactgttgaggggcctcggaaagcttagacaagtgtccctgaggagaaacagattgcgagcattacctcgggccctgttcaggaatctgtctagcctggaatccgtgcagttagatcacaatcaattagagaccttacctggagacgtgtttggggctttaccaaggttaacagaggtcctcttagggcacaactcatggaggtgcgactgcggactgggaccatttctgggatggctccgccagcatctcggcctcgtgggcggcgaggagcctcccagatgcgctggcccaggcgcccatgcaggactgcccctgtgggcactccccggcggagacgctgagtgccccggaccgcgagggcccccccctagacccgctgccgactcaagttctgaagcccccgtccaccctgccctggccccaaacagctcagaaccttgggtctgggcgcaaccagtgaccactggcaaaggacaggaccactcacccttctggggtttctacttcttgctcttggccgtgcaagctatgatcacggtgatcattgtgttcgccatgatcaagataggccagctgtttagaaagctgattagagagcgcgccctaggctag

SEQ ID NO: 146748 - DNA, 1683 bp, Artificial Sequence
  derived and/or modified sequence
atgcttaggggtacactcctttgcgcggtgctgggccttctccgcgctcagcctttcccatgcccgcctgcttgcaagtgcgtcttccgggatgccgcacagtgctccggaggcgacgtggccagaatcagcgctttgggactgcccactaacttgactcatatcttattgttcggaatgggaagaggcgtgttacagtctcagtctttttctggaatgactgtccttcagcggttgatgattagtgactcacatattagtgcagtcgctccaggcaccttcagtgatctcattaaactcaagacgctgagactctctaggaacaaaatcactcatttgccaggggcactgctggacaaaatggtgctgcttgagcagctatttctagatcacaacgctctccgaggtattgaccaaaacatgtttcagaaattagtcaacctgcaggagttggctctcaaccagaatcagttggacttcctgcccgctagtctcttcaccaatcttgaaaaccttaagttgctggacctgtctgggaataatttgactcatctccccaaaggtcttctgggtgcccaagcgaagctggagcggctgctgctgcattcaaatcgcctcgtctcccttgactcagggttgttaaacagcttgggagctctgaccgagctacagtttcataggaaccacatcaggtcaatcgctcccggtgcctttgatagattgcccaacctcagttctctgacactcagtagaaatcacttggcatttctcccttcagcgttgttcctccactcccacaatctcacactcctaacactgttcgagaatcccctcgctgagctccccggagttcttttcggagagatgggcggtctccaggagctgtggctgaatagaacccagctgaggacccttcccgcagccgcattcagaaacttgtcaagactcagatacctcggcgttaccctcagtcccaggttgagtgcgctcccccaaggcgcttttcaaggcctgggggagctgcaggtgctcgctcttcactcaaacggcctgaccgccctgcctgacggcttactgagaggactggggaagttgcgacaggtctctctgagacgaaataggctgagggccttacctagggcgctttttaggaatctctctagcctcgaatccgtccagttggatcataatcaactggaaacactcccgggagacgtgtttggagccctacctcgtcttacagaggtactgctgggccacaacagctggcgctgtgattgtggcctgggcccttttttggggtggctgcggcagcacctcggcctggtcggcggtgaagaaccgccacgttgtgcagggccaggtgctcatgctggtcttccactgtgggcattgccaggcggagatgccgagtgccccggtccccgaggaccccctcccagacctgctgcggatagttcctcagaagcccctgtccacccggctctggccccaaactcctccgagccatgggtgtgggcccagccggtgacaacggggaagggtcaggatcactcgcctttttggggcttttattttctcctcctggctgtacaggccatgattaccgtgatcatcgtgttcgcaatgatcaaaatcgggcagttattccggaagttgattcgggagcgagcattgggatag

SEQ ID NO: 146749 - DNA, 1683 bp, Artificial Sequence
  derived and/or modified sequence
atgttacggggtactttgctgtgcgcggttcttgggctgttgcgtgcccaacccttcccttgtcccccagcatgcaagtgtgtgtttagagacgcagctcagtgtagtggaggagacgtggcaagaataagtgctctagggctgcctactaatctgacccacatactgctgtttgggatgggcagaggcgttcttcagtctcagtccttctccggcatgacagtgctccaacggcttatgatctctgattcacacattagcgccgtggctcccggaacgttctcagatctgatcaagcttaagactctgcgcttgagcagaaacaagataactcacctgccaggggctctgttagacaagatggtgttactggaacagcttttcctagaccacaacgcattgaggggaatcgatcagaatatgttccagaaactggttaaccttcaggaactggccctgaaccagaatcaactagactttctaccggcaagcctcttcaccaatctagagaacctcaagctgctggatctatctgggaacaacctgacacacctgcctaaaggactgctgggcgctcaggccaaactcgagaggcttcttctccacagcaatcgccttgtctctcttgactccgggcttttaaacagtttgggagcactgaccgaactgcagtttcaccgcaaccacattcggagtatcgctcctggggctttcgatcgcctcccaaacctcagtagtttgaccctttctcggaaccaccttgcgttcttacctagcgccctcttcctgcattcccacaacttgaccctgctgacactgttcgaaaaccccctcgccgagctccccggagtgttatttggtgagatgggtggtttgcaagaattatggcttaatcggacacagctccggaccctccccgctgctgcgttccgaaatctcagccgtctgaggtatcttggagtgactctgagtccccgtctgtccgcccttccacagggggctttccagggcttaggtgaactgcaggtgcttgctttacattcaaacggcctgactgccctccccgacgggctgctacgaggcctggggaagttgcggcaggtctcgttgagacgcaacagattacgagcactgccacgggcactcttcaggaacctgtcatcccttgaatcagtccaactggaccacaatcaattggaaactctgccaggcgacgtattcggggctctgccccgtttaaccgaggttctgttgggtcataactcatggcggtgtgattgtggtttgggccctttcctgggatggcttagacagcatctgggcctggtgggcggtgaggaacccccaaggtgcgcaggtccgggagcccatgccggactgcctttgtgggccctcccaggaggggatgcggaatgtcccggacctcggggaccccctccacggccagctgcagactcttcatccgaagcgccagttcatcctgccctggctcccaacagttcagagccttgggtgtgggctcaacctgtcacaactgggaaagggcaggaccatagcccattctggggattctacttcttgctgctggccgtacaggccatgataacggttatcatcgttttcgcgatgatcaagatcggccagcttttccgtaaacttatacgagagcgagcactgggctag

SEQ ID NO: 146750 - protein, 327 aa, Artificial Sequence
  derived and/or modified sequence
MPALLERPKLSNAMARALHRHIMMERERKRQEEEEVDKMMEQKMKEEQERRKKKEMEERMSLEETKEQILKLEEKLLALQEEKHQLFLQLKKVLHEEEKRRRKEQSDLTTLTSAAYQQSLTVHTGTHLLSMQGSPGGHNRPGTLMAADRAKQMFGPQVLTTRHYVGSAAAFAGTPEHGQFQGSPGGAYGTAQPPPHYGPTQPAYSPSQQLRAPSAFPAVQYLSQPQPQPYAVHGHFQPTQTGFLQPGGALSLQKQMEHANQQTGFSDSSSLRPMHPQALHPAPGLLASPQLPVQMQPAGKSGFAATSQPGPRLPFIQHSQNPRFYHK

SEQ ID NO: 146751 - protein, 303 aa, Artificial Sequence
  derived and/or modified sequence
MPALLERPKLSNAMARALHRHIMMERERKRQEEEEVDKMMEQKMKEEQERRKKKEMEERMSLEETKEQILKLEEKLLALQEEKHQLFLQLKKVLHEEEKRRRKEQSDLTTLTSAAYQQSLTVHTGTHLLSMQGSPGGHNRPGTLMAADRAKQMFGPQVLTTRHYVGSAAAFAGTPEHGQFQGSPGGAYGTAQPPPHYGPTQPAYSPSQQLRAPSAFPAVQYLSQPQPQPYAVHGHFQPTQTGFLQPGGALSLQKQMEHANQQTGFSDSSSLRPMHPQALHPAPGLLASPQLPVQMQPAGKTAP

SEQ ID NO: 146752 - DNA, 984 bp, Artificial Sequence
  derived and/or modified sequence
atgcccgccctcctagagcggccaaagctgtccaatgccatggcacgggcactgcaccgccacatcatgatggaacgagagcgcaagcgccaagaagaggaggaagtggataaaatgatggaacagaaaatgaaagaagaacaggagaggagaaagaaaaaagagatggaggagagaatgtcccttgaggagacgaaggagcagattttgaagctggaggaaaagctcctggccttacaggaggagaagcatcaattgttcctgcagctgaagaaagttttacacgaggaggaaaaaaggaggcgcaaggagcaatcggacctgacaacacttacgtcagccgcctatcagcagagcctgacggtccatacaggcacacatctgctctccatgcagggctcccccggagggcataatcgccccggaactctgatggccgccgatagagcaaagcagatgttcggcccacaggtcctaactacccgccactatgtggggtctgccgccgcctttgccgggacgcctgagcacggccaattccaagggtcaccagggggtgcttatggaaccgcacagcctcctccccattacggtcccacacagcctgcatattcccccagtcagcagctgcgggcccctagtgcatttcctgccgtgcagtacttgagtcagcctcaaccccagccatacgccgttcacggacattttcagccgacgcagactggctttcttcagccagggggcgcactcagtttacagaagcaaatggaacatgcaaaccagcaaacgggcttctctgactccagctctttgcggcccatgcacccgcaagccctgcatccagcgcccggtttgcttgcctcccctcagctgccagtccagatgcaacccgccggcaagtccggttttgccgctacgtctcaacccggacctaggctgccttttatccaacactcccaaaacccgaggttttatcataagtag

SEQ ID NO: 146753 - DNA, 984 bp, Artificial Sequence
  derived and/or modified sequence
atgccagcgttactggaacgccccaaactttcaaatgctatggctcgggccctgcaccgccacattatgatggaaagggagcgtaagcgacaggaggaggaagaagtagacaaaatgatggagcagaagatgaaggaggagcaggaaaggaggaaaaagaaggaaatggaggaaagaatgagcttggaagagacaaaagaacaaatcttaaagctagaggagaaattgttagctttacaggaagaaaagcatcagctgttcctccaactaaagaaagtcctgcacgaagaagagaagcgcagaagaaaggagcagtcagatctcacaaccctgaccagcgccgcctaccaacaatccctgactgtgcatacaggcactcatctgctgtctatgcaaggtagccctggcggccacaaccgacctggtacactgatggccgccgaccgcgctaagcagatgtttgggccacaagtgctgaccaccaggcactatgtgggttctgcagctgcgttcgctggcacccccgagcacggccaattccagggctccccaggaggcgcctacgggactgcgcagccaccccctcactatggtccaacacagcctgcctattcccccagtcagcagttgagggctcctagcgctttccccgccgtacagtacctgagccagcctcagccccagccatacgccgtgcacggacacttccagcctacacagactgggttcttgcagccgggtggcgcgctgagtctgcaaaaacagatggagcatgcgaatcaacagaccggtttttcagactctagctcgctcaggccaatgcatccccaggccctgcaccccgctcctgggctgctggcaagtccccaattgccggtccaaatgcagccggctggcaagagtggctttgcagccacctcccagcctggacctcggctaccgttcatacagcactcccagaaccccagattttatcacaagtag

SEQ ID NO: 146754 - DNA, 984 bp, Artificial Sequence
  derived and/or modified sequence
atgcccgctctcctggagaggcctaagctgagcaacgctatggcccgagccctgcacaggcatatcatgatggagcgcgagagaaagcgtcaagaagaagaggaggtggacaagatgatggagcaaaagatgaaggaagaacaagagaggcgtaaaaaaaaagagatggaagagcggatgtccctggaggagaccaaggaacagatcttaaaactggaagaaaagctccttgccctacaggaagagaaacatcagctctttctgcagctcaagaaggttctacacgaagaagagaagcgcaggagaaaagagcagtccgatctgaccactctgacgtccgctgcctatcaacagtccttgaccgtgcacactggcacgcacctgttatctatgcagggaagccccggcggccacaatcggcctggaactctcatggccgccgatagagccaagcagatgtttgggcctcaagtacttacaactaggcactacgtgggttcagccgcagcattcgcaggcactcccgaacacggacagttccagggatctccaggaggagcttatggcacagctcaaccaccaccacattacggccccactcagcctgcatactctcctagccaacagctgagagctcctagcgcttttcccgcggtccagtatttgtcacagccccagccccagccctacgctgtccacggacattttcaacccacacaaaccggcttcctgcagcccgggggcgccctgtccttgcagaagcaaatggagcacgccaaccagcaaacgggatttagcgactcatcctctttgcggccaatgcacccacaggcgctccatcctgcaccagggttactggctagcccgcagttacctgtgcaaatgcagcccgccggtaagagtggcttcgctgccacatctcagcccggaccacgcctcccatttattcaacacagccagaatcctcggttttaccacaaatag

SEQ ID NO: 146755 - DNA, 912 bp, Artificial Sequence
  derived and/or modified sequence
atgcctgccctgctggagagacctaaactgtcgaatgccatggccagagccttacaccgccatattatgatggagagggaacgtaagcggcaggaagaggaggaagtggacaaaatgatggagcagaagatgaaggaagaacaggagcgcaggaagaaaaaagagatggaagagcggatgagtctagaggagacaaaggaacaaatactgaaactggaggagaagctactggcgttgcaggaggaaaaacatcagctcttccttcaactcaaaaaggtcctgcatgaagaggaaaagagaagaagaaaggagcagtcggacctaacaaccttgacctcagcagcataccagcagtcattaacagtccataccgggacccaccttctgtccatgcaggggtcccctggtggacacaatcgcccgggaacacttatggccgccgacagagccaaacagatgtttggaccacaggtcctgacgacaagacactacgtagggtccgcggcagcttttgccggaactccagagcacgggcagtttcaggggtccccgggcggagcctacgggacagcacagccacccccccattatggcccgacccagcccgcctactccccctctcagcaattgcgcgcgccctcggctttcccggccgttcagtacctatctcagccccagccgcagccgtatgccgtacacggccactttcagccgacacaaactggtttcttgcagccagggggggccctttccctccagaaacaaatggaacacgctaatcaacagactggcttcagtgactcgtcctctctccgtccaatgcacccacaggccctacacccggctcccgggcttctggcgtcaccgcagcttcctgttcagatgcagccagctggcaagactgcaccgtag

SEQ ID NO: 146756 - DNA, 984 bp, Artificial Sequence
  derived and/or modified sequence
atgcctgccctgctggagcggcccaagctgagcaatgccatggcccgggccctgcaccgccacatcatgatggagcgggagaggaagaggcaggaggaggaggaggtggacaagatgatggagcagaagatgaaggaggagcaggagaggaggaagaagaaggagatggaggagaggatgagcctggaggagaccaaggagcagatcctgaagctggaggagaagctgctggccctgcaggaggagaagcaccagctgttcctgcagctgaagaaggtgctgcacgaggaggagaagagaagaaggaaggagcagagcgacctgaccaccctgaccagcgctgcctaccagcagagcctgactgtgcacacaggcacccacctgctgtccatgcagggcagccctgggggccacaacagacctggcaccctgatggctgctgaccgggccaagcagatgtttggcccccaggtgctgaccaccaggcactacgtgggcagcgctgctgcctttgctggcaccccagagcacggccagttccagggcagccctgggggcgcctacggcacagcccagcccccaccccactacggccccacccagcctgcctacagccccagccagcagctgcgggcccccagcgccttccctgctgtgcagtacctgagccagccccagccccagccctatgctgtgcacggccacttccagcccacccagacaggcttcctgcagcccggcggggccctgagcctgcagaagcagatggagcacgccaaccagcagacaggcttcagtgacagcagcagcctgcggcccatgcacccccaggccctgcacccagcccctggcctgctggccagcccccagctgcctgtgcagatgcagcctgctgggaagagcggctttgctgccaccagccagcccggcccccggctgcccttcatccagcacagccagaacccccgcttctaccacaagtag

SEQ ID NO: 146757 - DNA, 912 bp, Artificial Sequence
  derived and/or modified sequence
atgcctgccctgctggagcggcccaagctgagcaatgccatggcccgggccctgcaccgccacatcatgatggagcgggagaggaagaggcaggaggaggaggaggtggacaagatgatggagcagaagatgaaggaggagcaggagaggaggaagaagaaggagatggaggagaggatgagcctggaggagaccaaggagcagatcctgaagctggaggagaagctgctggccctgcaggaggagaagcaccagctgttcctgcagctgaagaaggtgctgcacgaggaggagaagagaagaaggaaggagcagagcgacctgaccaccctgaccagcgctgcctaccagcagagcctgactgtgcacacaggcacccacctgctgtccatgcagggcagccctgggggccacaacagacctggcaccctgatggctgctgaccgggccaagcagatgtttggcccccaggtgctgaccaccaggcactacgtgggcagcgctgctgcctttgctggcaccccagagcacggccagttccagggcagccctgggggcgcctacggcacagcccagcccccaccccactacggccccacccagcctgcctacagccccagccagcagctgcgggcccccagcgccttccctgctgtgcagtacctgagccagccccagccccagccctatgctgtgcacggccacttccagcccacccagacaggcttcctgcagcccggcggggccctgagcctgcagaagcagatggagcacgccaaccagcagacaggcttcagtgacagcagcagcctgcggcccatgcacccccaggccctgcacccagcccctggcctgctggccagcccccagctgcctgtgcagatgcagcctgctgggaagacagccccctag

SEQ ID NO: 146758 - DNA, 984 bp, Artificial Sequence
  derived and/or modified sequence
atgcccgccctgctggagcggcccaagctgagcaacgccatggcccgcgctctacacagacacatcatgatggagcgcgaacgtaagaggcaagaagaagaagaggtggataagatgatggagcagaaaatgaaagaggaacaggaacgccggaagaagaaagagatggaagagcgtatgagcctggaggagactaaggaacaaattctcaagctggaagagaagcttctggccctgcaggaagagaagcaccagctgttcctgcagttgaaaaaagtgctgcacgaggaggaaaagagacgccggaaagaacaatctgacctgactacactcacctcagctgcatatcagcagagccttactgtccacacaggaacccatttactttctatgcagggcagccctggaggacataatagacctgggacacttatggccgccgatcgggccaaacagatgtttggcccacaggtcctgaccacaaggcattatgtggggtcagccgctgcctttgctggcacacccgaacacgggcagttccaaggcagccccgggggtgcgtacggaactgctcagccgcccccacactatggcccgacacagccggcctactcaccatctcagcaactgcgagcgcccagtgcctttcctgcagtgcagtatctgagtcagccccagcctcagccctatgcggtacacggacatttccaacctacgcagacaggcttcctccagcccggcggcgcactgtccttgcaaaagcaaatggaacatgccaaccagcaaaccgggtttagcgatagtagctcacttcgccctatgcacccccaagctttgcaccccgccccaggcctacttgcttctcctcagttgcccgtgcagatgcagccagcgggaaaaagcggtttcgccgcaaccagccaacccggtcccaggttgccatttatacagcactcacagaatccccgcttctatcacaaatag

SEQ ID NO: 146759 - DNA, 984 bp, Artificial Sequence
  derived and/or modified sequence
atgcccgccctgctggagcggcccaagctgagcaacgccatggcccgtgccctgcatcggcacatcatgatggagcgtgaaagaaagcgacaggaggaagaagaggtggacaagatgatggagcagaaaatgaaggaggagcaggagcgtagaaaaaaaaaggaaatggaggagcgcatgtctttagaagaaactaaagaacaaattctgaagctagaagaaaagctactcgctctgcaggaggagaagcaccaactcttcctccagttaaaaaaggtcttgcatgaggaagaaaaaaggcgacggaaagagcaatctgacctgacaaccctgacttctgcagcataccaacaatcactgaccgtccacaccggtacacacctattaagcatgcagggcagcccaggtggccacaataggccagggacgctgatggccgcagatcgagctaagcagatgttcggcccccaggtgctgaccactagacattatgtgggaagcgccgctgcttttgctggcacaccagaacatggacagttccagggatctcctggaggggcttatggcactgcccagcctcctcctcactatggccctactcagcccgcctactctccaagccagcagcttagagccccgtctgcctttcctgccgttcaatacctgtcccagccacagccacagccttacgcagttcacggacacttccagccaacccaaacgggtttcctacagcctggtggcgcgctttccttgcagaagcagatggagcatgccaatcagcaaactggattcagcgattcatcaagtctacgacctatgcacccacaagccttacacccagcgccaggccttctagcttcaccccaattacccgtccagatgcaacctgccgggaagagcgggtttgctgcaacaagccagccaggccccaggttgccctttattcagcatagccagaaccctcgcttctaccataagtag

SEQ ID NO: 146760 - DNA, 984 bp, Artificial Sequence
  derived and/or modified sequence
atgcccgccctgctggagcggcccaagctgagcaacgccatggcccgagctctgcatcgccacattatgatggaacgcgaacgaaagcgccaggaggaagaagaagtcgacaaaatgatggagcagaagatgaaggaagagcaggaaagacggaagaaaaaagaaatggaagagcgtatgagccttgaagagacgaaggagcagatcctgaagctcgaggaaaaactcctcgctctgcaggaggaaaaacaccagctgttccttcagctgaagaaggttcttcacgaagaagaaaagaggagacgcaaggagcagtctgacctgacaacacttacctcagctgcttaccagcagagccttacagtacacacgggcacacatctcctcagtatgcagggaagtcctggaggacataataggcccggcacactcatggcagcagaccgcgctaaacaaatgtttggcccccaggtcctgaccacccgacactacgtcggctctgctgccgccttcgcagggacacccgaacatggccaatttcagggctcccccggaggtgcatatggaacagcacagccacccccccactacggaccgacccagcctgcctactccccttcccagcagctcagagcgccaagtgcattccccgcagttcagtacttgagccagccacaacctcagccttacgcagtccacggccattttcagccgacccagaccggcttcctgcagcctgggggcgccctgtctctgcagaaacaaatggaacatgctaaccaacaaacaggattctccgactctagtagcctcagacccatgcacccccaagccctgcatcctgcgcctggcctgctggcttctcctcagctgcctgtccagatgcagcccgccgggaaatccggctttgctgccacttcacagcctgggccccgattaccttttatccagcattcccaaaacccgaggttctaccataaatag

SEQ ID NO: 146761 - DNA, 912 bp, Artificial Sequence
  derived and/or modified sequence
atgcccgccctgctggagcggcccaagctgagcaacgccatggcccgggcgcttcacagacacatcatgatggagagggaaaggaaaaggcaggaggaggaggaggtggacaagatgatggaacagaaaatgaaagaggagcaagagagaaggaagaagaaggaaatggaagagaggatgagtctggaggagactaaggagcagatcctgaagctcgaggaaaagcttctagctttacaagaggagaagcaccaactatttctccaactcaaaaaggtcctgcacgaggaggagaaacgtcgccgtaaagagcagagcgatctgactacactgacgtccgcagcttaccagcaaagcctcacagtgcatacaggaactcatctgttgtcaatgcaggggtctccggggggccataatagacccggaaccttaatggccgcggatagggctaagcaaatgtttggtcctcaggtgcttactactcggcattacgtagggtctgccgccgccttcgccggaaccccagaacacgggcagttccagggatcaccgggaggggcatacgggaccgcgcagcctccaccgcactacgggcctacccagcctgcatattccccaagccaacagctccgcgcccctagtgcctttcccgccgtccagtatctgtcacagcctcagccccagccctacgcagtccatggccacttccagcccacccaaacaggcttcctgcagccagggggggcccttagcctgcagaagcagatggaacatgcaaatcagcagactggttttagcgattctagctccttgaggccgatgcaccctcaagcccttcacccagcacccggcttgctggcctctcctcagctacctgttcagatgcagcctgcgggaaagactgccccttag

SEQ ID NO: 146762 - DNA, 984 bp, Artificial Sequence
  derived and/or modified sequence
atgccggcactgttggagcgcccaaaactttcaaacgccatggccagagctctccataggcatatcatgatggaaagagagcgaaaacggcaagaggaagaggaagttgataaaatgatggaacagaagatgaaggaggagcaggaacggcgaaaaaagaaagagatggaggagcgcatgtccctggaggaaacaaaggagcagatcctgaaacttgaagaaaagcttcttgctcttcaggaggaaaaacatcagttattcctccagctgaagaaagtgctgcacgaggaggagaagcggcgacgtaaggaacagtctgatctgacaaccctaacgtcggccgcttatcagcagtctctgaccgttcacaccggaacgcaccttttaagcatgcagggcagccccggaggtcacaaccgccctggaaccctcatggcggctgacagagctaagcaaatgtttgggcctcaagttttaacgacacgccactatgtgggttccgccgctgcattcgccggtaccccggaacacggacaattccagggtagccctgggggtgcttatggcaccgctcagccccctccgcactacggtccaacccagcctgcctactctccaagtcaacagcttcgggctcccagtgcctttccagcggtgcagtatctgagccagccacagccccagccctatgcggtgcatggacatttccagcccacccagactggattcttacagcccggaggggctctgtcgctccagaaacaaatggagcacgctaaccagcaaacaggcttcagtgactcctcttccctacggcctatgcacccccaagctctgcatcctgccccaggtctgctggctagcccccaactccccgtccaaatgcagccagctgggaagtctgggttcgctgcaacaagtcagcctggcccaagattaccatttattcagcacagccaaaacccacggttttatcacaagtag

SEQ ID NO: 146763 - DNA, 984 bp, Artificial Sequence
  derived and/or modified sequence
atgccggctttgctagaaagacccaagctaagcaacgccatggctcgggcactgcacaggcacattatgatggagcgggaaagaaaacgccaagaagaggaagaggtagataagatgatggagcagaaaatgaaagaggagcaggaacggagaaaaaagaaagagatggaggagcgtatgtcccttgaagaaaccaaggagcagatcctgaagctggaagaaaaactgttagcattgcaagaggaaaaacaccaactgttcttacagctgaaaaaggtcctgcatgaggaagagaagcgcaggagaaaggagcagagtgacttgactacgctgacctctgctgcctatcaacagagcctgactgtccataccggcacccatctactcagtatgcagggcagcccgggtggacataatcgccctggtacacttatggccgcagaccgggctaaacagatgttcgggcctcaggtgctgactacacgacattatgtcggatcagcagctgcctttgccggaactcccgaacacgggcaattccagggctcacccggaggcgcatacggcactgcacagccaccaccccactacgggccaacgcaacccgcatattctccttcccaacagttgcgggctcccagcgcattcccagctgtgcagtacctgtcacaacctcagcctcagccctacgccgtgcatgggcacttccaacctacccagaccggattcttacagccaggcggtgccctgtccctccagaaacaaatggagcacgctaatcaacagaccggattctccgattctagctcgctccggccaatgcacccccaagcactgcaccctgcacctggactcctggcgtccccccaactcccagtgcagatgcagcccgctggaaagtctggctttgcagctacctcgcagccagggccaaggctgccttttatacaacatagtcagaacccgagattttaccacaaatag

SEQ ID NO: 146764 - DNA, 984 bp, Artificial Sequence
  derived and/or modified sequence
atgcctgctctcctcgagaggcctaaacttagtaatgcaatggccagggcactgcatcgtcacataatgatggagcgcgaaagaaaaagacaagaagaagaagaggttgataagatgatggaacagaaaatgaaagaagagcaggaaaggcggaagaagaaagaaatggaggagcggatgtcacttgaggagactaaggaacaaatcctgaaactggaagagaagctgctcgccctccaagaggagaagcatcagctattcttgcagctcaagaaagtgctacacgaagaggagaagagaaggaggaaagaacagagtgatctgacaaccctgacatccgctgcctatcagcagtccttaactgttcacactggaacacatctgctttcaatgcagggctctccgggtggacacaaccggcctgggactctcatggccgctgaccgagcaaaacagatgtttggtccacaggtacttaccacacgtcattatgtgggctctgccgctgcctttgcaggcacccccgaacacgggcagttccaggggtcccccggtggcgcttacgggaccgcgcagccccctccccattatggcccaacacagccagcctactctccatcgcagcagcttcgagcaccgagcgcattccctgctgtgcagtacttgtctcaacctcagccccagccatacgccgtccacgggcactttcagcctactcagacaggcttcttgcaaccaggcggagcactctctctgcagaaacaaatggagcacgctaatcagcaaacgggcttctccgacagttcatctctgaggcctatgcacccccaggccctgcaccctgcccctggtcttctggcttcaccacagttacccgtgcagatgcagcctgctggaaaatctgggtttgcagcaaccagtcagcccggtcccaggcttccattcatacagcacagtcaaaacccccgtttttaccataagtag

SEQ ID NO: 146765 - DNA, 912 bp, Artificial Sequence
  derived and/or modified sequence
atgcctgccctgcttgaacgtcctaagctaagcaacgcaatggcccgagccttgcatcggcacataatgatggaacgagagaggaagcggcaggaagaagaagaggtggataaaatgatggaacagaagatgaaggaggagcaggaacgccgaaaaaaaaaagagatggaggagaggatgtcactagaggagaccaaagagcaaatcctcaaactggaagagaaactactggcgcttcaggaggaaaagcaccagctgttcttgcagctaaagaaagtgctgcatgaggaggaaaagaggaggcgaaaagaacagagcgatctgacgaccctgacatcagcagcatatcagcagagtctgaccgtccacacaggcactcatctgctttccatgcaaggttcacctggtggccataacagacctggtaccctgatggccgcagaccgtgcaaaacaaatgttcgggccacaggtccttaccactaggcactacgtgggatccgccgctgcctttgccggaactcctgaacacggacaatttcagggatccccaggaggcgcttatggcacggcacagcctccaccccattatgggcctacgcagccagcttacagtccaagtcagcaactcagagctccgagcgcattcccagctgttcagtacttatcacagccacagccccagccttacgccgtccatggccatttccagcccacccagaccgggttcctgcagcccggaggcgctttgtccctgcagaagcagatggaacacgctaatcagcagacaggattcagtgattcttcctcgctccgccctatgcatccacaggctctgcaccctgctccgggactgctggcaagcccgcagctgcctgtccagatgcagccagccggtaaaacggcaccctag

SEQ ID NO: 146766 - DNA, 1596 bp, Artificial Sequence
  derived and/or modified sequence
aggagtctctccctgtgcccacatgaagctgctttttccggggccaccgggcgggagtggggaagggtgggcgcacggaagatgggggcctctgtacagttgttactgactctgatttctaaggagccaataaacaccgtctcagagcctccgcctcggcctctctctcgcgcgcccctctccggagcccgcgtcccctggggtgccaccaggtgggcccgcgaaattaaagagagctgaggatgccaaggccagtctgcagccgtcgtcgctcacgttcccggcgacggggtttgtacgccgcgggcacccgtcgcagcgcgcttccgccttctttcacctgtgaggtcggccgccgccgtgactccggaaggactcggccgggccgccggatgtgacgcaggggccagggcgcgtcggagccgctgagaaagcgcagagaaggcgggccccgtctgaggtctggcagtcagagacagccgggcgcccacggcccgagcgcccacggcagcaccatgcccgcactcctggagcgccccaagctttccaacgccatggccagggcgctgcaccggcacattatgatggagcgggagcgcaagcggcaggaggaagaagaggtggataagatgatggaacagaagatgaaggaagaacaggagagaaggaagaaaaaggagatggaagagagaatgtcattagaggagaccaaggaacaaattctgaagttggaggagaagcttttggctctacaggaagagaagcaccagcttttcctgcagctcaagaaagttttacatgaggaagaaaaacggaggcgaaaggaacagagtgacctgaccaccctaacatcagctgcataccagcagagcctgactgttcacacaggaactcatctcctcagcatgcaggggagccctggaggacacaatcgcccaggcaccctcatggcagctgacagagccaaacaaatgtttggaccccaagtgcttacgacccggcactacgtgggctcagcagctgcttttgcagggacaccagagcatggacaattccaaggcagtcctggtggtgcctatgggactgctcagcccccacctcactatgggcccacacagccagcttatagtcctagtcagcagctcagagctccttcggcattccctgcagtgcagtacctatctcagccacagccacagccctatgctgtgcatggccactttcagcccactcagacaggtttcctccagcctggtggtgccctgtccttgcaaaagcagatggaacatgctaaccagcagactggcttctccgactcatcctctctgcgccccatgcacccccaggctctgcatccagcccctggactccttgcttccccccagctccctgtgcagatgcagccagcaggaaagtcgggctttgcagctaccagccaacctggccctcggctccccttcatccaacacagccagaacccgcgattctaccacaagtgaccatcagattatatcttcaacaccacaccccccaccccatcgtgggtgagggtatcccctgtgtgtcccaggccaataaaatctacctgccactgcc

SEQ ID NO: 146767 - DNA, 1152 bp, Artificial Sequence
  derived and/or modified sequence
gcaggccccgtctgaggtctggcagtcagagacagccgggcgcccacggcccgagcgcccacggcagcaccatgcccgcactcctggagcgccccaagctttccaacgccatggccagggcgctgcaccggcacattatgatggagcgggagcgcaagcggcaggaggaagaagaggtggataagatgatggaacagaagatgaaggaagaacaggagagaaggaagaaaaaggagatggaagagagaatgtcattagaggagaccaaggaacaaattctgaagttggaggagaagcttttggctctacaggaagagaagcaccagcttttcctgcagctcaagaaagttttacatgaggaagaaaaacggaggcgaaaggaacagagtgacctgaccaccctaacatcagctgcataccagcagagcctgactgttcacacaggaactcatctcctcagcatgcaggggagccctggaggacacaatcgcccaggcaccctcatggcagctgacagagccaaacaaatgtttggaccccaagtgcttacgacccggcactacgtgggctcagcagctgcttttgcagggacaccagagcatggacaattccaaggcagtcctggtggtgcctatgggactgctcagcccccacctcactatgggcccacacagccagcttatagtcctagtcagcagctcagagctccttcggcattccctgcagtgcagtacctatctcagccacagccacagccctatgctgtgcatggccactttcagcccactcagacaggtttcctccagcctggtggtgccctgtccttgcaaaagcagatggaacatgctaaccagcagactggcttctccgactcatcctctctgcgccccatgcacccccaggctctgcatccagcccctggactccttgcttccccccagctccctgtgcagatgcagccagcaggaaagtcgggctttgcagctaccagccaacctggccctcggctccccttcatccaacacagccagaacccgcgattctaccacaagtgaccatcagattatatcttcaacaccacaccccccaccccatcgtgggtgagggtatcccctgtgtgtcccaggccaataaaatctacctgccactgcc

SEQ ID NO: 146768 - DNA, 1255 bp, Artificial Sequence
  derived and/or modified sequence
gagaaagcgcagagaaggcgggccccgtctgaggtctggcagtcagagacagccgggcgcccacggcccgagcgcccacggcagcaccatgcccgcactcctggagcgccccaagctttccaacgccatggccagggcgctgcaccggcacattatgatggagcgggagcgcaagcggcaggaggaagaagaggtggataagatgatggaacagaagatgaaggaagaacaggagagaaggaagaaaaaggagatggaagagagaatgtcattagaggagaccaaggaacaaattctgaagttggaggagaagcttttggctctacaggaagagaagcaccagcttttcctgcagctcaagaaagttttacatgaggaagaaaaacggaggcgaaaggaacagagtgacctgaccaccctaacatcagctgcataccagcagagcctgactgttcacacaggaactcatctcctcagcatgcaggggagccctggaggacacaatcgcccaggcaccctcatggcagctgacagagccaaacaaatgtttggaccccaagtgcttacgacccggcactacgtgggctcagcagctgcttttgcagggacaccagagcatggacaattccaaggcagtcctggtggtgcctatgggactgctcagcccccacctcactatgggcccacacagccagcttatagtcctagtcagcagctcagagctccttcggcattccctgcagtgcagtacctatctcagccacagccacagccctatgctgtgcatggccactttcagcccactcagacaggtttcctccagcctggtggtgccctgtccttgcaaaagcagatggaacatgctaaccagcagactggcttctccgactcatcctctctgcgccccatgcacccccaggctctgcatccagcccctggactccttgcttccccccagctccctgtgcagatgcagccagcaggaaagacagcaccgtgatctggagaagcaagagggatagccaagagatgtctgagctcaggaagaaacgtacagaacaaagctgagcacagaagcagggagggaggcaccataccaggatctcttctccacagtcgtacttctgctcaatctccttgccaaggtctccctcagggagacgaaggtcctctcgtacctccccgctgtcctggagcagtgataggtacccatcctggatgccaatcagctgggggcagatagggaaggaggctg

SEQ ID NO: 146769 - DNA, 984 bp, Artificial Sequence
  derived and/or modified sequence
atgcccgccctgctggagagacccaagctgagcaacgccatggccagagccctgcacagacacatcatgatggagagagagagaaagagacaggaggaggaggaggtggacaagatgatggagcagaagatgaaggaggagcaggagagaagaaagaagaaggagatggaggagagaatgagcctggaggagaccaaggagcagatcctgaagctggaggagaagctgctggccctgcaggaggagaagcaccagctgttcctgcagctgaagaaggtgctgcacgaggaggagaagagaagaagaaaggagcagagcgacctgaccaccctgaccagcgccgcctaccagcagagcctgaccgtgcacaccggcacccacctgctgagcatgcagggcagccccggcggccacaacagacccggcaccctgatggccgccgacagagccaagcagatgttcggcccccaggtgctgaccaccagacactacgtgggcagcgccgccgccttcgccggcacccccgagcacggccagttccagggcagccccggcggcgcctacggcaccgcccagccccccccccactacggccccacccagcccgcctacagccccagccagcagctgagagcccccagcgccttccccgccgtgcagtacctgagccagccccagccccagccctacgccgtgcacggccacttccagcccacccagaccggcttcctgcagcccggcggcgccctgagcctgcagaagcagatggagcacgccaaccagcagaccggcttcagcgacagcagcagcctgagacccatgcacccccaggccctgcaccccgcccccggcctgctggccagcccccagctgcccgtgcagatgcagcccgccggcaagagcggcttcgccgccaccagccagcccggccccagactgcccttcatccagcacagccagaaccccagattctaccacaagtag

SEQ ID NO: 146770 - DNA, 912 bp, Artificial Sequence
  derived and/or modified sequence
atgcccgccctgctggagagacccaagctgagcaacgccatggccagagccctgcacagacacatcatgatggagagagagagaaagagacaggaggaggaggaggtggacaagatgatggagcagaagatgaaggaggagcaggagagaagaaagaagaaggagatggaggagagaatgagcctggaggagaccaaggagcagatcctgaagctggaggagaagctgctggccctgcaggaggagaagcaccagctgttcctgcagctgaagaaggtgctgcacgaggaggagaagagaagaagaaaggagcagagcgacctgaccaccctgaccagcgccgcctaccagcagagcctgaccgtgcacaccggcacccacctgctgagcatgcagggcagccccggcggccacaacagacccggcaccctgatggccgccgacagagccaagcagatgttcggcccccaggtgctgaccaccagacactacgtgggcagcgccgccgccttcgccggcacccccgagcacggccagttccagggcagccccggcggcgcctacggcaccgcccagccccccccccactacggccccacccagcccgcctacagccccagccagcagctgagagcccccagcgccttccccgccgtgcagtacctgagccagccccagccccagccctacgccgtgcacggccacttccagcccacccagaccggcttcctgcagcccggcggcgccctgagcctgcagaagcagatggagcacgccaaccagcagaccggcttcagcgacagcagcagcctgagacccatgcacccccaggccctgcaccccgcccccggcctgctggccagcccccagctgcccgtgcagatgcagcccgccggcaagaccgccccctag

SEQ ID NO: 146771 - protein, 540 aa, Artificial Sequence
  derived and/or modified sequence
MTTSLQDGQSAASRAAARDSPLAAQVCGAAQGRGDAHDLAPAPWLHARALLPLPDGTRGCAADRRKKKDLDVPEMPSIPNPFPELCCSPFTSVLSADLFPKANSRKKQVIKVYSEDETSRALDVPSDITARDVCQLLILKNHYIDDHSWTLFEHLPHIGVERTIEDHELVIEVLSNWGIEEENKLYFRKNYAKYEFFKNPMYFFPEHMVSFATETNGEISPTQILQMFLSSSTYPEIHGFLHAKEQGKKSWKKIYFFLRRSGLYFSTKGTSKEPRHLQFFSEFGNSDIYVSLAGKKKHGAPTNYGFCFKPNKAGGPRDLKMLCAEEEQSRTCWVTAIRLLKYGMQLYQNYMHPYQGRSGCSSQSISPMRSISENSLVAMDFSGQKSRVIENPTEALSVAVEEGLAWRKKGCLRLGTHGSPTASSQSSATNMAIHRSQPWFHHKISRDEAQRLIIQQGLVDGVFLVRDSQSNPKTFVLSMSHGQKIKHFQIIPVEDDGEMFHTLDDGHTRFTDLIQLVEFYQLNKGVLPCKLKHYCARIAL

SEQ ID NO: 146772 - DNA, 1623 bp, Artificial Sequence
  derived and/or modified sequence
atgaccacaagccttcaagatggccaatccgctgcttcacgcgctgctgctcgcgattccccgttggcggctcaagtgtgcggagctgcccagggccgcggtgatgcccacgacctggcaccagccccatggctccacgctagagcgctattgcctttacctgatggcactcgggggtgtgctgctgatcgcaggaaaaagaaagatcttgacgtgccagagatgcccagtatccctaaccctttccctgagctgtgctgctcacctttcacgtccgtccttagtgctgacctgttcccaaaagccaacagtagaaagaaacaagttattaaagtctactccgaggatgagacatcgcgcgctctggacgtgccctctgatattaccgcccgagatgtttgccagctactcatattaaaaaatcactacatcgatgatcactcatggaccctcttcgagcacctaccacatattggagtcgagaggactatcgaagatcacgaacttgtaattgaagtgttatcgaactggggcattgaggaagagaacaagttgtactttaggaaaaattacgctaagtacgaatttttcaagaacccaatgtacttttttcctgaacatatggtgagctttgcaacagagactaacggagaaatctctccgacccagatcctgcagatgtttctcagttccagcacttatccagaaattcacggatttctgcatgcaaaggagcaaggaaagaagtcttggaagaagatctacttcttcctgaggcgatctggactttacttttctacgaaaggaacctctaaggagccaaggcacctgcaattcttttcagagttcgggaattccgatatctacgtgagtctggctggtaagaaaaaacatggagctcccaccaattatgggttctgtttcaagcccaataaagccgggggccctcgcgatctcaagatgctttgcgccgaagaggagcagagccgcacatgctgggtgacagccatccggctcctgaagtatggtatgcagttgtatcaaaactacatgcatccatatcagggccgctcaggatgctcttcacagtccatttcacctatgcgctctataagcgagaactccctggtagcgatggatttcagcggccagaaaagcagagtgattgagaaccccacagaagcccttagcgtggctgttgaggaaggtctcgcctggagaaaaaagggttgcttgaggctggggactcacgggagccctactgcatcctcacaaagctcggccacaaacatggccattcacagatcacagccatggtttcaccacaagatcagtcgggacgaagcacagcggctaattatccagcaagggctcgtggacggcgttttcctcgtgagggactctcagtccaaccccaagacattcgtcctgtctatgagccatggtcagaaaatcaagcactttcaaatcatccccgtcgaggatgacggagaaatgttccacacgctcgacgatggccatactcggtttactgacctgattcagctggtggagttctatcagctgaataagggcgtgctcccttgtaagctcaaacattactgcgcacgaatagccttgtag

SEQ ID NO: 146773 - DNA, 2382 bp, Artificial Sequence
  derived and/or modified sequence
atgagggtcagggctgcgcggacccctatcccgcctgcggtcctcccggcaagcccagcgggagcgcccgctcggctgggtccccgcctccagcggcgccggggccgcccagaccctgggctcagcctcgcgccccggtgcccacctgaggaggcagcggtcccggcctcgcgtcccggatgggacggcgcgggagcaatgccagtggccccgagcgccccgggccacgcgcggggccggccagccgctctcgcgccctccccgccccctccgcgccttgcctcgccgcccgcggcccccacccaccggccgctcctcccctctccccaccctcctcctccgccccctcccctcccccgccgcctcgcagatagctcggccgcgcgtctcagccgccggggccccgagcgcaggcggcgaggccaccacacctgcagagcgctcgggctgcctagccggcacctcgcctcccgccgcgcaaaccccttctccccacgcgccgagtctcccatgacgcccgagccccccggccggcgacaatgaccacttccctgcaagatgggcagagcgccgcgagcagggcggctgcccgggattcgccgctggccgcccaggtgtgtggcgctgcccaggggaggggcgacgcccacgacctggcgccggccccctggctgcacgcgcgagcgctcctgccccttccggacgggacccgcggctgtgctgcagacaggagaaaaaagaaagatcttgatgttccggaaatgccatctattccaaacccttttcctgagctatgctgttctccatttacatctgtgttgtcagcagacctatttcccaaagcaaattcaaggaaaaaacaggtgattaaagtatacagtgaagatgaaaccagcagggctttagatgtacccagtgacataacggctcgagatgtttgtcagctgttgatcctgaagaatcattacattgatgaccacagctggaccctttttgagcacctgcctcacataggtgtagaaagaacaatagaagaccacgaactggtgattgaagtgctatccaactgggggatagaagaagaaaacaaactatactttagaaaaaattatgccaaatatgagttctttaaaaacccaatgtatttttttccagagcatatggtatcttttgcaactgaaaccaatggtgaaatatcccccacacagattttgcagatgtttctgagttcaagcacatatcctgaaattcatggtttcttacatgcgaaagaacagggaaagaagtcttggaaaaaaatttacttttttctaagaagatctggtttatatttttctactaaaggaacatcaaaggaaccgcggcatttgcagtttttcagcgaatttggcaatagtgatatttatgtgtcactggcaggcaaaaaaaaacatggagcaccgactaactatggattctgctttaagcctaacaaagcgggagggccccgagacctgaaaatgctctgtgcagaagaagagcagagtaggacgtgctgggtgaccgcgattagattgcttaagtatggcatgcagctgtaccagaattatatgcatccatatcaaggtagaagtggctgcagttcacagagcatatcacctatgagaagtatatcagagaattccctggtagcaatggacttctcaggccagaaaagcagagttatagaaaatcccactgaagccctttcagttgcggttgaagaaggactcgcttggaggaaaaaaggatgtttacgcctgggcactcacggtagccccactgcctcttcacagagctctgccacaaacatggctatccaccggtcccagccatggtttcaccacaaaatttctagagatgaggctcagcgattgattattcagcaaggacttgtggatggagttttcttggtacgggatagtcagagtaaccccaaaactttcgtactgtcaatgagtcatggacaaaaaataaagcactttcaaattataccagtagaagatgacggtgaaatgttccacacactggatgatggccacacaagatttacagatctaatacagctggtggagttctatcaactcaataagggcgttcttccttgcaagttgaaacattattgtgctaggattgctctctagacaagccagaagtgacttattaaactattgaaggaaaaggactcaagaaaaataataaaagaccataaataagggcgaaaacattaccatgtgaaaagaatgtatttcacctgcaagttacaaaaaaatagtttgtgcattgcaaataagcaaagacttggattgactttacattcatcatttaaaattcattagttaaaattaaaccttaggaaaaaaa

SEQ ID NO: 146774 - DNA, 1623 bp, Artificial Sequence
  derived and/or modified sequence
atgaccaccagcctgcaggacggccagagcgctgccagcagagctgctgcccgggacagccccctggccgcccaggtgtgtggggccgcccagggcagaggagatgcccatgacctggccccagccccctggctgcacgcccgggccctgctgcccctgcctgatggcacccggggctgtgccgctgacaggaggaagaagaaggacctggatgtgcctgagatgcccagcatccccaaccccttccctgagctgtgctgcagccccttcacctctgtgctgtctgctgacctcttccccaaggccaacagcaggaagaagcaggtgatcaaggtgtacagtgaagatgagaccagccgggccctggatgtgcccagcgacatcacagccagagatgtgtgccagctgctgatcctgaagaaccactacattgatgaccacagctggaccctgtttgagcacctgccccacatcggcgtggagaggaccattgaagatcatgagctggtgattgaggtgctgagcaactggggcatcgaggaggagaacaagctgtacttcaggaagaactatgccaagtatgagttcttcaagaaccccatgtacttcttccctgagcacatggtgtcctttgccacagagaccaacggggagatcagccccacccagatcctgcagatgttcctgagcagcagcacctacccagagatccacggcttcctgcacgccaaggagcagggcaagaagtcctggaagaagatctacttcttcctgcggcgcagcggcctgtacttcagcaccaagggcaccagcaaggagcccaggcacctgcagttcttcagcgagtttggaaacagcgacatctacgtgtccctggccggcaagaagaagcacggggcccccaccaactacggcttctgcttcaagcccaacaaggccggcggcccccgggacctgaagatgctgtgtgccgaggaggagcagagcaggacctgctgggtgacagccatccggctgctgaagtatggcatgcagctgtaccagaactacatgcacccctaccagggccgcagcggctgcagcagccagagcatcagccccatgaggagcatcagcgagaacagcctggtggccatggacttcagcggccagaagagccgggtgattgagaaccccacagaggccctgtctgtggccgtggaggagggcctggcctggaggaagaagggctgcctgcggctgggcacccacggcagccccacagccagcagccagagcagcgccaccaacatggccatccacaggagccagccctggttccaccacaagatcagcagagatgaggcccagaggctcatcatccagcagggcctggtggatggagtcttcctggtgcgggacagccagagcaaccccaagacctttgtgctgtccatgagccacggccagaagatcaagcacttccagatcatccctgtggaggatgatggagagatgttccacaccctggatgatggccacacccgcttcacagacctgatccagctggtggagttctaccagctgaacaagggcgtgctgccctgcaagctgaagcactactgtgcccgcatcgccctgtag

SEQ ID NO: 146775 - DNA, 1623 bp, Artificial Sequence
  derived and/or modified sequence
atgaccaccagcctgcaggacggccagagcgccgccagccgggccgccgcacgcgatagcccacttgcagctcaagtatgtggtgctgcccagggccggggggatgcccatgatctggctccagccccatggctgcacgcccgggcattattaccgctgcccgatgggacaagaggctgcgctgcagaccgcagaaaaaaaaaggacctcgacgtacctgaaatgccaagtatccccaacccatttcctgagctgtgctgctcccccttcactagcgtcctgagcgccgacctgttccctaaagctaactcgcgaaaaaaacaggttattaaagtgtatagcgaagatgaaactagccgagcactggatgttccatccgacataactgctcgagacgtctgccagctgctgatcctcaaaaaccactacatcgatgaccactcatggacattatttgagcatctgcctcacattggtgtggaacgaacaatagaggatcatgagttggtcatagaggttctcagtaattgggggattgaagaggaaaacaaactgtacttcaggaaaaattacgcaaagtacgaatttttcaagaatccaatgtatttttttcctgagcatatggtgtcgttcgctactgagacgaatggcgagatctcccctactcaaatcctgcaaatgttcctttccagcagcacctatcctgaaatccacgggttcttgcatgccaaggaacagggtaagaaaagctggaaaaagatctacttttttctgaggaggtcaggcctgtattttagcactaagggcactagcaaagagccgcgacatctgcagttcttctccgaattcgggaatagcgacatctatgtaagcctggccggcaagaagaaacacggcgcacctacaaactacggattctgtttcaaacccaacaaggccggtggaccacgcgacttgaagatgttatgcgccgaagaagaacaatccagaacttgttgggtcaccgcgatccgtctgctgaaatatggaatgcagctgtaccagaactacatgcacccctaccaaggacgatccgggtgcagttctcagagcatttcccctatgcggtctatttcagaaaacagcctggtggccatggacttttccggacagaagtcgagggttatagaaaatcccaccgaagctctcagcgtcgctgttgaagaggggcttgcgtggcgtaaaaagggctgtcttcgcttaggcacccacggctcccccacggccagttcccagtcttctgcgaccaacatggccattcacaggagccagccctggtttcaccacaagatcagcagagatgaggctcagcgtctgattatccaacagggactggtggacggtgttttcctggtaagagattcacaatcaaaccccaagacgttcgtcctgtccatgagtcacgggcagaaaatcaaacactttcaaattatacctgtggaggacgacggagagatgtttcacacattggacgacggccacacacggttcaccgatctaatccaactggtggagttctaccagctgaacaaaggggtacttccctgcaagcttaagcattattgtgctcgcatcgcactgtag

SEQ ID NO: 146776 - DNA, 1623 bp, Artificial Sequence
  derived and/or modified sequence
atgacaacctcccttcaggacggccaaagcgccgcaagtagagcagcggcaagagattcacccttggcagcccaggtttgcggcgcagcccagggcagaggcgacgcccatgatcttgcacccgcaccatggttacatgccagggcccttctcccccttcccgatgggacacgcggatgtgccgcagaccggagaaagaaaaaggatttggacgtgccagagatgccttcaatacccaatccattccctgaactgtgctgttcccccttcaccagtgtgttatccgccgacctgtttccaaaagcgaattcacgaaaaaagcaggtgatcaaggtttattcagaggacgaaacatccagggcactcgacgtccctagcgatatcacagctcgcgatgtgtgtcaactgctgattctcaagaatcattatatcgacgatcattcctggactcttttcgaacatctgcctcacattggcgtagagaggaccatcgaggatcatgaattggtgatcgaagtcctgtccaattggggaatagaggaggagaacaagctgtactttcgcaagaactatgcaaagtacgagttttttaaaaaccctatgtacttctttcctgagcatatggtctcttttgccaccgaaacaaacggcgaaataagtcccacccagattctacagatgtttttgagtagttcaacctatcctgaaattcatgggttcctgcacgcaaaggagcaggggaaaaaatcttggaagaagatttacttcttcttaaggcggtccggcctttacttctctactaaaggtacttccaaggaaccaaggcacttgcagttttttagcgagtttgggaactctgacatttacgtgtcactagctggcaagaagaagcacggcgctccaactaattatggattttgttttaaacctaacaaggccggtggccctcgtgatttgaagatgctctgcgccgaagaggagcaaagccggacttgttgggtgacagcaatcaggcttctgaagtatggaatgcaactttaccagaactacatgcatccttatcagggaagatcgggctgctctagccaatccatcagtcctatgcgcagtattagcgagaatagcctcgtcgctatggatttcagcggccagaaaagtcgggttattgagaaccccacagaagcccttagtgtggcagtggaggagggcctggcttggaggaagaagggatgcctgcgactgggcacacatggctcccccactgcctcctcacagagcagcgccaccaacatggcgattcatcgctcccagccctggttccatcataaaatatcgagagacgaggctcagagattgatcatccagcagggcctggtagatggcgtgttcctggtgagagatagtcagagtaatcccaaaacattcgttctgtctatgtcacacgggcagaagatcaagcatttccagattatcccagtggaagacgatggggagatgttccatactctggacgacgggcatacccgatttaccgatttgattcaactggtggaattttatcaactcaataagggcgtcctcccttgcaagcttaagcattactgcgccagaatagccctatag

SEQ ID NO: 146777 - DNA, 1623 bp, Artificial Sequence
  derived and/or modified sequence
atgaccaccagcctgcaggacggccagagcgccgccagcagagccgccgccagagacagccccctggccgcccaggtgtgcggcgccgcccagggcagaggcgacgcccacgacctggcccccgccccctggctgcacgccagagccctgctgcccctgcccgacggcaccagaggctgcgccgccgacagaagaaagaagaaggacctggacgtgcccgagatgcccagcatccccaaccccttccccgagctgtgctgcagccccttcaccagcgtgctgagcgccgacctgttccccaaggccaacagcagaaagaagcaggtgatcaaggtgtacagcgaggacgagaccagcagagccctggacgtgcccagcgacatcaccgccagagacgtgtgccagctgctgatcctgaagaaccactacatcgacgaccacagctggaccctgttcgagcacctgccccacatcggcgtggagagaaccatcgaggaccacgagctggtgatcgaggtgctgagcaactggggcatcgaggaggagaacaagctgtacttcagaaagaactacgccaagtacgagttcttcaagaaccccatgtacttcttccccgagcacatggtgagcttcgccaccgagaccaacggcgagatcagccccacccagatcctgcagatgttcctgagcagcagcacctaccccgagatccacggcttcctgcacgccaaggagcagggcaagaagagctggaagaagatctacttcttcctgagaagaagcggcctgtacttcagcaccaagggcaccagcaaggagcccagacacctgcagttcttcagcgagttcggcaacagcgacatctacgtgagcctggccggcaagaagaagcacggcgcccccaccaactacggcttctgcttcaagcccaacaaggccggcggccccagagacctgaagatgctgtgcgccgaggaggagcagagcagaacctgctgggtgaccgccatcagactgctgaagtacggcatgcagctgtaccagaactacatgcacccctaccagggcagaagcggctgcagcagccagagcatcagccccatgagaagcatcagcgagaacagcctggtggccatggacttcagcggccagaagagcagagtgatcgagaaccccaccgaggccctgagcgtggccgtggaggagggcctggcctggagaaagaagggctgcctgagactgggcacccacggcagccccaccgccagcagccagagcagcgccaccaacatggccatccacagaagccagccctggttccaccacaagatcagcagagacgaggcccagagactgatcatccagcagggcctggtggacggcgtgttcctggtgagagacagccagagcaaccccaagaccttcgtgctgagcatgagccacggccagaagatcaagcacttccagatcatccccgtggaggacgacggcgagatgttccacaccctggacgacggccacaccagattcaccgacctgatccagctggtggagttctaccagctgaacaagggcgtgctgccctgcaagctgaagcactactgcgccagaatcgccctgtag

SEQ ID NO: 146778 - protein, 1513 aa, Artificial Sequence
  derived and/or modified sequence
MMMARKQDVRIPTYNISVVGLSGTEKEKGQCGIGKSCLCNRFVRPSADEFHLDHTSVLSTSDFGGRVVNNDHFLYWGEVSRSLEDCVECKMHIVEQTEFIDDQTFQPHRSTALQPYIKRAAATKLASAEKLMYFCTDQLGLEQDFEQKQMPDGKLLVDGFLLGIDVSRGMNRNFDDQLKFVSNLYNQLAKTKKPIVVVLTKCDEGVERYIRDAHTFALSKKNLQVVETSARSNVNVDLAFSTLVQLIDKSRGKTKIIPYFEALKQQSQQIATAKDKYEWLVSRIVKNHNENWLSVSRKMQASPEYQDYVYLEGTQKAKKLFLQHIHRLKHEHIERRRKLYLAALPLAFEALIPNLDEIDHLSCIKAKKLLETKPEFLKWFVVLEETPWDATSHIDNMENERIPFDLMDTVPAEQLYEAHLEKLRNERKRVEMRRAFKENLETSPFITPGKPWEEARSFIMNEDFYQWLEESVYMDIYGKHQKQIIDKAKEEFQELLLEYSELFYELELDAKPSKEKMGVIQDVLGEEQRFKALQKLQAERDALILKHIHFVYHPTKETCPSCPACVDAKIEHLISSRFIRPSDRNQKNSLSDPNIDRINLVILGKDGLARELANEIRALCTNDDKYVIDGKMYELSLRPIEGNVRLPVNSFQTPTFQPHGCLCLYNSKESLSYVVESIEKSRESTLGRRDNHLVHLPLTLILVNKRGDTSGETLHSLIQQGQQIASKLQCVFLDPASAGIGYGRNINEKQISQVLKGLLDSKRNLNLVSSTASIKDLADVDLRIVMCLMCGDPFSADDILFPVLQSQTCKSSHCGSNNSVLLELPIGLHKKRIELSVLSYHSSFSIRKSRLVHGYIVFYSAKRKASLAMLRAFLCEVQDIIPIQLVALTDGAVDVLDNDLSREQLTEGEEIAQEIDGRFTSIPCSQPQHKLEIFHPFFKDVVEKKNIIEATHMYDNAAEACSTTEEVFNSPRAGSPLCNSNLQDSEEDIEPSYSLFREDTSLPSLSKDHSKLSMELEGNDGLSFIMSNFESKLNNKVPPPVKPKPPVHFEITKGDLSYLDQGHRDGQRKSVSSSPWLPQDGFDPSDYAEPMDAVVKPRNEEENIYSVPHDSTQGKIITIRNINKAQSNGSGNGSDSEMDTSSLERGRKVSIVSKPVLYRTRCTRLGRFASYRTSFSVGSDDELGPIRKKEEDQASQGYKGDNAVIPYETDEDPRRRNILRSLRRNTKKPKPKPRPSITKATWESNYFGVPLTTVVTPEKPIPIFIERCIEYIEATGLSTEGIYRVSGNKSEMESLQRQFDQDHNLDLAEKDFTVNTVAGAMKSFFSELPDPLVPYNMQIDLVEAHKINDREQKLHALKEVLKKFPKENHEVFKYVISHLNKVSHNNKVNLMTSENLSICFWPTLMRPDFSTMDALTATRTYQTIIELFIQQCPFFFYNRPITEPPGARPSSPSAVASTVPFLTSTPVTSQPSPPQSPPPTPQSPMQPLLPSPLHPHRPTPQPSRNIPWQTKEH

SEQ ID NO: 146779 - protein, 1499 aa, Artificial Sequence
  derived and/or modified sequence
MMMARKQDVRIPTYNISVVGLSGTEKEKGQCGIGKSCLCNRFVRPSADEFHLDHTSVLSTSDFGGRVVNNDHFLYWGEVSRSLEDCVECKMHIVEQTEFIDDQTFQPHRSTALQPYIKRAAATKLASAEKLMYFCTDQLGLEQDFEQKQMPDGKLLVDGFLLGIDVSRGMNRNFDDQLKFVSNLYNQLAKTKKPIVVVLTKCDEGVERYIRDAHTFALSKKNLQVVETSARSNVNVDLAFSTLVQLIDKSRGKTKIIPYFEALKQQSQQIATAKDKYEWLVSRIVKNHNENWLSVSRKMQASPEYQDYVYLEGTQKAKKLFLQHIHRLKHEHIERRRKLYLAALPLAFEALIPNLDEIDHLSCIKAKKLLETKPEFLKWFVVLEETPWDATSHIDNMENERIPFDLMDTVPAEQLYEAHLEKLRNERKRVEMRRAFKENLETSPFITPGKPWEEARSFIMNEDFYQWLEESVYMDIYGKHQKQIIDKAKEEFQELLLEYSELFYELELDAKPSKEKMGVIQDVLGEEQRFKALQKLQAERDALILKHIHFVYHPTKETCPSCPACVDAKIEHLISSRFIRPSDRNQKNSLSDPNIDRINLVILGKDGLARELANEIRALCTNDDKYVIDGKMYELSLRPIEGNVRLPVNSFQTPTFQPHGCLCLYNSKESLSYVVESIEKSRESTLGRRDNHLVHLPLTLILVNKRGDTSGETLHSLIQQGQQIASKLQCVFLDPASAGIGYGRNINEKQISQVLKGLLDSKRNLNLVSSTASIKDLADVDLRIVMCLMCGDPFSADDILFPVLQSQTCKSSHCGSNNSVLLELPIGLHKKRIELSVLSYHSSFSIRKSRLVHGYIVFYSAKRKASLAMLRAFLCEVQDIIPIQLVALTDGAVDVLDNDLSREQLTEGEEIAQEIDGRFTSIPCSQPQHKLEIFHPFFKDVVEKKNIIEATHMYDNAAEACSTTEEVFNSPRAGSPLCNSNLQDSEEDIEPSYSLFREDTSLPSLSKDHSKLSMELEGNDGLSFIMSNFESKLNNKVPPPVKPKPPVHFEITKGDLSYLDQGHRDGQRKSVSSSPWLPQDGFDPSDYAEPMDAVVKPRNEEENIYSVPHDSTQGKIITIRNINKAQSNGSGNGSDSEMDTSSLERGRKVSIVSKPVLYRTRCTRLGRFASYRTSFSVGSDDELGPIRKKEEDQASQGYKGDNAVIPYETDEDPRRRNILRSLRRNTKKPKPKPRPSITKATWESNYFGVPLTTVVTPEKPIPIFIERCIEYIEATGLSTEGIYRVSGNKSEMESLQRQFDQDHNLDLAEKDFTVNTVAGAMKSFFSELPDPLVPYNMQIDLVEAHKINDREQKLHALKEVLKKFPKENHEVFKYVISHLNKVSHNNKVNLMTSENLSICFWPTLMRPDFSTMDALTATRTYQTIIELFIQQCPFFFYNRPITEPPGARPSSPSAVASTVPFLTSTPVTSQPSPPQSPPPTPQSPMQPLLPSQLQAEHTL

SEQ ID NO: 146780 - protein, 749 aa, Artificial Sequence
  derived and/or modified sequence
MMMARKQDVRIPTYNISVVGLSGTEKEKGQCGIGKSCLCNRFVRPSADEFHLDHTSVLSTSDFGGRVVNNDHFLYWGEVSRSLEDCVECKMHIVEQTEFIDDQTFQPHRSTALQPYIKRAAATKLASAEKLMYFCTDQLGLEQDFEQKQMPDGKLLVDGFLLGIDVSRGMNRNFDDQLKFVSNLYNQLAKTKKPIVVVLTKCDEGVERYIRDAHTFALSKKNLQVVETSARSNVNVDLAFSTLVQLIDKSRGKTKIIPYFEALKQQSQQIATAKDKYEWLVSRIVKNHNENWLSVSRKMQASPEYQDYVYLEGTQKAKKLFLQHIHRLKHEHIERRRKLYLAALPLAFEALIPNLDEIDHLSCIKAKKLLETKPEFLKWFVVLEETPWDATSHIDNMENERIPFDLMDTVPAEQLYEAHLEKLRNERKRVEMRRAFKENLETSPFITPGKPWEEARSFIMNEDFYQWLEESVYMDIYGKHQKQIIDKAKEEFQELLLEYSELFYELELDAKPSKEKMGVIQDVLGEEQRFKALQKLQAERDALILKHIHFVYHPTKETCPSCPACVDAKIEHLISSRFIRPSDRNQKNSLSDPNIDRINLVILGKDGLARELANEIRALCTNDDKYVIDGKMYELSLRPIEGNVRLPVNSFQTPTFQPHGCLCLYNSKESLSYVVESIEKSRESTLGRRDNHLVHLPLTLILVNKRGDTSGETLHSLIQQGQQIASKLQCVFLDPASAGAADLSWLGPI

SEQ ID NO: 146781 - DNA, 8904 bp, Artificial Sequence
  derived and/or modified sequence
atgatgatggcaagaaagcaagatgtccgaattcccacctacaacatcagtgtggtgggattatctgggaccgagaaggaaaagggccagtgtgggattggaaagtcttgtttgtgcaaccgcttcgtgcgcccgagtgctgacgagtttcacttggaccatacctccgtcctcagcaccagtgactttggagggcgagtggtcaataatgaccactttctctactggggagaagttagccgctccctggaggattgtgtggaatgtaagatgcacattgtggagcagactgaatttattgatgatcagacttttcaacctcatcgaagcacggccctgcagccctatatcaagagagctgctgcgaccaagcttgcatcagctgaaaaactcatgtacttttgcactgaccagctggggctggagcaggactttgagcagaaacaaatgccagacggaaagctgctggttgatggttttcttcttggtattgatgttagcaggggcatgaataggaactttgatgaccagctcaagtttgtctccaatctctacaatcagcttgcaaaaacaaaaaagcccatagtggtggtcctgactaagtgtgacgaaggtgttgagcggtacattagagatgcacatacttttgccttaagcaaaaagaacctccaggttgtggagacctcagcgagatccaatgtaaacgtggacttggctttcagcaccttagtgcaactcattgataaaagtcggggaaagacaaaaatcattccttattttgaagctctcaagcagcagagtcagcagatagctacagcaaaagacaagtatgagtggctggtgagtcgcattgtgaaaaaccacaatgagaactggctgagtgtcagccgaaagatgcaggcctctccagaataccaggactatgtctacctggaagggactcagaaagccaagaagctgtttctacagcacatccaccgcctcaagcatgagcatatcgagcgtaggagaaagctgtacctggcagccctgccattagcttttgaagctcttatacctaatctagatgaaatagaccacctaagctgcataaaagccaaaaagctcttagaaaccaagccagaattcttgaagtggtttgttgtgcttgaagagaccccatgggatgccaccagtcacattgacaacatggaaaacgaacggattccctttgatttaatggataccgtccctgcagagcagctatacgaggcccacttagagaagctgaggaacgaaaggaaaagagttgagatgcgaagggcgtttaaagaaaacctggagacttctcctttcataactcccggaaagccttgggaagaggcccgtagttttattatgaatgaggatttctaccagtggctggaggaatctgtatacatggatatttatggcaaacaccaaaagcaaattatagataaagcaaaggaagaatttcaggagttgcttttggaatattcagaattgttttatgaactggagctggatgctaagcccagcaaggagaagatgggtgttattcaggatgttctgggagaggaacagcgatttaaagcattacaaaagctccaagcagagcgtgatgcccttattctgaaacacattcattttgtgtaccacccaacaaaggagacatgccccagctgcccagcttgtgtggacgctaagattgagcacttgattagttctcggtttatccggccgtctgaccggaatcagaaaaattcactctctgaccctaacattgatagaatcaacttggttatattgggcaaagacggccttgcccgagagttggccaatgagattcgagctctttgtacaaatgatgacaagtatgtgatagatggtaaaatgtatgagctttccctgaggccaatagaggggaatgtcaggcttcctgtgaactctttccagacgccaacatttcagccccacggctgtctctgcctttacaattcaaaggaatcgctatcctatgtagtggaaagtatagagaagagtagagagtccacgctgggccggcgggataatcatttagtccatctcccccttacattaattttggttaacaagagaggagacaccagtggagagactctgcatagcttaatacagcaaggtcaacaaattgctagcaaacttcagtgtgtctttctcgaccctgcttctgctggcattggttacggacgcaacattaatgaaaagcaaatcagtcaagttttgaagggactcctggactctaagcgtaacttaaacctggtcagttctactgctagcatcaaagatttggctgatgttgatctgcgaattgttatgtgtctgatgtgtggagatccttttagtgcagatgacatactttttcctgtccttcagtcccaaacctgtaaatcttcccattgtggaagcaacaactctgttttacttgaactaccaatcggactgcacaagaagcggattgaactgtctgttctttcataccattcctcctttagcatcagaaagagccggttggttcatgggtacattgttttttattcagccaaacgtaaggcctctttggctatgttacgtgcctttctttgtgaagtgcaggatattatccctattcagcttgtagcactcactgatggcgctgtagatgtcctggacaatgacttaagtagggaacagctaactgagggggaggagattgctcaagaaattgacggaaggttcacaagcatcccctgtagccaaccccagcataaacttgagatctttcacccattttttaaagatgtggtggaaaaaaagaacataatcgaggctactcatatgtacgataatgctgccgaggcctgtagcaccaccgaagaggtgtttaactccccccgggcaggatcaccgctctgcaactcaaacctgcaggattcagaagaagatatcgagccatcttacagcctgtttcgagaagacacatcactgccttctctgtccaaagaccattctaagctctctatggaactggagggaaatgatgggctgtctttcattatgagcaattttgagagtaaactgaacaacaaagtacctccgccagtcaaaccaaagcctcctgtccattttgaaattacaaagggggatctatcttatttagaccaaggccatagggatggacagaggaagtctgtgtcttctagcccctggctgcctcaggatgggtttgatccttctgactatgctgaacccatggatgctgtggtgaagccaaggaatgaagaagaaaacatatactccgtgccccatgacagcacccaaggcaaaatcatcaccattcggaatatcaacaaagcccagtccaacggcagcgggaatggttctgacagtgaaatggacaccagctctctagagcgagggcgcaaggtttccatcgtgagcaagccagtgctgtacaggacgagatgcacccggctggggcggtttgctagttaccggaccagcttcagcgtggggagtgatgatgagctggggcccatccggaagaaagaggaggatcaggcatcccagggttataaaggggacaatgctgtcattccatacgaaacagacgaagacccgcggaggaggaatattcttcgcagcctaaggaggaacactaagaaaccaaagcccaaaccccggccatccatcacaaaggcaacctgggagagtaactattttggggtgcccttaacaactgtcgtgactccagagaagccgatccccatttttattgaaagatgtattgagtacattgaagccacaggactgagcacggaaggcatctaccgggtcagcgggaacaagtctgagatggagagtctgcagagacagtttgatcaagaccacaacctggacctggcagagaaagactttacggtgaataccgtggctggtgccatgaagagctttttctcagaactgcctgaccccctggtcccgtataacatgcagatcgacttggtggaagcacacaaaatcaacgaccgggagcagaagttgcatgcccttaaggaggtattaaagaaatttccaaaggaaaaccacgaagtcttcaagtatgtcatctctcacctaaacaaggtcagccacaacaacaaggtgaatctcatgaccagcgagaacctctccatctgcttctggcccaccttgatgagacctgatttcagcactatggacgccctcacagccacgcgcacctaccagacaatcattgaactctttatccagcagtgccccttcttcttctacaatcggcccatcaccgagccccccggcgccaggcccagctccccctctgccgtggcttccaccgtccccttcctcacttccacgcctgtcacaagtcagccgtcgcccccacagtcgcctccacccaccccccagtccccaatgcagccactgcttccctcccagcttcaagccgaacacacgctgtgagccaccaagacctggggcgacaggagaaccggtcctctctctgacggggtggcatttggccttgaacaaaaccaagtccactggggacagaggcaggggcaagtggctctccccattaccttctcaagacctcagtgggagcaccagccaatggtaccatcggctgggctgccaggtaccctgggcctggcgctgcagacctgagctggcttggacccatttgaggactgaactaggcaggcaatggctccagtgccctccctctgttccctggaccaccaccccacgtagctgctcacaccagcctccgggtgcctccctctgcttgtacagagcccatggtcgggacagtgccctggcctttgccggggaggaggatgctctgagattcagggtggggctggcaacccctgaagagaacacttcctgttggtctgtctcttcccaccttccatctgcacacacccccaaggtaagggtacagcccggctggcggcctccttgggaacgtgtaggccacggctctgccaccactaggtacctgctgagggcgctggctctgcagatcagaacaacggaggatagctttgtgcctggacccagagagtgtgggactccccgcttcatccccaccgtcccactccacagccttcccgaaacattccctggcaaacaaaggaacactaggagaaaaaatggaaaaacccttccagtaattaaaaaggaagaaaccacagaaagaaaactacagacctcaagattccactctgtgcccgcctctgccgggagggagggaggcacacaggtggagctgaccctcgtctttgtggcagcaaaaccaggatgcctggagctgtggcctgagggcctgctggggtcccactcacccacttaggtctagtcgctagatcccccgttttcccaagaagagggttcgagcccttggtggggacagctggggagatggcagtgcaggctggaacctgggctgccccagaacacagtccattacgatagaaacactaattgagcatgtgcgtggggtgggggtgtgtgtgcacatgtgagtgtgagtgtgtgtgggcgcttggtggggggttggggacagctggaaggtgccaggtgcacttggggttggggttggtgtgttgggtgttgaagtggaatcgtttcatcccagccatggaggccaccagcaggagtgttcatggggatgtgggcgaggtggggcactttgaaggaatggcggtctgctggtgccctcgaaggggcatccttcctggtcttcgctgacccagaggcgctgtgcctgcatatcatccaccaccaccctagcccagccttcccactgccccaggaaaagctcttctcctggccacctctgccccccagcacctcaaacttgcatggctgggctgtggcctctgcggccaggaagcctgacactaggcaccccccaggcgagagctagtggggtgcagagggccccatgccagacagcccttggggctcgttgcactttaagaaataggatctgtggtgtattccagggggcctgatggacacctttcccgggcgtctgcagctgccctgcccgtgcccgcctgcagtggttggagacgggagtggcccttcggctcccgagctccctctggggacggctggctcactgtctccagttctcaatggccaacgaaggtgcttggaaacacctaaccttgcaagttttaccgccttttgaggaacacaaatcggagaacaaacccagggttcaggcgtgttttctgtgaatgttggatgatgaatttttgtctcttctggtggagctgtgcctggccctgtaggcccagggttggctggaaggtgacatctgtgtttcgttttagctgaggttggcagaaacgttcccaaactcccccagccctggaccccagcagatgaggaaacggccccatttactgaccccgcccccttttcgaggttatgctcacctggtcagctcctcacgtaattgggggtggagggaaagcatggtggtgccctgggccgtccctgtgtgaacgcaggcaaaagcagcccagtccccctcactgcttgagctaacactgccacctcttttgtgtgagcacaaaagccacgtcccaagccacctggcccgattccacagatgtatgtgcggccagtgacttccccaggagtgtggagggggtggtgaggaggagcacctgggctctctacccctctcctcacagaagtacctgaaactaggtctggggcactcccaatgcagcgccttgtcagccaaggtgggcaggcagggactgtggcagcttatgtccaaagggagcccccatgcacaggaagccacagggttcctcttgtttcccccgctaacttcagcctctcatctgctgctccgggctgagggactagaggacatctcggtcgtttgaggggcatggccagtcgtggcaggccggccttcagcgtccggtcagggaagcgtgcagcccaaatgggcacttgcatgggagccacagaggagcgtccctggggattgttgggaccatgctgcccccactcccgcttttgttggggctctaagttctggaaggtgtgtgcacagagggtgctcatgggactcgcatgcagctctcagcactgggtgggagggcgttggcttgtccagaatggggacgtggggcagccacccctgcccagcgagagcgcagacaccgtgtgaggggacagcagcccttggtgcaaagccagagactgatcctggctctgacggctgaagagggaagacccaaggctgggtggcgtggctcgtgaatccacttagaattcttggcttgtgtcgcatactgggtgtcacggcacacatttactctgcattgtccccgtctttcccatcgcctagcgtttggggaggaacagggagagagcttcggggcgtctgtctccgtgctctcctgcctccaccgccttggttttgcttcctgctggaggcagggcacctgctgcgacccagattcttctgcaggatgtgtctgtctttgtcacggtggacagagggtgacatcataggagcagctcgctggccagaaggggatgggggcatccctgtgcctcactcagctcctgctgctcttagggaaaggaggcctgggtcaagccagcatccccttggtaaagacccccgcaggccaccaggcattctggacacgcacacacacacacacacacacacacacacacaaaacttcacagcaggccagctgcagtgacttgtcatcaagagtcacctcagctgcgcccccctcccatcctttcctatgagaagccactgctttgggggcgccggctagaaaaagtagggtgcggtggccaggagggcccctgccgcgcggggggctgggtctggttgagtcgctgctttcccgagggcagcgcagggatccggggaagctgcggcagggagcgggcgccggcttcgtggctctgaggtgtaacgggggtgggctccctccctcggaggacatcgtctgtgtccaggtcagaaagtggcccaggaagggggcagtttctgtcgcgggtccggtgggggcgcggccgcggtgcggtcggtgcagcgtggccaatgcgcggcgcgcgcgggggacagagcaggaggcggtctgtcacctcggccactgctgacctgggctggcctcccccagccctcccgtggcggagccggcagcgatgctacaggcctaagttattgtttgcataaaaagaatcatgttccctgtgtacatttaagaaaaaaacaaaaaaacggaaatgtcagaattgtatggaaataaaacttgtttgaaaatttggaatagtgctgctgccagcttatttttctggtacttgtattttcacatgttaaatgatctttatatatgttgaattaacaaatattttgagtttctgagaaaaaacaaaacatattaatggtattgaaatgtgttagtagtctggctgtgtgcccaaaattctgtttcgcagcaaaagtgaagacctgtatgtaaagaaagtataacaattatttctttgtattttaggggctttaaccggaacatcgtctagctggtgttaggaatgtttgcttaatttccagacttttttttaaaaacacatcgtgggttttttgaggctccaacctgattagtgcatggtcagccctcaatgaaggctgaggcatctctgactgaggtgtttttgtttggttttgttttttaaaatcatgtatttgctacaaagtattgtacttgtctcaatgggaatggtgtaaaaaacaaaaggccttatgtgatctgtatcatagttaataaatgaatcttgtaaaaaaccaaaaaaaaaaaaaaaaaa

SEQ ID NO: 146782 - DNA, 4542 bp, Artificial Sequence
  derived and/or modified sequence
atgatgatggccagaaagcaggacgtgagaatccccacctacaacatcagcgtggtgggcctgagcggcaccgagaaggagaagggccagtgcggcatcggcaagagctgcctgtgcaacagattcgtgagacccagcgccgacgagttccacctggaccacaccagcgtgctgagcaccagcgacttcggcggcagagtggtgaacaacgaccacttcctgtactggggcgaggtgagcagaagcctggaggactgcgtggagtgcaagatgcacatcgtggagcagaccgagttcatcgacgaccagaccttccagccccacagaagcaccgccctgcagccctacatcaagagagccgccgccaccaagctggccagcgccgagaagctgatgtacttctgcaccgaccagctgggcctggagcaggacttcgagcagaagcagatgcccgacggcaagctgctggtggacggcttcctgctgggcatcgacgtgagcagaggcatgaacagaaacttcgacgaccagctgaagttcgtgagcaacctgtacaaccagctggccaagaccaagaagcccatcgtggtggtgctgaccaagtgcgacgagggcgtggagagatacatcagagacgcccacaccttcgccctgagcaagaagaacctgcaggtggtggagaccagcgccagaagcaacgtgaacgtggacctggccttcagcaccctggtgcagctgatcgacaagagcagaggcaagaccaagatcatcccctacttcgaggccctgaagcagcagagccagcagatcgccaccgccaaggacaagtacgagtggctggtgagcagaatcgtgaagaaccacaacgagaactggctgagcgtgagcagaaagatgcaggccagccccgagtaccaggactacgtgtacctggagggcacccagaaggccaagaagctgttcctgcagcacatccacagactgaagcacgagcacatcgagagaagaagaaagctgtacctggccgccctgcccctggccttcgaggccctgatccccaacctggacgagatcgaccacctgagctgcatcaaggccaagaagctgctggagaccaagcccgagttcctgaagtggttcgtggtgctggaggagaccccctgggacgccaccagccacatcgacaacatggagaacgagagaatccccttcgacctgatggacaccgtgcccgccgagcagctgtacgaggcccacctggagaagctgagaaacgagagaaagagagtggagatgagaagagccttcaaggagaacctggagaccagccccttcatcacccccggcaagccctgggaggaggccagaagcttcatcatgaacgaggacttctaccagtggctggaggagagcgtgtacatggacatctacggcaagcaccagaagcagatcatcgacaaggccaaggaggagttccaggagctgctgctggagtacagcgagctgttctacgagctggagctggacgccaagcccagcaaggagaagatgggcgtgatccaggacgtgctgggcgaggagcagagattcaaggccctgcagaagctgcaggccgagagagacgccctgatcctgaagcacatccacttcgtgtaccaccccaccaaggagacctgccccagctgccccgcctgcgtggacgccaagatcgagcacctgatcagcagcagattcatcagacccagcgacagaaaccagaagaacagcctgagcgaccccaacatcgacagaatcaacctggtgatcctgggcaaggacggcctggccagagagctggccaacgagatcagagccctgtgcaccaacgacgacaagtacgtgatcgacggcaagatgtacgagctgagcctgagacccatcgagggcaacgtgagactgcccgtgaacagcttccagacccccaccttccagccccacggctgcctgtgcctgtacaacagcaaggagagcctgagctacgtggtggagagcatcgagaagagcagagagagcaccctgggcagaagagacaaccacctggtgcacctgcccctgaccctgatcctggtgaacaagagaggcgacaccagcggcgagaccctgcacagcctgatccagcagggccagcagatcgccagcaagctgcagtgcgtgttcctggaccccgccagcgccggcatcggctacggcagaaacatcaacgagaagcagatcagccaggtgctgaagggcctgctggacagcaagagaaacctgaacctggtgagcagcaccgccagcatcaaggacctggccgacgtggacctgagaatcgtgatgtgcctgatgtgcggcgaccccttcagcgccgacgacatcctgttccccgtgctgcagagccagacctgcaagagcagccactgcggcagcaacaacagcgtgctgctggagctgcccatcggcctgcacaagaagagaatcgagctgagcgtgctgagctaccacagcagcttcagcatcagaaagagcagactggtgcacggctacatcgtgttctacagcgccaagagaaaggccagcctggccatgctgagagccttcctgtgcgaggtgcaggacatcatccccatccagctggtggccctgaccgacggcgccgtggacgtgctggacaacgacctgagcagagagcagctgaccgagggcgaggagatcgcccaggagatcgacggcagattcaccagcatcccctgcagccagccccagcacaagctggagatcttccaccccttcttcaaggacgtggtggagaagaagaacatcatcgaggccacccacatgtacgacaacgccgccgaggcctgcagcaccaccgaggaggtgttcaacagccccagagccggcagccccctgtgcaacagcaacctgcaggacagcgaggaggacatcgagcccagctacagcctgttcagagaggacaccagcctgcccagcctgagcaaggaccacagcaagctgagcatggagctggagggcaacgacggcctgagcttcatcatgagcaacttcgagagcaagctgaacaacaaggtgcccccccccgtgaagcccaagccccccgtgcacttcgagatcaccaagggcgacctgagctacctggaccagggccacagagacggccagagaaagagcgtgagcagcagcccctggctgccccaggacggcttcgaccccagcgactacgccgagcccatggacgccgtggtgaagcccagaaacgaggaggagaacatctacagcgtgccccacgacagcacccagggcaagatcatcaccatcagaaacatcaacaaggcccagagcaacggcagcggcaacggcagcgacagcgagatggacaccagcagcctggagagaggcagaaaggtgagcatcgtgagcaagcccgtgctgtacagaaccagatgcaccagactgggcagattcgccagctacagaaccagcttcagcgtgggcagcgacgacgagctgggccccatcagaaagaaggaggaggaccaggccagccagggctacaagggcgacaacgccgtgatcccctacgagaccgacgaggaccccagaagaagaaacatcctgagaagcctgagaagaaacaccaagaagcccaagcccaagcccagacccagcatcaccaaggccacctgggagagcaactacttcggcgtgcccctgaccaccgtggtgacccccgagaagcccatccccatcttcatcgagagatgcatcgagtacatcgaggccaccggcctgagcaccgagggcatctacagagtgagcggcaacaagagcgagatggagagcctgcagagacagttcgaccaggaccacaacctggacctggccgagaaggacttcaccgtgaacaccgtggccggcgccatgaagagcttcttcagcgagctgcccgaccccctggtgccctacaacatgcagatcgacctggtggaggcccacaagatcaacgacagagagcagaagctgcacgccctgaaggaggtgctgaagaagttccccaaggagaaccacgaggtgttcaagtacgtgatcagccacctgaacaaggtgagccacaacaacaaggtgaacctgatgaccagcgagaacctgagcatctgcttctggcccaccctgatgagacccgacttcagcaccatggacgccctgaccgccaccagaacctaccagaccatcatcgagctgttcatccagcagtgccccttcttcttctacaacagacccatcaccgagccccccggcgccagacccagcagccccagcgccgtggccagcaccgtgcccttcctgaccagcacccccgtgaccagccagcccagccccccccagagccccccccccaccccccagagccccatgcagcccctgctgcccagccccctgcacccccacagacccaccccccagcccagcagaaacatcccctggcagaccaaggagcactag

SEQ ID NO: 146783 - DNA, 4500 bp, Artificial Sequence
  derived and/or modified sequence
atgatgatggccagaaagcaggacgtgagaatccccacctacaacatcagcgtggtgggcctgagcggcaccgagaaggagaagggccagtgcggcatcggcaagagctgcctgtgcaacagattcgtgagacccagcgccgacgagttccacctggaccacaccagcgtgctgagcaccagcgacttcggcggcagagtggtgaacaacgaccacttcctgtactggggcgaggtgagcagaagcctggaggactgcgtggagtgcaagatgcacatcgtggagcagaccgagttcatcgacgaccagaccttccagccccacagaagcaccgccctgcagccctacatcaagagagccgccgccaccaagctggccagcgccgagaagctgatgtacttctgcaccgaccagctgggcctggagcaggacttcgagcagaagcagatgcccgacggcaagctgctggtggacggcttcctgctgggcatcgacgtgagcagaggcatgaacagaaacttcgacgaccagctgaagttcgtgagcaacctgtacaaccagctggccaagaccaagaagcccatcgtggtggtgctgaccaagtgcgacgagggcgtggagagatacatcagagacgcccacaccttcgccctgagcaagaagaacctgcaggtggtggagaccagcgccagaagcaacgtgaacgtggacctggccttcagcaccctggtgcagctgatcgacaagagcagaggcaagaccaagatcatcccctacttcgaggccctgaagcagcagagccagcagatcgccaccgccaaggacaagtacgagtggctggtgagcagaatcgtgaagaaccacaacgagaactggctgagcgtgagcagaaagatgcaggccagccccgagtaccaggactacgtgtacctggagggcacccagaaggccaagaagctgttcctgcagcacatccacagactgaagcacgagcacatcgagagaagaagaaagctgtacctggccgccctgcccctggccttcgaggccctgatccccaacctggacgagatcgaccacctgagctgcatcaaggccaagaagctgctggagaccaagcccgagttcctgaagtggttcgtggtgctggaggagaccccctgggacgccaccagccacatcgacaacatggagaacgagagaatccccttcgacctgatggacaccgtgcccgccgagcagctgtacgaggcccacctggagaagctgagaaacgagagaaagagagtggagatgagaagagccttcaaggagaacctggagaccagccccttcatcacccccggcaagccctgggaggaggccagaagcttcatcatgaacgaggacttctaccagtggctggaggagagcgtgtacatggacatctacggcaagcaccagaagcagatcatcgacaaggccaaggaggagttccaggagctgctgctggagtacagcgagctgttctacgagctggagctggacgccaagcccagcaaggagaagatgggcgtgatccaggacgtgctgggcgaggagcagagattcaaggccctgcagaagctgcaggccgagagagacgccctgatcctgaagcacatccacttcgtgtaccaccccaccaaggagacctgccccagctgccccgcctgcgtggacgccaagatcgagcacctgatcagcagcagattcatcagacccagcgacagaaaccagaagaacagcctgagcgaccccaacatcgacagaatcaacctggtgatcctgggcaaggacggcctggccagagagctggccaacgagatcagagccctgtgcaccaacgacgacaagtacgtgatcgacggcaagatgtacgagctgagcctgagacccatcgagggcaacgtgagactgcccgtgaacagcttccagacccccaccttccagccccacggctgcctgtgcctgtacaacagcaaggagagcctgagctacgtggtggagagcatcgagaagagcagagagagcaccctgggcagaagagacaaccacctggtgcacctgcccctgaccctgatcctggtgaacaagagaggcgacaccagcggcgagaccctgcacagcctgatccagcagggccagcagatcgccagcaagctgcagtgcgtgttcctggaccccgccagcgccggcatcggctacggcagaaacatcaacgagaagcagatcagccaggtgctgaagggcctgctggacagcaagagaaacctgaacctggtgagcagcaccgccagcatcaaggacctggccgacgtggacctgagaatcgtgatgtgcctgatgtgcggcgaccccttcagcgccgacgacatcctgttccccgtgctgcagagccagacctgcaagagcagccactgcggcagcaacaacagcgtgctgctggagctgcccatcggcctgcacaagaagagaatcgagctgagcgtgctgagctaccacagcagcttcagcatcagaaagagcagactggtgcacggctacatcgtgttctacagcgccaagagaaaggccagcctggccatgctgagagccttcctgtgcgaggtgcaggacatcatccccatccagctggtggccctgaccgacggcgccgtggacgtgctggacaacgacctgagcagagagcagctgaccgagggcgaggagatcgcccaggagatcgacggcagattcaccagcatcccctgcagccagccccagcacaagctggagatcttccaccccttcttcaaggacgtggtggagaagaagaacatcatcgaggccacccacatgtacgacaacgccgccgaggcctgcagcaccaccgaggaggtgttcaacagccccagagccggcagccccctgtgcaacagcaacctgcaggacagcgaggaggacatcgagcccagctacagcctgttcagagaggacaccagcctgcccagcctgagcaaggaccacagcaagctgagcatggagctggagggcaacgacggcctgagcttcatcatgagcaacttcgagagcaagctgaacaacaaggtgcccccccccgtgaagcccaagccccccgtgcacttcgagatcaccaagggcgacctgagctacctggaccagggccacagagacggccagagaaagagcgtgagcagcagcccctggctgccccaggacggcttcgaccccagcgactacgccgagcccatggacgccgtggtgaagcccagaaacgaggaggagaacatctacagcgtgccccacgacagcacccagggcaagatcatcaccatcagaaacatcaacaaggcccagagcaacggcagcggcaacggcagcgacagcgagatggacaccagcagcctggagagaggcagaaaggtgagcatcgtgagcaagcccgtgctgtacagaaccagatgcaccagactgggcagattcgccagctacagaaccagcttcagcgtgggcagcgacgacgagctgggccccatcagaaagaaggaggaggaccaggccagccagggctacaagggcgacaacgccgtgatcccctacgagaccgacgaggaccccagaagaagaaacatcctgagaagcctgagaagaaacaccaagaagcccaagcccaagcccagacccagcatcaccaaggccacctgggagagcaactacttcggcgtgcccctgaccaccgtggtgacccccgagaagcccatccccatcttcatcgagagatgcatcgagtacatcgaggccaccggcctgagcaccgagggcatctacagagtgagcggcaacaagagcgagatggagagcctgcagagacagttcgaccaggaccacaacctggacctggccgagaaggacttcaccgtgaacaccgtggccggcgccatgaagagcttcttcagcgagctgcccgaccccctggtgccctacaacatgcagatcgacctggtggaggcccacaagatcaacgacagagagcagaagctgcacgccctgaaggaggtgctgaagaagttccccaaggagaaccacgaggtgttcaagtacgtgatcagccacctgaacaaggtgagccacaacaacaaggtgaacctgatgaccagcgagaacctgagcatctgcttctggcccaccctgatgagacccgacttcagcaccatggacgccctgaccgccaccagaacctaccagaccatcatcgagctgttcatccagcagtgccccttcttcttctacaacagacccatcaccgagccccccggcgccagacccagcagccccagcgccgtggccagcaccgtgcccttcctgaccagcacccccgtgaccagccagcccagccccccccagagccccccccccaccccccagagccccatgcagcccctgctgcccagccagctgcaggccgagcacaccctgtag

SEQ ID NO: 146784 - DNA, 4542 bp, Artificial Sequence
  derived and/or modified sequence
atgatgatggccagaaagcaggatgtgcgaattcccacatataatattagtgtagttgggctgagcggaaccgagaaagagaaaggccaatgtggcatcggtaagagttgcctatgtaaccgcttcgtgaggccctccgctgatgagttccatcttgaccatactagcgttctgtctacgtctgactttggaggtagagtggtcaacaatgaccacttcttgtattggggcgaggtatctagaagcttggaggactgtgtagaatgtaagatgcatatcgtagagcagacagaattcatcgatgaccaaacctttcaaccgcatcgctccaccgctctgcagccttacattaaaagggctgctgcgacgaaattagcgtccgccgagaagctcatgtacttctgcacagatcagctaggactggagcaagatttcgagcagaagcagatgcccgacggcaaactgctagtcgacggttttttgcttggcattgatgtctctcgcgggatgaaccggaacttcgacgaccagctgaaatttgtgtccaatctatataaccagcttgctaagactaaaaagccgattgtagtcgtgctgactaagtgtgatgaaggtgttgaacgttatatcagggatgctcacacctttgcattaagtaaaaaaaacctgcaggtcgtggaaacaagcgccagatctaatgtgaacgtggatctggctttttctaccttagtccaactgattgataaatcccggggcaaaactaaaatcataccctatttcgaagccctgaaacagcagtcccaacagattgctaccgctaaagataaatacgaatggctggtgtcaagaattgtgaaaaatcataatgagaattggttaagcgtgagcagaaaaatgcaggcaagcccagaatatcaggattacgtttacctggagggcacccagaaagctaagaagttgtttttgcagcatatccaccgcctgaagcatgaacacattgagcggcggaggaaactctacttagcagcgctgcccctggcttttgaagccctcatccctaacctcgatgagattgatcacctgagctgcattaaagcaaaaaagctgctggagaccaaacccgaatttctgaaatggttcgtcgtacttgaggagaccccgtgggacgctacgagtcacatcgataacatggaaaatgaacgcatcccattcgatctcatggataccgtgcctgcggagcaactgtacgaagctcatttagaaaaattgcggaacgagagaaaaagggttgagatgaggcgggcctttaaggagaatctcgagacttcgccgttcattactcctggtaagccgtgggaggaagctagatcctttatcatgaacgaggatttttatcagtggcttgaagagtcagtctatatggatatctacggcaagcaccagaagcagatcatcgataaggctaaggaggagtttcaggagctcctactcgaatacagtgaactgttctatgaattggagctggacgcaaagccttccaaggaaaagatgggcgtcatacaggatgttctgggggaggaacagcggtttaaagcactccaaaaacttcaggcagaacgagatgccttaatcttaaagcacatccatttcgtgtaccaccctacaaaggaaacgtgtccaagctgccctgcatgcgtggatgctaaaatagaacatctcataagttctagatttatccgcccgagcgatcgtaaccaaaaaaatagtctcagtgaccccaacatcgacaggattaatcttgtcatcctcggtaaggacgggttggccagagagctggcaaacgaaatccgtgctctctgtaccaacgatgataagtacgtcattgacggaaagatgtacgagctgtctcttcgccccattgagggcaacgtccggctgcccgtcaattccttccagaccccaacgttccagcctcacggatgtctttgtctgtataattccaaagagtcactatcatatgtggttgaaagcatcgagaaaagccgcgaaagtacccttggccggcgcgacaaccacctggtccacttgccactgacattgatcctggtaaataaaagaggagatacatcaggggagaccctgcattccctgatacagcagggtcagcaaattgccagtaagttgcagtgtgtgtttctggaccctgcctccgctgggatcggctatggccggaacattaacgagaagcagattagccaggtcttgaaaggcctcctggactctaaaagaaatctgaacctcgttagctcaaccgcaagtatcaaagacctcgcagacgtagatctgcggattgtcatgtgtctgatgtgcggggatcccttttccgccgatgatatcctatttcccgtgctgcagtctcagacctgcaagagtagtcattgtggcagcaataactcagttctgctggaattgccaatcgggctgcacaaaaagcgtattgagttgtcagtgttgagctatcactcgtctttcagcattcgtaaaagccggctggtccatggttatatcgtgttctatagtgccaaacgaaaggcaagtctcgcaatgttgcgcgccttcctgtgtgaagttcaagacattatccctatacagcttgtcgctctcacagatggcgctgtagacgtgctggacaacgatctatctagggaacaactgacggagggcgaagagatcgcccaagagatcgacgggcggttcacgagcatcccgtgttcccagcctcaacacaaactggaaatctttcatccattttttaaggacgtcgttgagaagaagaatattatcgaagccactcatatgtatgataacgcagcagaagcttgcagcactaccgaagaagtattcaattctccaagggctggcagccccttatgcaattcaaatttacaggatagcgaggaggacatcgagccttcttattccctgttcagagaggacaccagcctgccatcactgtctaaagatcattccaagctcagcatggagctcgagggaaacgatggcttgagttttatcatgagtaactttgaaagtaagctaaataacaaagttcctcctcctgttaaaccgaagccgcccgtccacttcgagatcactaagggcgatctgtcttacctcgaccagggtcatagggatggccagcgaaaatccgtatccagctcgccgtggttgccccaggatggcttcgacccctccgactacgctgagcctatggacgcagttgtgaaaccaaggaatgaggaggagaatatttattcagtgcctcatgattcaacacagggaaagatcatcacgatccgcaatattaataaagcgcaatccaatggcagcggcaatgggtccgatagcgagatggacacttccagcctggagcgaggtcggaaggtatcgatagtgtctaaacccgtgctgtacaggacgagatgtacacgccttggcagatttgcatcttatcggacttctttcagcgtggggtctgacgacgagctcggacccatccgcaaaaaagaggaagatcaggcatcccagggatacaaaggcgacaatgcagtcatcccatacgagactgacgaggatcccagacgcaggaacatccttaggtctctgagacgtaataccaaaaagccaaaacccaagcccaggccttccatcaccaaggccacttgggaatccaattacttcggtgtaccactgaccacagtagtgacaccagagaaacctattccgatattcatcgaaaggtgcatcgaatacatcgaggccactggattgtctactgagggaatctacagagtgagtggcaataaaagcgagatggagtcccttcagcggcagttcgatcaagaccacaacctggacctggctgagaaggattttactgtaaacaccgtggctggagcgatgaaatcattcttctccgagttgcctgaccccctggtgccatataatatgcagattgacttagtcgaagctcacaaaataaatgatcgtgagcaaaaactccacgcattgaaggaagtgctgaaaaaattccccaaggaaaaccacgaggttttcaaatacgtaatcagtcatcttaacaaggtttcccacaacaataaagtaaatctgatgacttctgagaacctttctatatgcttctggccaaccctaatgagaccggacttcagtaccatggatgcccttactgctacgaggacctatcagaccatcattgaattattcatccaacagtgtcctttctttttttacaacagacccatcaccgaacctcccggtgctcgcccgtcctctccatcagcagttgcttctactgtccctttcctcacgtcgacccctgtgacatcacagccgtctcccccccagtctccgcctcccacaccacaaagccctatgcagccactgcttcccagtcccctgcacccacatagacccacgccacagccctccaggaatatcccttggcaaacaaaagagcactag

SEQ ID NO: 146785 - DNA, 4500 bp, Artificial Sequence
  derived and/or modified sequence
atgatgatggcgcgaaaacaagatgtgagaatcccaacatacaatatatcggtggtgggcctgagtggcaccgagaaggaaaaaggacaatgtgggatcggtaagtcctgcctctgtaacagatttgtccggccttccgccgatgagtttcacctagatcacacttcagtcctctccacaagcgatttcggaggccgggtcgtgaataacgatcactttctctattggggtgaggtcagcagatccctggaagactgtgtggaatgcaagatgcacattgttgagcagacagagttcatcgatgaccaaacattccagccacaccggtcaactgcacttcagccatacattaaacgggctgctgcaacaaagctggcctcagctgagaagttgatgtatttctgcaccgaccagctaggactggagcaggattttgaacagaagcagatgcctgatggaaaacttctcgtcgacggcttcctgttggggatcgacgtaagtagggggatgaaccgcaatttcgacgaccagctgaaattcgtgtctaatttgtacaaccagctggctaagaccaagaagccaattgtggtggtgttaacaaagtgtgatgagggggtggagaggtacatccgagatgcccacacatttgctctgagcaagaaaaatctgcaggtcgttgaaacttctgcccgctctaacgtgaatgtcgacctcgcgttcagcacactggttcagcttatcgacaaaagccgtggtaagacaaagatcatcccctatttcgaggcccttaagcagcaatcacagcagattgccacagctaaagacaagtatgagtggctggtttctaggattgtgaagaaccataacgagaattggctatctgtgtcccggaagatgcaggcttcccctgagtatcaggattatgtttatcttgaaggtacacagaaggcgaaaaagttgtttctgcagcatatacatagactgaaacatgagcatattgaaaggagacgcaagttatacctcgccgccctgccactcgcttttgaggctttgatccctaatcttgacgaaatcgaccatttgtcatgtatcaaagccaagaaactcctagaaaccaaaccagagtttttgaagtggttcgtcgtgctggaggagaccccatgggatgctaccagccatattgacaacatggagaatgaacggataccatttgatctgatggatacagtgccggctgaacagctttacgaagcgcacctggaaaaactccggaatgagcggaagcgcgtggaaatgagacgcgcatttaaggagaatctagagacaagcccgttcataacgcctggaaaaccatgggaggaagcgagaagctttataatgaacgaggacttttaccaatggttggaagagagcgtctatatggacatttacggtaagcaccagaagcagataatagacaaagcaaaggaggagttccaggaactcctgctggaatacagcgagctgttttatgaactggagctcgatgccaagccttccaaggagaagatgggcgtgatacaagacgttctgggagaggagcagaggtttaaagcccttcagaagttgcaggccgagcgcgacgcccttatcctcaaacacattcacttcgtatatcatcctacaaaagaaacttgtccatcttgtcccgcatgcgtggacgcaaagatcgaacatttaatttcatctcggtttataagacctagtgaccgcaatcagaaaaattcactgagtgatcctaacattgacaggattaaccttgttattcttggtaaagacggactggctcgggaactcgcaaatgaaatccgtgctttatgtactaatgacgataagtacgtcatcgatggaaaaatgtatgagctgagcctacgccctatcgagggcaacgtgagactgcccgtgaacagctttcagacgcccacatttcagcctcatgggtgcctttgcctgtacaactctaaggagagtctttcctacgtggtcgaaagcatcgaaaagtcacgtgagtcaacacttggaagacgggacaatcatctagttcatctgccgctgaccctgatcttagtaaacaaaagaggcgacacctctggagagactctccattccttgatccagcaaggccagcaaattgcaagcaagctgcaatgcgtgtttctagatcccgcaagcgctggtatcggatacggtcgcaacatcaatgagaagcagataagccaggtcctcaagggcctgctggactccaagagaaacctaaatctggtgtcttctactgcgagtataaaagacctcgccgatgtagacctgaggatagttatgtgtcttatgtgtggcgatcctttctcagccgatgatattctgttccctgtcctccagtcacagacttgcaagtcatcacattgcgggtcgaataacagtgtgctgttagagctccctataggtcttcacaagaagcgcatcgaactcagcgtgctgtcgtatcatagtagcttctctattagaaagtcgagactggtccatgggtacattgtgttctacagcgcgaaacggaaggcctctctggcaatgctgagggcctttctttgcgaggtgcaggatataattcctatacagttagtggcccttactgacggggccgtcgatgtgctcgacaacgatctgtcacgagagcagctgactgaaggcgaagagatcgcacaggagatagatggcagattcacatccatcccttgtagtcaacctcaacacaagcttgaaatcttccatcccttctttaaggacgttgttgaaaagaaaaatataatcgaggccactcacatgtatgacaatgccgccgaagcctgttccactaccgaagaggtcttcaactctcctcgagccggtagcccgttgtgcaacagcaatctgcaagattccgaggaggacatcgagccatcgtattccctgtttcgggaagatacctccctcccaagcttgagtaaagaccacagtaaactctctatggaattggagggcaacgacggtttatcgttcatcatgagcaattttgagtctaagctgaataataaggtaccccctccggtgaagccaaagcctcctgtgcacttcgaaattactaagggtgacctatcctacctggatcagggacacagagacggtcagcggaaaagcgtaagctctagtccatggctgccacaggatggtttcgatccctccgattatgccgagccaatggacgcggtggtcaagcctcgaaacgaggaagaaaatatttactcagtgccccatgattcaactcaaggaaaaattatcactattagaaacataaacaaggctcagtctaacggttctggaaacggctccgattcggagatggatactagctcactggaaagaggccggaaagtgtccatcgtgagcaaaccagtgctgtacaggacccgctgtactagactgggtcgttttgcgtcgtataggacctcattcagtgtgggctcagatgacgagttgggtcctataagaaagaaggaggaggaccaggcctcccaggggtataaaggggacaatgctgtcattccttatgagacggacgaagatccccgacgacgcaacatcctgagatccctcaggagaaatactaagaaacccaagccgaagcccagaccctcaatcactaaggccacctgggaaagtaattatttcggcgtgccgttgacgactgtggtaacgcctgagaaaccaatccccatattcatagaacgatgcatcgaatacatcgaggcgacggggctgtcaactgagggaatttatcgggttagcggaaacaaaagtgagatggagagtctgcagcggcaatttgatcaagaccacaacctcgacctcgcagagaaagacttcactgtgaatacagtcgccggagcaatgaagtctttcttctccgaattaccagatcctctggtgccatataacatgcagattgatctcgtggaggctcacaagattaacgatagagaacagaaactgcacgccctaaaggaggtgctcaagaagttccctaaggagaatcatgaggtgtttaagtatgtaatttcccacctaaacaaggtgtcacacaacaacaaagtgaaccttatgaccagtgagaatctgtctatctgcttttggcctactcttatgagaccagatttttcaaccatggacgcgctaaccgcgacacgcacctatcagacaatcatcgagctctttatacagcagtgccccttcttcttttacaaccgccccatcacagaaccgccaggcgctcgcccctcttccccatctgcagtcgcctcaacagtcccttttctcaccagtactccggtaacctctcagccttctcccccccagtctccacctccaactcctcaatccccaatgcagcccctgttgccaagccagctccaagccgagcacacactctag

SEQ ID NO: 146786 - DNA, 4542 bp, Artificial Sequence
  derived and/or modified sequence
atgatgatggccaggaagcaggatgtgcgcatccccacctacaacatctctgtggtgggcctgagcggcacagagaaggagaagggccagtgtggcatcggcaagagctgcctgtgcaacagatttgtgcggcccagcgcagatgagttccacctggaccacacctctgtgctgagcaccagtgactttggaggccgggtggtgaacaatgaccacttcctgtactggggcgaggtgagccgcagcctggaggactgtgtggagtgcaagatgcacatcgtggagcagacagagttcattgatgaccagaccttccagccccacaggagcacagccctgcagccctacatcaagagagctgctgccaccaagctggccagcgctgagaagctgatgtacttctgcacagaccagctgggcctggagcaggactttgagcagaagcagatgccagatggcaagctgctggtggatggcttcctgctgggcattgatgtgtcccggggcatgaacagaaactttgatgaccagctgaagtttgtgagcaacctgtacaaccagctggccaagaccaagaagcccatcgtggtggtgctgaccaagtgtgatgaaggagtggagcgctacatcagagatgcccacacctttgccctgagcaagaagaacctgcaggtggtggagaccagcgcccggagcaatgtgaatgtggacctggccttcagcaccctggtgcagctgattgacaagagccggggcaagaccaagatcatcccctactttgaggccctgaagcagcagagccagcagatcgccacagccaaggacaagtatgagtggctggtgagccgcatcgtgaagaaccacaatgaaaactggctgtctgtgtccaggaagatgcaggccagccctgagtaccaggactatgtgtacctggagggcacccagaaggccaagaagctgttcctgcagcacatccaccggctgaagcatgagcacattgaaagaagaaggaagctgtacctggccgccctgcccctggcctttgaggccctgatccccaacctggatgaaattgaccacctgagctgcatcaaggccaagaagctgctggagaccaagccagagttcctgaagtggtttgtggtgctggaggagaccccctgggatgccaccagccacatcgacaacatggagaatgaaagaatcccctttgacctgatggacacagtgcctgctgagcagctgtatgaggcccacctggagaagctgagaaatgaaaggaagagggtggagatgagaagagccttcaaggagaacctggagaccagccccttcatcacccctgggaagccctgggaggaggcccgctccttcatcatgaatgaagacttctaccagtggctggaggagagcgtgtacatggacatctacggcaagcaccagaagcagatcatcgacaaggccaaggaggagttccaggagctgctgctggagtacagcgagctgttctatgagctggagctggatgccaagcccagcaaggagaagatgggcgtcatccaggatgtgctgggggaggagcagcgcttcaaggccctgcagaagctgcaggccgagagagatgccctgatcctgaagcacatccactttgtgtaccaccccaccaaggagacctgccccagctgcccagcctgtgtggatgccaagattgagcacctgatcagcagccgcttcatccggcccagcgacaggaaccagaagaacagcctgagtgaccccaacatcgaccgcatcaacctggtgatcctgggcaaggatggcctggcccgggagctggccaatgagatccgggccctgtgcaccaatgatgacaagtatgtgattgatggcaagatgtatgagctgagcctgcggcccatcgagggcaatgtgcggctgcctgtgaacagcttccagacccccaccttccagccccacggctgcctgtgcctgtacaacagcaaggagagcctgtcctatgtggtggagagcattgagaagagccgggagagcaccctgggccggcgggacaaccacctggtgcacctgcccctgaccctcatcctggtgaacaagagaggagacaccagcggggagaccctgcacagcctcatccagcagggccagcagatcgccagcaagctgcagtgtgtgttcctggaccctgccagcgctggcatcggctacggcaggaacatcaatgagaagcagatcagccaggtgctgaagggcctgctggacagcaagaggaacctgaacctggtgagcagcacagccagcatcaaggacctggctgatgtggacctgcgcatcgtgatgtgcctgatgtgtggggaccccttcagcgcagatgacatcctcttccctgtgctgcagagccagacctgcaagagcagccactgcggcagcaacaacagcgtgctgctggagctgcccatcggcctgcacaagaagagaattgagctgtctgtgctgagctaccacagcagcttcagcatcaggaagagccggctggtgcacggctacatcgtgttctacagcgccaagaggaaggccagcctggccatgctgcgggccttcctgtgtgaggtgcaggacatcatccccatccagctggtggccctgacagatggagctgtggatgtgctggacaatgacctgagccgggagcagctgacagaaggagaggagatcgcccaggagattgatggccgcttcaccagcatcccctgcagccagccccagcacaagctggagatcttccaccccttcttcaaggatgtggtggagaagaagaacatcatcgaggccacccacatgtatgacaatgctgctgaggcctgcagcaccacagaggaggtgttcaacagccccagggctggcagccccctgtgcaacagcaacctgcaggacagtgaagaagatattgagcccagctacagcctcttccgggaggacaccagcctgcccagcctgagcaaggaccacagcaagctgtccatggagctggagggcaatgatggcctgtccttcatcatgagcaactttgagagcaagctgaacaacaaggtgcccccacctgtgaagcccaagccccctgtgcactttgagatcaccaagggggacctgagctacctggaccagggccacagagatggccagaggaagtctgtgagcagcagcccctggctgccccaggacggctttgaccccagcgactatgcagagcccatggatgctgtggtgaagcccagaaatgaggaggagaacatctacagcgtgccccatgacagcacccagggcaagatcatcaccatccggaacatcaacaaggcccagagcaatggcagcggaaatggaagtgacagcgagatggacaccagcagcctggagcggggcaggaaggtgtccatcgtgtccaagcctgtgctgtaccgcacccgctgcacccggctgggccgctttgccagctaccgcaccagcttctctgtgggcagtgatgatgagctgggccccatcaggaagaaggaggaggaccaggccagccagggctacaagggggacaatgctgtgatcccctatgaaacagatgaggaccccaggagaagaaacatcctgcggagcctgcggaggaacaccaagaagcccaagcccaagccccggcccagcatcaccaaggccacctgggagagcaactactttggagtgcccctgaccaccgtggtgaccccagagaagcccatccccatcttcatcgagcgctgcatcgagtacatcgaggccaccggcctgagcacagagggcatctacagagtgtctggcaacaagtctgagatggagagcctgcagaggcagtttgaccaggaccacaacctggacctggccgagaaggacttcaccgtgaacacagtggccggggccatgaagagcttcttcagcgagctgcctgaccccctggtgccctacaacatgcagattgacctggtggaggcccacaagatcaatgaccgggagcagaagctgcacgccctgaaggaggtgctgaagaagttccccaaggaaaatcatgaggtgttcaagtatgtgatcagccacctgaacaaggtgagccacaacaacaaggtgaacctgatgaccagcgagaacctgagcatctgcttctggcccaccctgatgaggccagacttcagcaccatggatgccctgacagccaccaggacctaccagaccatcatcgagctgttcatccagcagtgccccttcttcttctacaaccggcccatcacagagcccccaggggcccggcccagcagccccagcgctgtggccagcacagtgcccttcctgaccagcacccctgtgaccagccagcccagccccccccagagccccccacccaccccccagagccccatgcagcccctgctgcccagccccctgcacccccaccggcccaccccccagcccagcaggaacatcccctggcagaccaaggagcactag

SEQ ID NO: 146787 - DNA, 4500 bp, Artificial Sequence
  derived and/or modified sequence
atgatgatggccaggaagcaggatgtgcgcatccccacctacaacatctctgtggtgggcctgagcggcacagagaaggagaagggccagtgtggcatcggcaagagctgcctgtgcaacagatttgtgcggcccagcgcagatgagttccacctggaccacacctctgtgctgagcaccagtgactttggaggccgggtggtgaacaatgaccacttcctgtactggggcgaggtgagccgcagcctggaggactgtgtggagtgcaagatgcacatcgtggagcagacagagttcattgatgaccagaccttccagccccacaggagcacagccctgcagccctacatcaagagagctgctgccaccaagctggccagcgctgagaagctgatgtacttctgcacagaccagctgggcctggagcaggactttgagcagaagcagatgccagatggcaagctgctggtggatggcttcctgctgggcattgatgtgtcccggggcatgaacagaaactttgatgaccagctgaagtttgtgagcaacctgtacaaccagctggccaagaccaagaagcccatcgtggtggtgctgaccaagtgtgatgaaggagtggagcgctacatcagagatgcccacacctttgccctgagcaagaagaacctgcaggtggtggagaccagcgcccggagcaatgtgaatgtggacctggccttcagcaccctggtgcagctgattgacaagagccggggcaagaccaagatcatcccctactttgaggccctgaagcagcagagccagcagatcgccacagccaaggacaagtatgagtggctggtgagccgcatcgtgaagaaccacaatgaaaactggctgtctgtgtccaggaagatgcaggccagccctgagtaccaggactatgtgtacctggagggcacccagaaggccaagaagctgttcctgcagcacatccaccggctgaagcatgagcacattgaaagaagaaggaagctgtacctggccgccctgcccctggcctttgaggccctgatccccaacctggatgaaattgaccacctgagctgcatcaaggccaagaagctgctggagaccaagccagagttcctgaagtggtttgtggtgctggaggagaccccctgggatgccaccagccacatcgacaacatggagaatgaaagaatcccctttgacctgatggacacagtgcctgctgagcagctgtatgaggcccacctggagaagctgagaaatgaaaggaagagggtggagatgagaagagccttcaaggagaacctggagaccagccccttcatcacccctgggaagccctgggaggaggcccgctccttcatcatgaatgaagacttctaccagtggctggaggagagcgtgtacatggacatctacggcaagcaccagaagcagatcatcgacaaggccaaggaggagttccaggagctgctgctggagtacagcgagctgttctatgagctggagctggatgccaagcccagcaaggagaagatgggcgtcatccaggatgtgctgggggaggagcagcgcttcaaggccctgcagaagctgcaggccgagagagatgccctgatcctgaagcacatccactttgtgtaccaccccaccaaggagacctgccccagctgcccagcctgtgtggatgccaagattgagcacctgatcagcagccgcttcatccggcccagcgacaggaaccagaagaacagcctgagtgaccccaacatcgaccgcatcaacctggtgatcctgggcaaggatggcctggcccgggagctggccaatgagatccgggccctgtgcaccaatgatgacaagtatgtgattgatggcaagatgtatgagctgagcctgcggcccatcgagggcaatgtgcggctgcctgtgaacagcttccagacccccaccttccagccccacggctgcctgtgcctgtacaacagcaaggagagcctgtcctatgtggtggagagcattgagaagagccgggagagcaccctgggccggcgggacaaccacctggtgcacctgcccctgaccctcatcctggtgaacaagagaggagacaccagcggggagaccctgcacagcctcatccagcagggccagcagatcgccagcaagctgcagtgtgtgttcctggaccctgccagcgctggcatcggctacggcaggaacatcaatgagaagcagatcagccaggtgctgaagggcctgctggacagcaagaggaacctgaacctggtgagcagcacagccagcatcaaggacctggctgatgtggacctgcgcatcgtgatgtgcctgatgtgtggggaccccttcagcgcagatgacatcctcttccctgtgctgcagagccagacctgcaagagcagccactgcggcagcaacaacagcgtgctgctggagctgcccatcggcctgcacaagaagagaattgagctgtctgtgctgagctaccacagcagcttcagcatcaggaagagccggctggtgcacggctacatcgtgttctacagcgccaagaggaaggccagcctggccatgctgcgggccttcctgtgtgaggtgcaggacatcatccccatccagctggtggccctgacagatggagctgtggatgtgctggacaatgacctgagccgggagcagctgacagaaggagaggagatcgcccaggagattgatggccgcttcaccagcatcccctgcagccagccccagcacaagctggagatcttccaccccttcttcaaggatgtggtggagaagaagaacatcatcgaggccacccacatgtatgacaatgctgctgaggcctgcagcaccacagaggaggtgttcaacagccccagggctggcagccccctgtgcaacagcaacctgcaggacagtgaagaagatattgagcccagctacagcctcttccgggaggacaccagcctgcccagcctgagcaaggaccacagcaagctgtccatggagctggagggcaatgatggcctgtccttcatcatgagcaactttgagagcaagctgaacaacaaggtgcccccacctgtgaagcccaagccccctgtgcactttgagatcaccaagggggacctgagctacctggaccagggccacagagatggccagaggaagtctgtgagcagcagcccctggctgccccaggacggctttgaccccagcgactatgcagagcccatggatgctgtggtgaagcccagaaatgaggaggagaacatctacagcgtgccccatgacagcacccagggcaagatcatcaccatccggaacatcaacaaggcccagagcaatggcagcggaaatggaagtgacagcgagatggacaccagcagcctggagcggggcaggaaggtgtccatcgtgtccaagcctgtgctgtaccgcacccgctgcacccggctgggccgctttgccagctaccgcaccagcttctctgtgggcagtgatgatgagctgggccccatcaggaagaaggaggaggaccaggccagccagggctacaagggggacaatgctgtgatcccctatgaaacagatgaggaccccaggagaagaaacatcctgcggagcctgcggaggaacaccaagaagcccaagcccaagccccggcccagcatcaccaaggccacctgggagagcaactactttggagtgcccctgaccaccgtggtgaccccagagaagcccatccccatcttcatcgagcgctgcatcgagtacatcgaggccaccggcctgagcacagagggcatctacagagtgtctggcaacaagtctgagatggagagcctgcagaggcagtttgaccaggaccacaacctggacctggccgagaaggacttcaccgtgaacacagtggccggggccatgaagagcttcttcagcgagctgcctgaccccctggtgccctacaacatgcagattgacctggtggaggcccacaagatcaatgaccgggagcagaagctgcacgccctgaaggaggtgctgaagaagttccccaaggaaaatcatgaggtgttcaagtatgtgatcagccacctgaacaaggtgagccacaacaacaaggtgaacctgatgaccagcgagaacctgagcatctgcttctggcccaccctgatgaggccagacttcagcaccatggatgccctgacagccaccaggacctaccagaccatcatcgagctgttcatccagcagtgccccttcttcttctacaaccggcccatcacagagcccccaggggcccggcccagcagccccagcgctgtggccagcacagtgcccttcctgaccagcacccctgtgaccagccagcccagccccccccagagccccccacccaccccccagagccccatgcagcccctgctgcccagccagctgcaggccgagcacaccctgtag

SEQ ID NO: 146788 - DNA, 4542 bp, Artificial Sequence
  derived and/or modified sequence
atgatgatggcccggaagcaggacgtgcggatccccacctacaacatttcggtcgttggtctctccgggacagagaaagagaagggccagtgtggaatcggaaaatcctgcctgtgcaataggtttgttcgcccttctgctgatgaatttcatctggatcatactagtgtactttccaccagtgatttcggcggtcgagtcgtgaacaacgaccactttctttattggggtgaagtgtctagatctctggaggattgcgtggagtgcaaaatgcacatcgtggagcagaccgaatttatcgacgatcagacttttcagccccaccgcagtacagccctgcaaccttacatcaagagagccgccgctaccaagctggcttccgccgagaagctcatgtacttttgtacagaccagctcggcctcgagcaggacttcgagcagaaacagatgcccgatggcaaactacttgtcgacggcttcctgctaggcattgacgtgtcccggggaatgaatcgaaattttgatgatcaacttaagtttgtatcaaacctgtataaccagctcgcaaaaaccaagaagccgattgtcgtcgtgctgacgaagtgcgatgaaggtgtagaacgatatatcagggacgcacataccttcgccctgtccaaaaaaaatttgcaggtggtcgagacttctgctcgatcgaacgtcaatgtcgacctggctttttctaccctggtacagttaatagacaagagccgcggaaagactaagattattccatatttcgaagccctcaaacagcagtcccagcagatcgcaactgcaaaggacaagtatgaatggcttgtgagcagaatcgttaagaaccataatgagaattggttatctgtttccagaaaaatgcaagcatctcccgagtaccaggattatgtgtacctcgaggggacgcagaaggccaaaaagctatttcttcaacatatacatcgactaaaacacgaacatatcgaacggcgaagaaaactttacttggcagccttaccactggcctttgaagcattaattccaaacctggatgaaatcgaccatcttagctgtattaaggctaagaaactgttggagaccaagccagaattcctgaagtggttcgtagtgctggaagagacaccatgggatgctacatcacacattgataacatggaaaatgaacgtattccgttcgatctgatggacacagtacccgcagaacagctctacgaagcccacttagagaaactccgcaacgaacgaaagcgcgtggagatgcggcgggcctttaaggagaatctggagacatccccatttattacacctggaaaaccctgggaagaagcgcggtcatttataatgaatgaagatttttaccaatggctcgaggagtccgtatacatggatatttacggcaagcatcagaagcaaattatcgacaaagctaaggaggaatttcaggagctcctgctcgagtactcagaactgttctatgagctggaactggacgctaaaccctcaaaagaaaagatgggggtgattcaggatgtcctcggcgaagagcagagattcaaagctcttcagaagttgcaggcagaaagagacgcgctgattcttaagcatatccacttcgtctatcaccccacaaaggagacgtgcccctcctgccctgcttgcgtggacgccaagattgaacatcttatctccagtcggttcattaggccaagtgaccgaaatcagaagaatagtctctccgacccgaacattgacagaattaatctcgttatcttgggtaaagacggtctcgctcgggagctggctaatgaaatacgcgccctatgtactaatgatgataagtatgtcatagatggtaagatgtacgagctgagcttgcgacccatcgaaggcaacgtgcgactcccagtgaattcctttcagactcccacctttcagccacacggttgtctctgtctctataattctaaagagtcactgagttacgtcgtggaatctattgagaagagccgtgagtcaactcttggtaggcgggacaatcatctggtccacctgcctctcaccttaattctcgttaataagaggggtgacacctctggtgagactctgcacagtctgattcagcaagggcaacagatcgctagcaagctgcagtgcgttttccttgaccctgcctctgcaggcattgggtacggcagaaatattaacgagaaacagatttctcaggtgctcaagggcctactcgattctaaacgcaacttgaacttggtgtcctctactgcaagtatcaaggatttagctgatgttgatctgcgtatcgtgatgtgtctcatgtgtggggaccccttttcggctgacgatattctgtttccagtcttgcagagccagacttgcaagtcttctcactgcggcagcaacaacagcgtgttacttgagttgcctatcggacttcacaagaaaagaattgagctgtcagtcttgtcataccattcttcattttctattcgcaagagcagacttgtgcacggctacatcgttttttactcggctaagaggaaagcttcgctagcgatgcttagggcctttctctgcgaagtccaggatatcatcccaattcaactggtcgcactgacagacggcgcagtggacgttcttgacaacgatctgtctcgagagcaactcacggaaggcgaagaaatcgctcaagaaattgatggtcgctttaccagcatcccgtgctcccagccgcaacataaactggaaatttttcaccctttttttaaggatgtggtagagaagaaaaacatcatcgaggctacacatatgtacgataatgccgcagaagcctgctcaaccacggaggaggtgttcaattccccacgtgcagggagcccactgtgtaactcaaacttgcaggacagcgaggaggatatcgagccttcttatagtctattcagggaggacacgtcactaccatccctttcaaaagatcacagtaaactgagtatggagctggaaggcaatgacggcttatcttttatcatgagtaattttgaatctaagctaaacaacaaagtgccaccccccgtgaagcctaagcctccagttcactttgagattaccaaaggtgaccttagctatctggatcagggacatcgagatgggcagcgaaagtcggtgtcctctagcccctggcttccacaagatggcttcgatccgtccgactatgcggaacccatggatgctgtggttaaaccccgaaacgaggaagagaacatttatagtgtgcctcatgacagcacccagggaaaaatcataacaatccggaacatcaacaaggcccagtcgaacgggagtggaaatggaagcgactccgaaatggatacaagttccttagagcggggacgcaaggtaagtatcgtgtcgaaaccagtgctctaccgaactcggtgcacaaggttgggccggtttgcttcttaccggacgtccttttctgtggggagcgatgacgagcttgggcctatacgaaaaaaggaggaagaccaagcatcccagggttacaagggtgataatgccgttattccctatgaaacagacgaggaccccaggagacgaaacattctgaggtcactgagacgaaatactaagaaacctaaacccaagcctcgcccatctattacaaaggctacgtgggagagcaactacttcggcgtgccgctaactaccgtagtaacgccagaaaagccaatcccaatctttatcgagcggtgtatcgagtatattgaagctacgggactttctaccgagggtatctatagagtgagtggaaataagagcgaaatggagagtctccagaggcagtttgaccaggatcacaaccttgacttagcggaaaaggacttcaccgttaatacggtcgccggagccatgaagtccttcttctctgagttaccagaccctcttgtgccctacaacatgcaaattgacctagttgaggctcataaaattaatgacagggaacagaagctgcacgctctgaaagaagttctgaagaagttccccaaggagaatcatgaggtattcaagtatgtgattagccacttgaataaagtcagtcataacaacaaggtgaacctgatgacttccgaaaatctctccatctgtttttggcccaccctaatgagaccggacttctctactatggacgcccttacggccacacgcacttaccagaccataatcgagctgttcattcagcagtgccctttcttcttctacaaccgccctataaccgagcctcccggagcaagaccaagctcacctagcgcagtcgcttccaccgtaccttttctgacatccacccctgtgacctcccaaccttctccccctcaatcgccgccacctacaccacagagcccgatgcagccactgctgccaagccctctccacccccatcgcccaactcctcaaccctcgaggaacatcccctggcagacaaaagagcactag

SEQ ID NO: 146789 - DNA, 4500 bp, Artificial Sequence
  derived and/or modified sequence
atgatgatggcccggaagcaggacgtgcggatccccacctacaacatcagtgtggtcggactatctggcacggagaaggaaaaagggcaatgtggaatcggcaaaagttgtctctgcaacaggttcgtgcggccgtctgcagatgaattccaccttgaccacacttccgtattatccacaagtgatttcgggggtcgcgtggttaacaacgaccatttcctttactggggggaggtgtctagatctttagaggactgcgtcgaatgtaaaatgcacattgtcgagcagaccgagttcattgatgaccaaacgtttcagccccatagatctactgccctgcagccctatattaagcgggcagcagcaacgaaactggcgtctgccgagaaactcatgtacttttgtaccgaccagctgggcctcgaacaagacttcgaacagaaacagatgcccgacggcaagctgctggtagatgggttcctgcttggcattgacgtgagccgcggcatgaacaggaattttgatgatcagctaaaattcgtctccaacctgtacaaccagcttgctaaaactaaaaagccgattgtggtcgtgctcactaagtgcgatgaaggtgtggaaagatatataagagatgcccatacatttgcgctgagcaagaaaaatctgcaagtcgtcgaaacctccgctcgctccaatgttaatgtggatttagccttctctaccctcgtgcagcttatagacaaatccaggggaaaaactaaaattatcccttatttcgaggccctcaagcagcaatcacaacagattgctaccgctaaagacaagtatgaatggctggtttcaagaatagttaagaaccacaatgaaaattggctcagtgtgtcgcgcaagatgcaggcttcccctgaatatcaggattatgtctacttggaaggcacccagaaagcaaaaaaactgttcctgcaacatatccaccgcctgaaacacgaacacattgaacggcgcagaaaattgtacttggcagccctgcctctggcattcgaggctcttatcccaaacctggatgagatcgatcatctatcctgcattaaagcaaagaagcttttggaaacgaaacctgagtttctcaagtggtttgtggttcttgaggagaccccttgggatgctacctctcacattgacaatatggaaaatgagcgcataccattcgacctgatggacaccgtccctgccgaacaactgtatgaggcccacctggaaaagctgagaaacgagcggaaacgggtcgaaatgcggagggcttttaaggagaatctggagacttcaccctttattacccccggcaagccctgggaagaagcgagatcttttatcatgaacgaagatttctaccagtggttggaggaatccgtttatatggacatctacggcaagcaccaaaagcagatcattgataaggcgaaagaggaattccaagaattgttgttagagtattctgaactcttctacgaactggaactggatgcaaagcccagcaaagagaagatgggagttattcaggacgtgctgggggaagaacaacgatttaaagctcttcaaaagctgcaggctgagcgagatgctctaatcctgaagcacatccattttgtgtaccaccccacgaaagagacctgtcctagttgtcctgcttgcgtggatgccaagatcgaacacctgatttcttctcgttttatccgcccctctgaccggaatcagaagaactccctgtcggaccccaatatcgaccgtataaacttagtgattttgggcaaagatggactggcccgagagctagccaatgaaattcgcgctctgtgcaccaacgacgacaagtatgtgattgacggtaaaatgtacgagctctcattaagacccattgaagggaatgtgagactgccagtgaactcctttcagaccccaacctttcaacctcacggctgtttatgtttgtacaactctaaagaaagtctgagttacgtcgtggaatccatcgagaaatccagggaatccaccctcggccgaagagacaatcacctggtccacctgcctcttaccctcattctcgtgaacaagagaggggatacctctggtgagacccttcattctctcatacagcagggccaacagatcgccagcaaactgcaatgcgtcttcctggatcctgcgtctgcaggcatcggttatggccggaatatcaatgaaaagcagatatcgcaggtcctaaaaggcttgctggactccaagcgaaatctcaatctggtctccagtacagctagcattaaagatctcgccgacgtcgatctacgcattgtcatgtgcctgatgtgtggagaccccttctcagctgatgacatcctatttcctgttctccagagccagacctgtaagtcttctcactgtggatccaataactccgtcttacttgaactccctatagggctccacaagaaaagaatcgagttatccgtactttcttatcattcttctttttctattaggaaatcccgtcttgttcatgggtatatagtcttctattcagcaaagcggaaagcatctcttgcaatgctgagagctttcttgtgtgaggtccaggatatcataccaattcagctagtcgcccttaccgatggagccgtcgacgtcctggacaatgatctcagtcgcgagcagttgaccgagggtgaggaaatcgcccaggagattgatggaaggtttacaagcatcccttgcagccagccacaacataagctagaaatattccaccctttctttaaagatgtggtagaaaagaagaatatcattgaagccacacatatgtatgataatgctgcagaagcttgttccacaactgaggaagtgttcaactctcctcgagctgggagtcccctgtgtaacagcaacttgcaggactccgaggaggacattgaacctagctattctctatttagggaggacacatccctgccctcactgagcaaggaccactccaagctctctatggaacttgagggtaatgatgggctgtcgtttatcatgtcaaattttgagtctaagttgaataacaaggtcccgccgcccgtcaaaccaaagccacccgtccacttcgagataaccaagggtgacttatcttatttggatcagggacaccgagatggccagagaaagagtgtatcttctagtccttggttaccacaagatgggtttgatcctagcgactatgctgagcccatggacgccgtggtgaaacctcgcaacgaggaggagaatatttatagcgtgccccatgactctacccagggaaaaatcatcactattcgtaatatcaataaggcccaaagtaatggcagcggtaacgggagcgacagtgagatggatacgagttcactcgagaggggacggaaggtcagtatcgtgtctaagcctgtcctttacagaacccggtgtacccggctgggacggtttgcaagttaccgtacaagcttctcagtaggtagtgacgatgagctcgggccaatcaggaaaaaggaggaagaccaagcctctcaagggtacaagggagataatgcagtgatcccttatgagacagatgaagacccacggcgaaggaacattctgcgatctcttcgccgtaataccaaaaagcccaagcctaaaccacgcccatcaatcacaaaagctacatgggaatcaaactacttcggtgttcctctgacaacagtggtgacaccagagaagccaatccctatctttattgagagatgtatagagtacattgaagctaccgggctgagcactgaggggatctacagagtatctggcaataagagcgagatggagtcactgcagaggcagtttgatcaggaccacaacctggacttggccgaaaaggacttcaccgttaataccgtcgccggagctatgaagtccttttttagcgaactacccgatcccctggtaccatacaatatgcagatcgaccttgttgaagcccacaagatcaacgatagagaacagaaactccatgcactgaaagaagtgctgaagaagtttcctaaagagaaccacgaagtgtttaagtatgtaatatcccacctcaataaggtgtcacataataataaagtcaacctcatgacgagcgaaaacctcagtatttgtttctggcctaccctgatgcgacctgatttcagtacaatggatgctctgactgctacaaggacctatcaaactattattgagttatttatccagcagtgcccattttttttctacaaccgacctatcaccgagcctccgggggcccggccatccagccccagcgccgtcgcatcgactgtcccgtttctcacttctactcccgttacaagtcagccctctcccccacagagtccgcctcccacccctcagtcccccatgcaacccctcctgcctagtcaactgcaggccgagcataccctgtag

SEQ ID NO: 146790 - DNA, 4542 bp, Artificial Sequence
  derived and/or modified sequence
atgatgatggcacgcaagcaggacgtccgcatcccgacttataacatctctgtggtgggcttatccggtaccgagaaggaaaagggccaatgcggcatcggcaaatcctgtctctgcaaccgattcgtacgccctagcgccgatgagtttcatctcgaccatacctcagttctcagtaccagcgacttcggcggaagagtggtgaataacgatcactttctctattggggagaggtatctagaagcctggaggattgtgtggagtgcaaaatgcatatcgtcgagcagaccgagtttattgacgaccagacatttcagccccataggagcactgccctgcagccttacattaagcgggcagcagcaactaaactagcctcagcagagaagctgatgtatttttgtacagaccaacttggattagagcaggacttcgaacagaagcagatgccagacggaaaactgctagtagacggctttctcttgggcatcgacgtgtcaagaggaatgaatagaaattttgacgaccagctgaagtttgtttccaacctttacaatcagcttgctaagaccaagaaacctatcgttgtggtgctgactaaatgcgatgagggggtggaaagatatatccgggacgctcatacttttgccctctccaagaaaaaccttcaggttgtagaaaccagtgcccgaagcaatgttaacgtggacctcgcattctcaactcttgtgcagctgattgacaagagtcgcggaaagactaaaataattccatactttgaggctcttaagcagcagagtcagcaaattgcaaccgccaaagataagtatgaatggctggttagtaggattgtcaagaaccataacgaaaactggctgtccgtgtctcggaagatgcaggcaagccccgaataccaggactatgtgtatctggaggggacacagaaggcaaaaaaactcttcttacagcacatccaccgtttgaaacatgagcatatagagcgcaggcgcaagctgtacctggccgcacttcccttggccttcgaggccctgatccctaatctcgacgagattgatcatttgagctgcattaaagccaaaaagttgctggagaccaaacctgagttcctgaagtggtttgtggtactcgaagagactccttgggatgccacgagccatattgacaacatggagaatgaaaggatcccatttgacctgatggacaccgtacctgccgagcagctttatgaagctcacctcgagaagcttcgcaacgaaaggaaaagggttgaaatgcgacgggcttttaaggaaaaccttgagacctcgccgttcatcacaccagggaaaccttgggaggaggcgagatccttcattatgaacgaagacttctatcagtggttggaggagagtgtgtacatggacatctacgggaagcatcagaaacagatcatcgataaagcaaaggaagaatttcaggagctgctgctggaatactcggagttgttctatgagctggaactggatgccaaaccatccaaagagaaaatgggagttatccaagatgtgttgggggaggagcagagatttaaagcccttcagaagctccaggccgagagagatgccctgattctaaagcacattcatttcgtttaccatcctacaaaggagacgtgcccgagttgtcccgcttgcgttgatgctaagatcgaacatcttatctcgtcgaggtttattcggccaagcgacaggaaccagaaaaacagcctgtccgaccccaacatcgatcggatcaatctggtgatcttaggcaaggacggcctcgccagagagctggctaatgaaatccgtgcactttgtaccaacgacgacaagtacgtaatagatgggaagatgtatgagctctcacttagaccaatagaagggaatgtacgcctaccagtcaacagcttccagactcctaccttccagccccatggttgcctgtgtctctataattcaaaagaatccttgagttacgtagtcgaatccattgagaagtctcgcgaatcaacattggggcgtcgtgacaatcacctggtgcatctgcccctgaccctgatactagtgaacaagcggggagatacctctggcgagaccctccattcactgatccagcaaggacaacagatcgcctcgaaactgcagtgtgtgttcttggatcctgcaagcgcaggaattggatatgggcgaaacatcaacgagaaacagatctctcaagtcttgaaagggctactggatagtaagcgtaacctgaatctggtctcctccaccgcaagcataaaggacttagccgatgttgatctgagaatcgtcatgtgcctgatgtgcggtgatccttttagtgccgacgatattcttttccctgttctgcaatctcagacctgcaagtcaagtcactgcggatcaaacaacagcgtcctgctggagctgcccattggactccataagaaacgcatcgagctgtccgttctgtcatatcactctagttttagcattcgcaaatcccgcctggttcacggttacattgtcttttattcagccaagcggaaggcctcactcgccatgctccgcgcatttctgtgcgaggtgcaagacattatccctattcagttggtggccctaaccgatggcgcagttgacgtgcttgacaacgacctttccagggaacagctcacggaaggggaggaaattgctcaagaaatcgacggtcgctttacaagcataccatgttcccagccacaacacaagctcgagatcttccaccccttcttcaaagacgtggtggagaagaagaacattatcgaggccacccatatgtatgacaacgcggcagaggcctgcagcaccactgaggaggtcttcaactcccccagggctggatccccgctttgtaactccaacctgcaagacagcgaggaggacattgagccctcctactccttgttcagagaagacacatctctgcctagcctgagtaaggaccactctaaactaagcatggaactcgaaggcaatgatggactgtccttcatcatgtctaacttcgaaagtaaacttaacaataaggttccgcctcctgtaaagcctaagccgcctgtgcattttgaaatcaccaaaggggatcttagctacctcgaccaaggacaccgtgatgggcaacggaagtctgtgtcgtcctctccctggctccctcaggacggtttcgaccctagcgactatgctgaacccatggacgccgtggtaaagccccgaaatgaagaagaaaatatctattctgtgcctcatgattccacccaagggaagataattaccattcgtaacatcaacaaagcacagtcaaacgggtccggcaacggctctgatagcgagatggatacaagtagcctcgaacggggaaggaaggtgtccatcgtttctaagcctgttttatatcgaacccgctgtaccaggttggggaggttcgccagctaccgcacatcattttccgtggggtctgacgacgagttgggcccaattcggaagaaggaagaagatcaagctagccagggctacaaaggcgataatgcagtgatcccgtatgaaacagacgaagatcctaggagacggaacattttacgctcactaagaaggaacaccaagaagcctaagcctaaacctcggcctagcattaccaaggccacatgggaaagcaactacttcggcgtgcctctgacgacagttgtaactccagagaaaccgattcctattttcatagagaggtgcatagaatacattgaggctacgggtctcagcacggaaggtatctaccgagtgagtgggaacaaatcagaaatggaaagcttgcagaggcagttcgaccaggatcataacttagacctggcggaaaaggattttacggtgaacactgtggcgggagctatgaagtcattcttctccgaattgcctgaccctctcgtcccctataacatgcagattgacctggttgaggcacataagatcaacgatagggagcagaaattgcatgcactgaaagaagtcctcaagaagttcccaaaggagaatcacgaggtttttaagtacgtcatcagtcacttgaacaaggtgagccataacaacaaagtgaatctaatgacctctgagaatttgtccatttgtttctggccgacactcatgcggccagacttttccacaatggacgcactgaccgctaccagaacttaccagactataatagagctcttcatccagcagtgcccctttttcttttataaccggccaattacagaaccaccaggcgctcgaccctcttctccttccgccgtggcctcgactgtgccctttctgacctccacccctgtgacatctcagccttctcctccccagtctccacctccaacacctcagtcccctatgcagcctctgctaccatcacctcttcaccctcatcgtcccactccccagccttctaggaacatcccttggcagaccaaagaacactag

SEQ ID NO: 146791 - DNA, 4499 bp, Artificial Sequence
  derived and/or modified sequence
atgatgatggcgcgtaaacaagatgtgcgcatccccacgtacaatattagtgttgtcggactgagcggaaccgagaaggagaagggtcaatgcgggatcgggaaatcctgcctctgtaaccgctttgtgcggccaagcgccgacgagtttcacttagatcatacttccgtcctttctacttccgattttggagggcgagtggtcaataacgaccatttcctctactggggagaggtatctaggagcttagaggattgtgtagaatgcaaaatgcacattgtcgagcagaccgagtttatagatgatcaaacctttcagccgcaccgtagtacagcactgcaaccctatatcaaaagagccgctgcgactaaactagcctctgcagaaaaattgatgtacttctgcacagatcaactaggtctggaacaggactttgagcaaaagcaaatgccggacggcaaactgcttgtcgatggcttcttacttggcatagatgtctctcggggaatgaacagaaattttgacgaccagctgaaatttgtatcgaacctgtacaaccagttagcaaaaaccaagaagcccatcgtcgtcgtacttacgaagtgtgacgaaggcgtcgaacggtatattagagatgcccacacttttgctcttagcaaaaaaaatctgcaagttgtcgaaacctcagcgcgtagcaatgtcaacgtggaccttgcattcagcactctagttcagcttatagacaagagtcgcggaaaaacaaagataatcccgtattttgaggcactgaagcagcagtctcaacagatcgctactgcaaaggataaatacgaatggctcgtgtctagaatcgtgaagaatcataacgagaattggctcagcgtctctagaaagatgcaagcaagccctgagtatcaggactacgtgtacctggaggggactcagaaggcgaaaaagttgtttctccagcatatccaccgacttaaacacgagcacatcgagagacggaggaagctttatctggctgcactgcctctggcttttgaggcactgatcccgaatcttgatgaaatcgatcacctaagctgtattaaagccaagaagctcctggaaaccaagccagagtttctgaagtggttcgtcgtcctggaggagacaccctgggacgcaacatcacacatagataacatggagaacgaacggatccctttcgacttaatggacactgtgcccgctgaacaactctacgaggcgcacctggagaaactgcggaacgagcggaagcgtgtggaaatgcgtcgggcatttaaagaaaacctggagacaagccccttcattacacccggtaagccatgggaggaggctcgctcctttatcatgaatgaggacttctaccaatggctggaggagagtgtttatatggatatttacggcaagcaccagaagcagatcatcgacaaagctaaagaagagttccaagaattactgctggaatattcagaattattttacgagctggagctcgatgctaaaccctcaaaggaaaaaatgggagtgatccaggacgtgctgggggaggaacagcgcttcaaggccctgcagaaactgcaggccgagcgggatgcactgattttgaaacacatccacttcgtgtaccaccctacaaaggaaacgtgcccctcttgcccggcttgcgtcgatgctaaaatagaacaccttattagctcgcggttcatccgcccaagcgatagaaatcagaaaaatagcctaagtgatcctaacatcgatcggatcaacctggtgatcctggggaaagatggtctggctagagagctggcgaatgaaatcagagcactttgcacaaacgacgacaagtacgtcattgacggcaagatgtacgagctgtcactgaggcctattgagggtaacgtgcggctgccagtcaattcttttcagacacccacattccagccccacggatgtctgtgcctgtataacagtaaagagtccctcagttacgtggtggaatcgattgagaaaagtcgggaatctacactgggcaggagggataaccacctagtgcacttgcctttgacactcatcctggtgaacaagaggggcgacaccagtggagagacactgcatagcctcatacagcaaggccaacagatcgcctcaaaactgcaatgcgtatttctggacccagccagcgccggaattgggtatggcaggaacatcaatgagaagcaaatctcgcaggtacttaaaggacttttggactctaaacgaaacctcaatctggtgagctctacagcgtccatcaaagatctcgcagatgtggacttacgcatcgtcatgtgcctgatgtgcggagacccctttagcgcagatgacattctctttcccgtcttacaatcacaaacatgcaagtcttctcattgtggatcgaacaacagtgttctcttggagctgcctatcgggctgcacaaaaaaaggatcgaattatccgtgttgagctaccatagcagtttcagtattcgaaagtcgcggctagtccacggatatatcgttttctactccgccaagcgcaaagcaagtttggctatgttgcgagctttcctgtgcgaggttcaagatattatccctattcagcttgtagccctgacagatggggctgtggacgtgctggacaatgacctgtctcgagagcagctgacagaaggagaagagatcgctcaggagattgatgggcgtttcacttccataccatgttcacagccccagcacaaattagagatctttcaccctttcttcaaggatgtggtcgagaagaaaaacattatagaggcaacccacatgtacgataatgcagcagaagcctgttctaccaccgaggaggtctttaatagccctcgcgcaggatccccactgtgcaatagcaatctgcaggactctgaggaagatattgagccatcctactcccttttcagagaggacacatcgctaccaagtctgtccaaagatcactcaaaactgagcatggagctggaaggtaacgatggactctcctttatcatgtccaatttcgagtcaaagctcaacaataaggtgccgcctcccgtgaagcctaagcctcctgtacacttcgagatcactaagggcgatctgtcctacctagaccagggtcacagagatggccagcggaaatcagtgagctcatcaccgtggctcccacaagacggcttcgatccgtccgattacgccgagccaatggatgccgttgtcaagcctcgcaatgaagaagagaacatttactcggtgccccacgactctacgcagggcaagatcataaccattcgtaatatcaataaggcccaatccaacggatcaggaaatggctctgactctgaaatggatactagcagcctcgagagaggcagaaaggtcagtatcgtctctaaacctgttttgtacagaactcgctgcacaaggttaggaagattcgcctcttatagaaccagctttagtgtggggtctgatgacgagctgggccctatacgtaagaaagaggaagaccaggcctctcagggatacaagggagataatgccgtcataccatatgagacggatgaagatccccgtagacgtaatatcctcagatcactgagaaggaataccaaaaaaccaaagcccaaaccccgtccaagtataacaaaggcaacttgggaaagcaactactttggagtgcccctgactacagtcgttactcccgagaagcccattcctatcttcatcgaacgttgcatagagtatattgaggctacaggactttctacagagggtatatacagggtgtccggtaataaaagtgagatggaatcattgcagagacagtttgatcaagatcacaacttggatctggcggaaaaggacttcactgtgaatacagtggcgggagccatgaagtccttctttagcgaactgccagaccctctagttccatataatatgcagattgacttagtggaggcacacaaaatcaatgatcgtgaacagaaactgcatgcactgaaagaagttttgaaaaaatttccaaaagaaaaccacgaagtgttcaaatacgtcattagccatctaaacaaagtgtcacacaacaacaaggtaaacctgatgacttctgagaacctcagcatatgcttctggccaaccctgatgaggcctgacttcagcacgatggatgccctgactgctacaagaacctatcagaccatcatagagttatttatccagcaatgcccctttttcttttacaatcgtccgatcacggaacctcctggagccagaccttctagtccatccgcggtagcaagcaccgtgccattcctcacctctaccccagtgacatcccagccctcccctccacaaagcccaccaccaacgcctcagtcccctatgcagcctctgctgcctagtcagctgcaggcagaacacactctgta

SEQ ID NO: 146792 - DNA, 4542 bp, Artificial Sequence
  derived and/or modified sequence
atgatgatggcaagaaagcaagatgtccgaattcccacctacaacatcagtgtggtgggattatctgggaccgagaaggaaaagggccagtgtgggattggaaagtcttgtttgtgcaaccgcttcgtgcgcccgagtgctgacgagtttcacttggaccatacctccgtcctcagcaccagtgactttggagggcgagtggtcaataatgaccactttctctactggggagaagttagccgctccctggaggattgtgtggaatgtaagatgcacattgtggagcagactgaatttattgatgatcagacttttcaacctcatcgaagcacggccctgcagccctatatcaagagagctgctgcgaccaagcttgcatcagctgaaaaactcatgtacttttgcactgaccagctggggctggagcaggactttgagcagaaacaaatgccagacggaaagctgctggttgatggttttcttcttggtattgatgttagcaggggcatgaataggaactttgatgaccagctcaagtttgtctccaatctctacaatcagcttgcaaaaacaaaaaagcccatagtggtggtcctgactaagtgtgacgaaggtgttgagcggtacattagagatgcacatacttttgccttaagcaaaaagaacctccaggttgtggagacctcagcgagatccaatgtaaacgtggacttggctttcagcaccttagtgcaactcattgataaaagtcggggaaagacaaaaatcattccttattttgaagctctcaagcagcagagtcagcagatagctacagcaaaagacaagtatgagtggctggtgagtcgcattgtgaaaaaccacaatgagaactggctgagtgtcagccgaaagatgcaggcctctccagaataccaggactatgtctacctggaagggactcagaaagccaagaagctgtttctacagcacatccaccgcctcaagcatgagcatatcgagcgtaggagaaagctgtacctggcagccctgccattagcttttgaagctcttatacctaatctagatgaaatagaccacctaagctgcataaaagccaaaaagctcttagaaaccaagccagaattcttgaagtggtttgttgtgcttgaagagaccccatgggatgccaccagtcacattgacaacatggaaaacgaacggattccctttgatttaatggataccgtccctgcagagcagctatacgaggcccacttagagaagctgaggaacgaaaggaaaagagttgagatgcgaagggcgtttaaagaaaacctggagacttctcctttcataactcccggaaagccttgggaagaggcccgtagttttattatgaatgaggatttctaccagtggctggaggaatctgtatacatggatatttatggcaaacaccaaaagcaaattatagataaagcaaaggaagaatttcaggagttgcttttggaatattcagaattgttttatgaactggagctggatgctaagcccagcaaggagaagatgggtgttattcaggatgttctgggagaggaacagcgatttaaagcattacaaaagctccaagcagagcgtgatgcccttattctgaaacacattcattttgtgtaccacccaacaaaggagacatgccccagctgcccagcttgtgtggacgctaagattgagcacttgattagttctcggtttatccggccgtctgaccggaatcagaaaaattcactctctgaccctaacattgatagaatcaacttggttatattgggcaaagacggccttgcccgagagttggccaatgagattcgagctctttgtacaaatgatgacaagtatgtgatagatggtaaaatgtatgagctttccctgaggccaatagaggggaatgtcaggcttcctgtgaactctttccagacgccaacatttcagccccacggctgtctctgcctttacaattcaaaggaatcgctatcctatgtagtggaaagtatagagaagagtagagagtccacgctgggccggcgggataatcatttagtccatctcccccttacattaattttggttaacaagagaggagacaccagtggagagactctgcatagcttaatacagcaaggtcaacaaattgctagcaaacttcagtgtgtctttctcgaccctgcttctgctggcattggttacggacgcaacattaatgaaaagcaaatcagtcaagttttgaagggactcctggactctaagcgtaacttaaacctggtcagttctactgctagcatcaaagatttggctgatgttgatctgcgaattgttatgtgtctgatgtgtggagatccttttagtgcagatgacatactttttcctgtccttcagtcccaaacctgtaaatcttcccattgtggaagcaacaactctgttttacttgaactaccaatcggactgcacaagaagcggattgaactgtctgttctttcataccattcctcctttagcatcagaaagagccggttggttcatgggtacattgttttttattcagccaaacgtaaggcctctttggctatgttacgtgcctttctttgtgaagtgcaggatattatccctattcagcttgtagcactcactgatggcgctgtagatgtcctggacaatgacttaagtagggaacagctaactgagggggaggagattgctcaagaaattgacggaaggttcacaagcatcccctgtagccaaccccagcataaacttgagatctttcacccattttttaaagatgtggtggaaaaaaagaacataatcgaggctactcatatgtacgataatgctgccgaggcctgtagcaccaccgaagaggtgtttaactccccccgggcaggatcaccgctctgcaactcaaacctgcaggattcagaagaagatatcgagccatcttacagcctgtttcgagaagacacatcactgccttctctgtccaaagaccattctaagctctctatggaactggagggaaatgatgggctgtctttcattatgagcaattttgagagtaaactgaacaacaaagtacctccgccagtcaaaccaaagcctcctgtccattttgaaattacaaagggggatctatcttatttagaccaaggccatagggatggacagaggaagtctgtgtcttctagcccctggctgcctcaggatgggtttgatccttctgactatgctgaacccatggatgctgtggtgaagccaaggaatgaagaagaaaacatatactccgtgccccatgacagcacccaaggcaaaatcatcaccattcggaatatcaacaaagcccagtccaacggcagcgggaatggttctgacagtgaaatggacaccagctctctagagcgagggcgcaaggtttccatcgtgagcaagccagtgctgtacaggacgagatgcacccggctggggcggtttgctagttaccggaccagcttcagcgtggggagtgatgatgagctggggcccatccggaagaaagaggaggatcaggcatcccagggttataaaggggacaatgctgtcattccatacgaaacagacgaagacccgcggaggaggaatattcttcgcagcctaaggaggaacactaagaaaccaaagcccaaaccccggccatccatcacaaaggcaacctgggagagtaactattttggggtgcccttaacaactgtcgtgactccagagaagccgatccccatttttattgaaagatgtattgagtacattgaagccacaggactgagcacggaaggcatctaccgggtcagcgggaacaagtctgagatggagagtctgcagagacagtttgatcaagaccacaacctggacctggcagagaaagactttacggtgaataccgtggctggtgccatgaagagctttttctcagaactgcctgaccccctggtcccgtataacatgcagatcgacttggtggaagcacacaaaatcaacgaccgggagcagaagttgcatgcccttaaggaggtattaaagaaatttccaaaggaaaaccacgaagtcttcaagtatgtcatctctcacctaaacaaggtcagccacaacaacaaggtgaatctcatgaccagcgagaacctctccatctgcttctggcccaccttgatgagacctgatttcagcactatggacgccctcacagccacgcgcacctaccagacaatcattgaactctttatccagcagtgccccttcttcttctacaatcggcccatcaccgagccccccggcgccaggcccagctccccctctgccgtggcttccaccgtccccttcctcacttccacgcctgtcacaagtcagccgtcgcccccacagtcgcctccacccaccccccagtccccaatgcagccactgcttccctccccgcttcatccccaccgtcccactccacagccttcccgaaacattccctggcaaacaaaggaacactag

SEQ ID NO: 146793 - DNA, 8878 bp, Artificial Sequence
  derived and/or modified sequence
atgatgatggcaagaaagcaagatgtccgaattcccacctacaacatcagtgtggtgggattatctgggaccgagaaggaaaagggccagtgtgggattggaaagtcttgtttgtgcaaccgcttcgtgcgcccgagtgctgacgagtttcacttggaccatacctccgtcctcagcaccagtgactttggagggcgagtggtcaataatgaccactttctctactggggagaagttagccgctccctggaggattgtgtggaatgtaagatgcacattgtggagcagactgaatttattgatgatcagacttttcaacctcatcgaagcacggccctgcagccctatatcaagagagctgctgcgaccaagcttgcatcagctgaaaaactcatgtacttttgcactgaccagctggggctggagcaggactttgagcagaaacaaatgccagacggaaagctgctggttgatggttttcttcttggtattgatgttagcaggggcatgaataggaactttgatgaccagctcaagtttgtctccaatctctacaatcagcttgcaaaaacaaaaaagcccatagtggtggtcctgactaagtgtgacgaaggtgttgagcggtacattagagatgcacatacttttgccttaagcaaaaagaacctccaggttgtggagacctcagcgagatccaatgtaaacgtggacttggctttcagcaccttagtgcaactcattgataaaagtcggggaaagacaaaaatcattccttattttgaagctctcaagcagcagagtcagcagatagctacagcaaaagacaagtatgagtggctggtgagtcgcattgtgaaaaaccacaatgagaactggctgagtgtcagccgaaagatgcaggcctctccagaataccaggactatgtctacctggaagggactcagaaagccaagaagctgtttctacagcacatccaccgcctcaagcatgagcatatcgagcgtaggagaaagctgtacctggcagccctgccattagcttttgaagctcttatacctaatctagatgaaatagaccacctaagctgcataaaagccaaaaagctcttagaaaccaagccagaattcttgaagtggtttgttgtgcttgaagagaccccatgggatgccaccagtcacattgacaacatggaaaacgaacggattccctttgatttaatggataccgtccctgcagagcagctatacgaggcccacttagagaagctgaggaacgaaaggaaaagagttgagatgcgaagggcgtttaaagaaaacctggagacttctcctttcataactcccggaaagccttgggaagaggcccgtagttttattatgaatgaggatttctaccagtggctggaggaatctgtatacatggatatttatggcaaacaccaaaagcaaattatagataaagcaaaggaagaatttcaggagttgcttttggaatattcagaattgttttatgaactggagctggatgctaagcccagcaaggagaagatgggtgttattcaggatgttctgggagaggaacagcgatttaaagcattacaaaagctccaagcagagcgtgatgcccttattctgaaacacattcattttgtgtaccacccaacaaaggagacatgccccagctgcccagcttgtgtggacgctaagattgagcacttgattagttctcggtttatccggccgtctgaccggaatcagaaaaattcactctctgaccctaacattgatagaatcaacttggttatattgggcaaagacggccttgcccgagagttggccaatgagattcgagctctttgtacaaatgatgacaagtatgtgatagatggtaaaatgtatgagctttccctgaggccaatagaggggaatgtcaggcttcctgtgaactctttccagacgccaacatttcagccccacggctgtctctgcctttacaattcaaaggaatcgctatcctatgtagtggaaagtatagagaagagtagagagtccacgctgggccggcgggataatcatttagtccatctcccccttacattaattttggttaacaagagaggagacaccagtggagagactctgcatagcttaatacagcaaggtcaacaaattgctagcaaacttcagtgtgtctttctcgaccctgcttctgctggcattggttacggacgcaacattaatgaaaagcaaatcagtcaagttttgaagggactcctggactctaagcgtaacttaaacctggtcagttctactgctagcatcaaagatttggctgatgttgatctgcgaattgttatgtgtctgatgtgtggagatccttttagtgcagatgacatactttttcctgtccttcagtcccaaacctgtaaatcttcccattgtggaagcaacaactctgttttacttgaactaccaatcggactgcacaagaagcggattgaactgtctgttctttcataccattcctcctttagcatcagaaagagccggttggttcatgggtacattgttttttattcagccaaacgtaaggcctctttggctatgttacgtgcctttctttgtgaagtgcaggatattatccctattcagcttgtagcactcactgatggcgctgtagatgtcctggacaatgacttaagtagggaacagctaactgagggggaggagattgctcaagaaattgacggaaggttcacaagcatcccctgtagccaaccccagcataaacttgagatctttcacccattttttaaagatgtggtggaaaaaaagaacataatcgaggctactcatatgtacgataatgctgccgaggcctgtagcaccaccgaagaggtgtttaactccccccgggcaggatcaccgctctgcaactcaaacctgcaggattcagaagaagatatcgagccatcttacagcctgtttcgagaagacacatcactgccttctctgtccaaagaccattctaagctctctatggaactggagggaaatgatgggctgtctttcattatgagcaattttgagagtaaactgaacaacaaagtacctccgccagtcaaaccaaagcctcctgtccattttgaaattacaaagggggatctatcttatttagaccaaggccatagggatggacagaggaagtctgtgtcttctagcccctggctgcctcaggatgggtttgatccttctgactatgctgaacccatggatgctgtggtgaagccaaggaatgaagaagaaaacatatactccgtgccccatgacagcacccaaggcaaaatcatcaccattcggaatatcaacaaagcccagtccaacggcagcgggaatggttctgacagtgaaatggacaccagctctctagagcgagggcgcaaggtttccatcgtgagcaagccagtgctgtacaggacgagatgcacccggctggggcggtttgctagttaccggaccagcttcagcgtggggagtgatgatgagctggggcccatccggaagaaagaggaggatcaggcatcccagggttataaaggggacaatgctgtcattccatacgaaacagacgaagacccgcggaggaggaatattcttcgcagcctaaggaggaacactaagaaaccaaagcccaaaccccggccatccatcacaaaggcaacctgggagagtaactattttggggtgcccttaacaactgtcgtgactccagagaagccgatccccatttttattgaaagatgtattgagtacattgaagccacaggactgagcacggaaggcatctaccgggtcagcgggaacaagtctgagatggagagtctgcagagacagtttgatcaagaccacaacctggacctggcagagaaagactttacggtgaataccgtggctggtgccatgaagagctttttctcagaactgcctgaccccctggtcccgtataacatgcagatcgacttggtggaagcacacaaaatcaacgaccgggagcagaagttgcatgcccttaaggaggtattaaagaaatttccaaaggaaaaccacgaagtcttcaagtatgtcatctctcacctaaacaaggtcagccacaacaacaaggtgaatctcatgaccagcgagaacctctccatctgcttctggcccaccttgatgagacctgatttcagcactatggacgccctcacagccacgcgcacctaccagacaatcattgaactctttatccagcagtgccccttcttcttctacaatcggcccatcaccgagccccccggcgccaggcccagctccccctctgccgtggcttccaccgtccccttcctcacttccacgcctgtcacaagtcagccgtcgcccccacagtcgcctccacccaccccccagtccccaatgcagccactgcttccctcccagcttcaagccgaacacacgctgtgagccaccaagacctggggcgacaggagaaccggtcctctctctgacggggtggcatttggccttgaacaaaaccaagtccactggggacagaggcaggggcaagtggctctccccattaccttctcaagacctcagtgggagcaccagccaatggtaccatcggctgggctgccaggtaccctgggcctggcgctgcagacctgagctggcttggacccatttgaggactgaactaggcaggcaatggctccagtgccctccctctgttccctggaccaccaccccacgtagctgctcacaccagcctccgggtgcctccctctgcttgtacagagcccatggtcgggacagtgccctggcctttgccggggaggaggatgctctgagattcagggtggggctggcaacccctgaagagaacacttcctgttggtctgtctcttcccaccttccatctgcacacacccccaaggtaagggtacagcccggctggcggcctccttgggaacgtgtaggccacggctctgccaccactaggtacctgctgagggcgctggctctgcagatcagaacaacggaggatagctttgtgcctggacccagagagtgtgggactccccgcttcatccccaccgtcccactccacagccttcccgaaacattccctggcaaacaaaggaacactaggagaaaaaatggaaaaacccttccagtaattaaaaaggaagaaaccacagaaagaaaactacagacctcaagattccactctgtgcccgcctctgccgggagggagggaggcacacaggtggagctgaccctcgtctttgtggcagcaaaaccaggatgcctggagctgtggcctgagggcctgctggggtcccactcacccacttaggtctagtcgctagatcccccgttttcccaagaagagggttcgagcccttggtggggacagctggggagatggcagtgcaggctggaacctgggctgccccagaacacagtccattacgatagaaacactaattgagcatgtgcgtggggtgggggtgtgtgtgcacatgtgagtgtgagtgtgtgtgggcgcttggtggggggttggggacagctggaaggtgccaggtgcacttggggttggggttggtgtgttgggtgttgaagtggaatcgtttcatcccagccatggaggccaccagcaggagtgttcatggggatgtgggcgaggtggggcactttgaaggaatggcggtctgctggtgccctcgaaggggcatccttcctggtcttcgctgacccagaggcgctgtgcctgcatatcatccaccaccaccctagcccagccttcccactgccccaggaaaagctcttctcctggccacctctgccccccagcacctcaaacttgcatggctgggctgtggcctctgcggccaggaagcctgacactaggcaccccccaggcgagagctagtggggtgcagagggccccatgccagacagcccttggggctcgttgcactttaagaaataggatctgtggtgtattccagggggcctgatggacacctttcccgggcgtctgcagctgccctgcccgtgcccgcctgcagtggttggagacgggagtggcccttcggctcccgagctccctctggggacggctggctcactgtctccagttctcaatggccaacgaaggtgcttggaaacacctaaccttgcaagttttaccgccttttgaggaacacaaatcggagaacaaacccagggttcaggcgtgttttctgtgaatgttggatgatgaatttttgtctcttctggtggagctgtgcctggccctgtaggcccagggttggctggaaggtgacatctgtgtttcgttttagctgaggttggcagaaacgttcccaaactcccccagccctggaccccagcagatgaggaaacggccccatttactgaccccgcccccttttcgaggttatgctcacctggtcagctcctcacgtaattgggggtggagggaaagcatggtggtgccctgggccgtccctgtgtgaacgcaggcaaaagcagcccagtccccctcactgcttgagctaacactgccacctcttttgtgtgagcacaaaagccacgtcccaagccacctggcccgattccacagatgtatgtgcggccagtgacttccccaggagtgtggagggggtggtgaggaggagcacctgggctctctacccctctcctcacagaagtacctgaaactaggtctggggcactcccaatgcagcgccttgtcagccaaggtgggcaggcagggactgtggcagcttatgtccaaagggagcccccatgcacaggaagccacagggttcctcttgtttcccccgctaacttcagcctctcatctgctgctccgggctgagggactagaggacatctcggtcgtttgaggggcatggccagtcgtggcaggccggccttcagcgtccggtcagggaagcgtgcagcccaaatgggcacttgcatgggagccacagaggagcgtccctggggattgttgggaccatgctgcccccactcccgcttttgttggggctctaagttctggaaggtgtgtgcacagagggtgctcatgggactcgcatgcagctctcagcactgggtgggagggcgttggcttgtccagaatggggacgtggggcagccacccctgcccagcgagagcgcagacaccgtgtgaggggacagcagcccttggtgcaaagccagagactgatcctggctctgacggctgaagagggaagacccaaggctgggtggcgtggctcgtgaatccacttagaattcttggcttgtgtcgcatactgggtgtcacggcacacatttactctgcattgtccccgtctttcccatcgcctagcgtttggggaggaacagggagagagcttcggggcgtctgtctccgtgctctcctgcctccaccgccttggttttgcttcctgctggaggcagggcacctgctgcgacccagattcttctgcaggatgtgtctgtctttgtcacggtggacagagggtgacatcataggagcagctcgctggccagaaggggatgggggcatccctgtgcctcactcagctcctgctgctcttagggaaaggaggcctgggtcaagccagcatccccttggtaaagacccccgcaggccaccaggcattctggacacgcacacacacacacacacacacacacacacacaaaacttcacagcaggccagctgcagtgacttgtcatcaagagtcacctcagctgcgcccccctcccatcctttcctatgagaagccactgctttgggggcgccggctagaaaaagtagggtgcggtggccaggagggcccctgccgcgcggggggctgggtctggttgagtcgctgctttcccgagggcagcgcagggatccggggaagctgcggcagggagcgggcgccggcttcgtggctctgaggtgtaacgggggtgggctccctccctcggaggacatcgtctgtgtccaggtcagaaagtggcccaggaagggggcagtttctgtcgcgggtccggtgggggcgcggccgcggtgcggtcggtgcagcgtggccaatgcgcggcgcgcgcgggggacagagcaggaggcggtctgtcacctcggccactgctgacctgggctggcctcccccagccctcccgtggcggagccggcagcgatgctacaggcctaagttattgtttgcataaaaagaatcatgttccctgtgtacatttaagaaaaaaacaaaaaaacggaaatgtcagaattgtatggaaataaaacttgtttgaaaatttggaatagtgctgctgccagcttatttttctggtacttgtattttcacatgttaaatgatctttatatatgttgaattaacaaatattttgagtttctgagaaaaaacaaaacatattaatggtattgaaatgtgttagtagtctggctgtgtgcccaaaattctgtttcgcagcaaaagtgaagacctgtatgtaaagaaagtataacaattatttctttgtattttaggggctttaaccggaacatcgtctagctggtgttaggaatgtttgcttaatttccagacttttttttaaaaacacatcgtgggttttttgaggctccaacctgattagtgcatggtcagccctcaatgaaggctgaggcatctctgactgaggtgtttttgtttggttttgttttttaaaatcatgtatttgctacaaagtattgtacttgtctcaatgggaatggtgtaaaaaacaaaaggccttatgtgatctgtatcatagttaataaatgaatcttgt

SEQ ID NO: 146794 - protein, 109 aa, Artificial Sequence
  derived and/or modified sequence
MAYQLYRNTTLGNSLQESLDELIQSQQITPQLALQVLLQFDKAINAALAQRVRNRVNFRGSLNTYRFCDNVWTFVLNDVEFREVTELIKVDKVKIVACDGKNTGSNTTE

SEQ ID NO: 146795 - DNA, 1582 bp, Artificial Sequence
  derived and/or modified sequence
gagcacttccgggtcgtcagctcagttctgcggtttctgcggcggctggagaggtggtcggagaagtaggaacctcctgccgggctcgtggcggcttctgtccgctccgcggagggaagcgccttccccacaggacatcaatgcaagcttgaataagaaaaacaaattcttcctcctaagccatggcatatcagttatacagaaatactactttgggaaacagtcttcaggagagcctagatgagctcatacagtctcaacagatcaccccccaacttgcccttcaagttctacttcagtttgataaggctataaatgcagcactggctcagagggtcaggaacagagtcaatttcaggggctctctaaatacgtacagattctgcgataatgtgtggacttttgtactgaatgatgttgaattcagagaggtgacagaacttattaaagtggataaagtgaaaattgtagcctgtgatggtaaaaatactggctccaatactacagaatgaatagaaaaaatatgacttttttacaccatcttctgttattcattgcttttgaagagaagcatagaagagactttttatttattctagaattgcagaaatgactacactgtgctataccagagaattccagtagaaagaaacttgtaactctgtagcctcttacatcacctttattatacagcatgaaaaaccataacttttttttaaggacaaaagttgttgccttcctaagaaccttctttaataaactcattttaaaactctgagtaataactggtgaagctattaaggtagcaatatgaagatattagataatgcattttcccatttcctttgcaaggaacatgatgccctttcagaatgcttatttcaataaagtcatgttttgtcagttgtaactttacctgatgaaagcatcagcaggggcaaaaccaaactctggatggaattttttaagaaaatcccttgctttttaaaatacaaaaccaaagttaatcattggtataaaaaaacccaagtacaacttgattaggaaaagttagacaatcatagcaaaaacaaaaccaaaaaactttccttcttagaccaggtaacatgaggaagggggaaaaaaacccaaacaaaatagtccccccacatgacaggtgtcttcagcttgccatattgatccaaagttcatacattttatcatgtacaagatacattagacttacaataaagtctaattattagacttttatgtcagtggattgtgcttgcagaaatacagaagtaacatactgaccctaggtgaggagtttcttacatggttaactggattgacccaattggagtaaaagatttttgctgttacctcgatgctcctgcagttgttacctcagcatgccactgtagtccttgactctcacattaaaactaactttggctaggtactggtggctcacacctgtaagtaatcccagtactttaggaggctgagactggaggattacttgagtccaggagttggagaccagcctggccaatatagactgtccctacaaagaaaataaaattgtttcatcttccaa

SEQ ID NO: 146796 - DNA, 330 bp, Artificial Sequence
  derived and/or modified sequence
atggcctatcagctgtacagaaacacgacgctggggaattccctgcaggaaagcctggatgaattgatccaaagccagcagattacaccccagctggcgctgcaggtgctcctgcaatttgataaggcaatcaatgccgctctcgcccagagagtgcgcaatcgtgtgaactttagaggatctctgaatacttaccggttctgcgataacgtctggactttcgtgttgaacgatgtagaatttcgtgaggtaaccgagctcattaaggttgacaaagtgaaaatcgtggcctgtgacggcaagaacaccgggtctaatactaccgagtag

SEQ ID NO: 146797 - DNA, 330 bp, Artificial Sequence
  derived and/or modified sequence
atggcgtatcagctttaccggaatacgactttaggaaactctttgcaagagtccttagatgaactgatccagtcacagcaaattactccccagctggccctgcaggtgcttctccagtttgacaaagcgattaatgctgcactcgcccagcgagtaagaaacagggtgaatttccggggatcattgaacacttataggttctgcgacaacgtgtggacgtttgtcctgaatgatgtagagttccgcgaggtgacagagctgataaaagtggacaaagttaagatcgtggcttgtgacggtaagaataccggctcgaacaccaccgagtag

SEQ ID NO: 146798 - DNA, 330 bp, Artificial Sequence
  derived and/or modified sequence
atggcctatcagctgtataggaacactaccttaggtaacagcttgcaagaaagtctcgatgaacttatccagagccagcagattactcctcaactggccctacaggttctactgcagtttgacaaggcaatcaacgctgctttagcacagcgagtacggaacagggtcaatttcagaggtagcctcaatacatatcgcttttgcgataatgtttggacctttgtactcaacgatgtggagttcagggaggtaaccgagctgatcaaggtcgataaggtgaagattgtggcttgcgatggcaagaacaccggaagcaacacgacagaatag

SEQ ID NO: 146799 - DNA, 330 bp, Artificial Sequence
  derived and/or modified sequence
atggcctaccagctgtacagaaacaccaccctgggcaacagcctgcaggagagcctggatgagctgatccagagccagcagatcaccccccagctggccctgcaggtgctgctgcagtttgacaaggccatcaatgctgccctggcccagagggtgaggaacagagtgaacttccggggcagcctgaacacctaccgcttctgtgacaacgtgtggacctttgtgctgaatgatgtggagttccgggaggtgacagagctgatcaaggtggacaaggtgaagatcgtggcctgtgatggcaagaacacaggcagcaacaccacagaatag

SEQ ID NO: 146800 - DNA, 330 bp, Artificial Sequence
  derived and/or modified sequence
atggcctaccagctgtaccggaacaccaccctgggcaacagcctgcaagagtctttagacgagctcattcagtctcagcagattacaccccagctggctctccaggttctgttacaatttgataaagccattaatgccgcactcgcccagcgagttaggaatagagtcaacttccgtgggagtctgaacacatataggttctgtgacaatgtctggacctttgtcctcaacgacgtggaattccgggaagtcactgaactgatcaaggttgataaggtgaaaatcgttgcatgtgatggcaagaatacaggctcaaatacaacggaatag

SEQ ID NO: 146801 - DNA, 330 bp, Artificial Sequence
  derived and/or modified sequence
atggcctaccagctgtaccggaacaccaccctgggcaacagcctgcaggagagcctcgacgaacttattcagtcccagcaaattactcctcagctggccctgcaggtgcttttacagtttgataaggctattaacgcagcattagctcaacgggtaagaaaccgggtgaattttcgagggagtctgaatacataccggttctgtgacaacgtctggacctttgtcttgaatgacgttgagtttagggaggtgacagaacttatcaaggtcgacaaagtaaagattgtggcatgtgacggaaagaacacagggagcaacaccaccgagtag

SEQ ID NO: 146802 - DNA, 330 bp, Artificial Sequence
  derived and/or modified sequence
atggcctaccagctgtaccggaacaccaccctgggcaacagcctgcaggaatccctggatgagttaattcagtcacagcagatcactcctcagctggctctccaggtcttgctgcagttcgataaagctatcaatgctgcactggctcaacgggtgcgcaacagagtgaactttaggggcagtctcaatacatatcgcttttgtgacaatgtatggacgttcgtgttaaatgatgtcgaattccgcgaagtgaccgaacttatcaaagttgacaaggtgaagatcgtagcttgcgacggaaagaacaccggaagcaatacgacagagtag

SEQ ID NO: 146803 - DNA, 330 bp, Artificial Sequence
  derived and/or modified sequence
atggcatatcagctgtacaggaatactactttgggcaactctctccaggagtcactagatgagctgatccaaagtcagcagattacaccgcagctcgccctgcaagtactgctgcagtttgacaaagctattaatgccgcacttgcccaacgcgtcaggaaccgtgtaaatttcagaggctcccttaacacttaccggttctgcgacaacgtctggaccttcgtcctgaacgacgtcgaatttcgagaagtaactgaactgatcaaggtggacaaagttaaaatcgtggcctgtgatgggaaaaacacaggctctaacactactgagtag

SEQ ID NO: 146804 - DNA, 330 bp, Artificial Sequence
  derived and/or modified sequence
atggcttatcagctttaccgcaacacgaccctgggtaactctttacaggagtcgttggacgaactgattcagtctcagcaaatcactccccagctcgcgttgcaggttcttctgcaattcgacaaggctattaatgcagcactggctcaacgcgtgcgtaatcgtgttaattttcggggatctctgaatacatatcgcttttgtgataacgtgtggacattcgtgctcaatgacgttgagttcagagaggtgaccgaattaataaaggttgataaggtgaagatagttgcatgcgatgggaagaacacagggtcaaacactaccgagtag

SEQ ID NO: 146805 - DNA, 330 bp, Artificial Sequence
  derived and/or modified sequence
atggcctaccagctttaccgcaatactaccctgggaaacagtctacaagaaagcctggacgaactaatacagtcccaacagatcacacctcagctggcactccaggttttgctgcaattcgataaggcaataaacgcagcgttggcccagcgcgtgaggaatagagtgaactttcgcggatctctgaacacataccggttttgcgataatgtctggacgttcgttttaaacgatgttgagttcagggaggtgaccgagttaatcaaagtggacaaggtcaagatagttgcttgtgatgggaagaacactgggagcaatacaaccgagtag

SEQ ID NO: 146806 - DNA, 758 bp, Artificial Sequence
  derived and/or modified sequence
ggagaagtaggaacctcctgccgggctcgtggcggcttctgtccgctccgcggagggaagcgccttccccacaggtagtgggttagggagggcagggttagggagggaagcagggccgcgctccctgccgcccccccggagtcggagtgcgttggtggggtagtctctgagggcccttcgctcctgggatctgcccgttaccgaccgttgccggcaaggccccgcggccggcaccggagaagggcggcgaggcggcggtgatggtcgcgtcccgtggcgggaggctcgtcgttcacggggcgcccacagaacccacctaggggaggtcttcagcccaccaccgtattttcagccaggacatcaatgcaagcttgaataagaaaaacaaattcttcctcctaagccatggcatatcagttatacagaaatactactttgggaaacagtcttcaggagagcctagatgagctcatacagtctcaacagatcaccccccaacttgcccttcaagttctacttcagtttgataaggctataaatgcagcactggctcagagggtcaggaacagagtcaatttcaggggctctctaaatacgtacagattctgcgataatgtgtggacttttgtactgaatgatgttgaattcagagaggtgacagaacttattaaagtggataaagtgaaaattgtagcctgtgatggtaaaaatactggctccaatactacagaatgaatagaaaaaatatgactttttta

SEQ ID NO: 146807 - DNA, 970 bp, Artificial Sequence
  derived and/or modified sequence
gttctgcggtttctgcggcggctggagaggtggtcggagaagtaggaacctcctgccgggctcgtggcggcttctgtccgctccgcggagggaagcgccttccccacagcttgttgtttgaagtctgccttccaactttcttcgtgcgaactccgacaaaaggaacgaattttaaacttggtggtttaatcaaaaaatgctaggacgagttacttccgaatttgacttctaattttctgaactgcaaaacaagaagggaacaataaatttctgtggctgataccacatctaaaagattagaacacttaacaaggaatttttaaagaatgacatcaatgcaagcttgaataagaaaaacaaattcttcctcctaagccatggcatatcagttatacagaaatactactttgggaaacagtcttcaggagagcctagatgagctcatacagtctcaacagatcaccccccaacttgcccttcaagttctacttcagtttgataaggctataaatgcagcactggctcagagggtcaggaacagagtcaatttcaggggctctctaaatacgtacagattctgcgataatgtgtggacttttgtactgaatgatgttgaattcagagaggtgacagaacttattaaagtggataaagtgaaaattgtagcctgtgatggtaaaaatactggctccaatactacagaatgaatagaaaaaatatgacttttttacaccatcttctgttattcattgcttttgaagagaagcatagaagagactttttatttattctagaattgcagaaatgactacactgtgctataccagagaattccagtagaaagaaacttgtaactctgtagcctcttacatcacctttattatacagcatgaaaaaccataacttttttttaaggacaaaagttgttgccttcctaagaaccttctttaataaactcattttaaaactc

SEQ ID NO: 146808 - DNA, 330 bp, Artificial Sequence
  derived and/or modified sequence
atggcctaccagctgtacagaaacaccaccctgggcaacagcctgcaggagagcctggacgagctgatccagagccagcagatcaccccccagctggccctgcaggtgctgctgcagttcgacaaggccatcaacgccgccctggcccagagagtgagaaacagagtgaacttcagaggcagcctgaacacctacagattctgcgacaacgtgtggaccttcgtgctgaacgacgtggagttcagagaggtgaccgagctgatcaaggtggacaaggtgaagatcgtggcctgcgacggcaagaacaccggcagcaacaccaccgagtag

SEQ ID NO: 146809 - protein, 261 aa, Artificial Sequence
  derived and/or modified sequence
MAAACRSVKGLVAVITGGASGLGLATAERLVGQGASAVLLDLPNSGGEAQAKKLGNNCVFAPADVTSEKDVQTALALAKGKFGRVDVAVNCAGIAVASKTYNLKKGQTHTLEDFQRVLDVNLMGTFNVIRLVAGEMGQNEPDQGGQRGVIINTASVAAFEGQVGQAAYSASKGGIVGMTLPIARDLAPIGIRVMTIAPGLFGTPLLTSLPEKVCNFLASQVPFPSRLGDPAEYAHLVQAIIENPFLNGEVIRLDGAIRMQP

SEQ ID NO: 146810 - protein, 169 aa, Artificial Sequence
  derived and/or modified sequence
MAAACRSVKGLVAVITGGASGLGLATAERLVGQGASAVLLDLPNSGGEAQAKKLGNNCVFAPADVTSEKDVQTALALAKGKFGRVDVAVNCAGIAVASKTYNLKKGQTHTLEDFQRVLDVNLMGTFNVIRLVAGEMGQNEPDQGGQRGVIINTASVAAFEGQVCLAPHC

SEQ ID NO: 146811 - DNA, 786 bp, Artificial Sequence
  derived and/or modified sequence
atggccgctgcctgccggagtgtgaaaggtcttgtcgcagtgattacaggaggtgccagtggcctggggttggcgacggccgaaagattggtcggtcaaggggcctctgcagtactcctggacttgcctaatagcggcggagaggcccaagccaaaaaactgggcaataactgtgtcttcgcccccgccgacgtcacctcagaaaaggacgtccaaactgctctggcactggccaaggggaagtttgggagggtggatgtggccgtgaactgtgccggcatcgccgtcgcctctaaaacctacaacctcaagaaaggtcaaacccacaccctggaagattttcagagagttctcgacgtgaacttgatggggaccttcaatgtgatccggctggtggctggcgaaatggggcaaaacgagccggaccagggaggccagcgtggtgttattatcaacacggccagtgtcgccgcattcgagggacaggtggggcaggccgcctacagcgccagcaagggcgggattgtcgggatgacgctgcctatcgccagagacctggcccccattggtattcgtgtgatgacaattgctccagggctgtttggcactcctttgctgactagcctacccgagaaggtgtgcaatttcctggcctcccaggtccctttccccagccgtctaggtgaccccgccgagtatgcccacctggtgcaggccataattgagaatccattcctcaatggggaggtcattaggctagacggcgccattcgaatgcagccctag

SEQ ID NO: 146812 - DNA, 960 bp, Artificial Sequence
  derived and/or modified sequence
cccatcccgtggagtggccggcgacaagatggcagcagcgtgtcggagcgtgaagggcctggtggcggtaataaccggaggagcctcgggcctgggcctggccacggcggagcgacttgtggggcagggagcctctgctgtgcttctggacctgcccaactcgggtggggaggcccaagccaagaagttaggaaacaactgcgttttcgccccagccgacgtgacctctgagaaggatgtgcaaacagctctggctctagcaaaaggaaagtttggccgtgtggatgtagctgtcaactgtgcaggcatcgcggtggctagcaagacgtacaacttaaagaagggccagacccataccttggaagacttccagcgagttcttgatgtgaatctcatgggcaccttcaatgtgatccgcctggtggctggtgagatgggccagaatgaaccagaccagggaggccaacgtggggtcatcatcaacactgccagtgtggctgccttcgagggtcaggttggacaagctgcatactctgcttccaaggggggaatagtgggcatgacactgcccattgctcgggatctggctcccataggtatccgggtgatgaccattgccccaggtctgtttggcaccccactgctgaccagcctcccagagaaagtgtgcaacttcttggccagccaagtgcccttccctagccgactgggtgaccctgctgagtatgctcacctcgtacaggccatcatcgagaacccattcctcaatggagaggtcatccggctggatggggccattcgtatgcagccttgaagggagaaggcagagaaaacacacgctcctctgcccttcctttccctggggtactactctccagcttgggaggaagcccagtagccattttgtaactgcctaccagtcgccctctgtgcctaataaagtctctttttctcacagag

SEQ ID NO: 146813 - DNA, 823 bp, Artificial Sequence
  derived and/or modified sequence
acaagatggcagcagcgtgtcggagcgtgaagggcctggtggcggtaataaccggaggagcctcgggcctgggcctggccacggcggagcgacttgtggggcagggagcctctgctgtgcttctggacctgcccaactcgggtggggaggcccaagccaagaagttaggaaacaactgcgttttcgccccagccgacgtgacctctgagaaggatgtgcaaacagctctggctctagcaaaaggaaagtttggccgtgtggatgtagctgtcaactgtgcaggcatcgcggtggctagcaagacgtacaacttaaagaagggccagacccataccttggaagacttccagcgagttcttgatgtgaatctcatgggcaccttcaatgtgatccgcctggtggctggtgagatgggccagaatgaaccagaccagggaggccaacgtggggtcatcatcaacactgccagtgtggctgccttcgagggtcaggtctgtttggcaccccactgctgaccagcctcccagagaaagtgtgcaacttcttggccagccaagtgcccttccctagccgactgggtgaccctgctgagtatgctcacctcgtacaggccatcatcgagaacccattcctcaatggagaggtcatccggctggatggggccattcgtatgcagccttgaagggagaaggcagagaaaacacacgctcctctgcccttcctttccctggggtactactctccagcttgggaggaagcccagtagccattttgtaactgcctaccagtcgccctctgtgcctaataaagtctctttttctca

SEQ ID NO: 146814 - DNA, 786 bp, Artificial Sequence
  derived and/or modified sequence
atggctgctgcctgccgctctgtgaagggcctggtggccgtcatcaccggcggggccagcggcctgggcctggccacagctgagcggctggtgggccagggcgccagcgctgtgctgctggacctgcccaacagcggcggggaggcccaggccaagaagctgggcaacaactgtgtgtttgccccagcagatgtgaccagcgagaaggatgtgcagacagccctggccctggccaagggcaagtttggccgggtggatgtggccgtgaactgtgccggcattgctgtggccagcaagacctacaacctgaagaagggccagacccacaccctggaggacttccagagggtgctggatgtgaacctgatgggcaccttcaacgtcatccggctggtggccggggagatgggccagaatgaaccagaccagggcggccagaggggcgtcatcatcaacacagcctctgtggccgcctttgagggccaggtgggccaggccgcctacagcgccagcaagggcggcatcgtgggcatgaccctgcccatcgcccgggacctggcccccatcggcatccgggtgatgaccatcgcccctggcctgtttggcacccccctgctgaccagcctgcctgagaaggtgtgcaacttcctggccagccaggtgcccttccccagccggctgggggaccctgcagaatatgcccacctggtgcaggccatcatcgagaaccccttcctgaatggagaggtgatccggctggatggagccatccgcatgcagccctag

SEQ ID NO: 146815 - DNA, 786 bp, Artificial Sequence
  derived and/or modified sequence
atggccgccgcctgccggagcgtgaagggcctggtggccgtgatcactggcggggcctctgggctcggcctggccaccgctgagcgacttgtgggccaaggagcctcagcagtactgctggacctgccgaatagtgggggggaagcccaggcaaaaaagctcggaaacaactgtgtgtttgctcccgctgatgtgacttccgaaaaagacgtacagacggccctggcactcgccaaaggcaaatttggccgggttgacgtcgccgtgaactgcgccggcattgctgtggcttccaaaacctacaaccttaagaaaggacaaacacacaccttagaggatttccagagggtactagatgtgaacctgatgggcacgttcaacgtcatacgactcgttgcgggagaaatgggacagaacgagccagaccagggcggtcagaggggcgtgatcatcaatactgcctccgtggccgctttcgaaggccaggtcgggcaggccgcatattctgcctcgaaagggggcattgtcggaatgacactgccaatcgctcgggatcttgccccgatcggaatccgcgtcatgacaattgctcccggattgtttggcacaccattactcacatccctacctgaaaaggtgtgtaatttcctcgcctcacaagtcccttttccgagccgccttggagatcccgcagagtatgcccacctggtgcaggctatcattgagaatccctttctgaatggagaggtaatccgcctggacggagccattcggatgcagccctag

SEQ ID NO: 146816 - DNA, 786 bp, Artificial Sequence
  derived and/or modified sequence
atggcagcagcgtgtcgcagcgtcaaggggctagttgccgtgattacggggggagcctccggactgggactcgctacagccgagcgcttggtcggtcaaggagcctctgcagtgcttctagatctgccgaatagtggcggagaagcccaggccaagaagctgggtaacaactgcgtcttcgctcccgcagatgtcacctcggagaaagatgttcaaacagctctcgcgctcgccaaaggaaagttcgggagagtggacgtggccgtgaactgcgctggcatagccgtggcctccaaaacgtataatctcaaaaaaggacagacacacactctagaagattttcagcgagttctggatgttaacctgatggggacattcaacgttataagactggtggccggtgagatgggccagaatgagcccgatcagggaggtcagagaggggtgattataaataccgcctccgtggccgcttttgagggacaagtgggccaagccgcttactcagcctccaaaggaggcattgtaggtatgaccctcccaatagcccgtgatttagcacctatcggcattcgtgtaatgactatcgcccctggactcttcgggacacccttactgacatccctccctgaaaaagtatgtaattttctcgcatctcaggttccgtttccatccaggttgggagaccctgcagagtatgcccacctggtgcaggccatcattgaaaatccattcctgaacggcgaagtgattaggttggacggggctatcagaatgcagccatag

SEQ ID NO: 146817 - DNA, 786 bp, Artificial Sequence
  derived and/or modified sequence
atggccgccgcatgtaggtcagtaaagggcctagtcgccgtgattacaggaggtgcaagcggacttggtctcgccacggctgaaaggcttgtaggtcaaggggcttccgctgtcctgctagacctcccgaattctggcggggaggcgcaggctaaaaaactgggaaacaattgtgtcttcgctcctgcagacgtaacatccgaaaaggacgtccaaactgctctcgctttagccaagggcaagtttggaagagtggacgtggccgtgaattgcgccggaatcgcagttgccagtaaaacttataacctgaaaaaaggacagactcacaccctggaggatttccagcgcgttcttgacgtgaatttgatgggcacatttaacgtcatcaggctcgtggcaggagaaatgggtcagaacgaaccggatcagggaggccagaggggggtgatcattaacaccgcttccgttgctgcgttcgaaggacaggtgggccaggccgcttattctgcctctaagggaggtattgtaggaatgaccctcccaattgcacgcgacctggctccgatcggaatcagggtcatgacaatcgctcctggccttttcggtacgcctctcctcacctctttaccagaaaaagtatgtaacttccttgcctcacaagtccccttcccctcccgtctgggagaccctgccgaatacgcccatctggtccaggcaatcattgagaatccatttcttaacggtgaagtgatacgactagatggcgccatcagaatgcagccctag

SEQ ID NO: 146818 - DNA, 786 bp, Artificial Sequence
  derived and/or modified sequence
atggccgcagcatgccggagtgtaaaaggtctggtggcagtcatcacaggcggtgctagcgggctgggacttgccaccgctgaacgactagttggacaaggggcctcagcggtcttgttagatctgcccaatagcgggggtgaagcccaggcaaaaaaattaggaaataattgtgtgtttgcccctgcggatgtgacttctgagaaggacgtgcaaaccgctctcgccctggccaaggggaaatttggtagagtcgacgttgccgtcaattgcgcagggatcgccgtcgcctcgaagacctacaatctgaagaagggtcaaactcatacactggaggatttccaacgtgtgctggatgttaacctaatgggcacattcaacgtcatccgattagtagcgggcgaaatgggccagaacgaaccagaccaggggggccagcggggcgtgattataaatacagcatctgttgctgctttcgaaggacaggtgggtcaggcggcatacagtgcaagtaaaggaggtattgtgggtatgacgctccctatcgccagggacctcgctcctattgggattcgtgttatgaccatcgctcctggcttgtttggtaccccacttctcacgtcactgccagaaaaagtctgcaacttccttgcgtctcaagtaccctttcctagtcgtttaggcgatcctgccgagtatgctcacctcgtacaggcaataatcgagaatccttttctgaatggggaagtgattagactggacggagcaatcagaatgcagccctag

SEQ ID NO: 146819 - DNA, 786 bp, Artificial Sequence
  derived and/or modified sequence
atggccgccgcctgcagaagcgtgaagggcctggtggccgtgatcaccggcggcgccagcggcctgggcctggccaccgccgagagactggtgggccagggcgccagcgccgtgctgctggacctgcccaacagcggcggcgaggcccaggccaagaagctgggcaacaactgcgtgttcgcccccgccgacgtgaccagcgagaaggacgtgcagaccgccctggccctggccaagggcaagttcggcagagtggacgtggccgtgaactgcgccggcatcgccgtggccagcaagacctacaacctgaagaagggccagacccacaccctggaggacttccagagagtgctggacgtgaacctgatgggcaccttcaacgtgatcagactggtggccggcgagatgggccagaacgagcccgaccagggcggccagagaggcgtgatcatcaacaccgccagcgtggccgccttcgagggccaggtgggccaggccgcctacagcgccagcaagggcggcatcgtgggcatgaccctgcccatcgccagagacctggcccccatcggcatcagagtgatgaccatcgcccccggcctgttcggcacccccctgctgaccagcctgcccgagaaggtgtgcaacttcctggccagccaggtgcccttccccagcagactgggcgaccccgccgagtacgcccacctggtgcaggccatcatcgagaaccccttcctgaacggcgaggtgatcagactggacggcgccatcagaatgcagccctag

SEQ ID NO: 146820 - protein, 240 aa, Artificial Sequence
  derived and/or modified sequence
MSRSNRQKEYKCGDLVFAKMKGYPHWPARIDEMPEAAVKSTANKYQVFFFGTHETAFLGPKDLFPYEESKEKFGKPNKRKGFSEGLWEIENNPTVKASGYQSSQKKSCVEEPEPEPEAAEGDGDKKGNAEGSSDEEGKLVIDEPAKEKNEKGALKRRAGDLLEDSPKRPKEAENPEGEEKEAATLEVERPLPMEVEKNSTPSEPGSGRGPPQEEEEEEDEEEEATKEDAEAPGIRDHESL

SEQ ID NO: 146821 - protein, 262 aa, Artificial Sequence [sequence omitted]

SEQ ID NO: 146822 - DNA, 723 bp, Artificial Sequence
  derived and/or modified sequence
atgtccaggagcaacagacaaaaggagtataaatgcggagacttggtgttcgcaaaaatgaaggggtaccctcattggccagcaaggatcgacgaaatgcctgaagccgctgtcaaatccaccgccaacaaatatcaagtcttcttttttggaacacacgaaaccgcctttctaggtcctaaggacctgtttccctatgaggaatcaaaggaaaagttcggtaagccgaataaaaggaagggattttcagaggggctgtgggagattgagaataaccccacagtgaaagcctcaggctaccagagcagccagaagaagtcctgtgtggaggaacctgagccagagcccgaggctgcagagggtgacggagataaaaagggaaacgccgaagggagtagtgacgaagaggggaagctggtaatcgatgagccagcaaaggagaaaaatgaaaagggcgcactgaagcggcgcgccggcgatcttcttgaagattccccgaagcgtccgaaggaagccgagaatcccgaaggcgaagagaaagaagctgctaccctggaggtcgaacggcctctcccaatggaggtcgagaaaaacagcaccccaagcgagcccggatccgggcggggtccacctcaagaagaggaggaggaagaggatgaagaggaggaggctactaaggaggatgctgaagcccccgggatacgggaccatgaatctctttag

SEQ ID NO: 146823 - DNA, 789 bp, Artificial Sequence
  derived and/or modified sequence
atgtctagaagtaatcgccagaaggaatacaagtgtggtgacctcgtgttcgccaaaatgaaaggttaccctcactggcccgcccgcattgatgagatgcctgaagccgctgtcaagagcactgctaataaatatcaggtatttttttccggccctacaagaagacacagctgggcaccgaaaacaagctctctgacaagaaatccacgccgctcacttgccagcccaacacgaggaaagggaagtgcacgcggctgtggccgctcccgtacaaccctgctgtcaaggctacccgcgatttcaccacccccatcttgtactgaaccctgtctgcctggccagtgggtgtaccctggagctaaccctactgagtccagtcagaaaaagtcatgcgtagaagaacctgaacccgaacccgaagctgccgaaggggacggcgacaagaagggcaacgccgaaggctcttctgacgaggagggtaagttggtcatagatgaaccggcaaaggagaaaaacgaaaaaggcgccctgaaacgcagggccggggacctgctcgaagattctcccaagaggccaaaagaggcagagaatcctgaaggcgaagagaaggaggcagcaacactggaggtggagaggccactgcccatggaagtcgagaaaaatagtactccttctgagcctgggtcagggcggggacccccacaggaggaggaagaggaggaggacgaggaagaggaggctaccaaagaagatgccgaagctccgggtatcagagatcacgaaagatag

SEQ ID NO: 146824 - DNA, 723 bp, Artificial Sequence
  derived and/or modified sequence
atgagtagatctaaccggcagaaggagtataaatgcggtgacttagtgtttgctaaaatgaagggttatcctcactggccagcacgcatcgacgaaatgcctgaggccgctgtgaagtccactgctaacaaatatcaggttttcttcttcggtacacacgagactgccttcctggggcctaaagacctgttcccttatgaggaatccaaggaaaaatttgggaaaccgaataaacggaagggcttttccgagggtctgtgggagattgagaacaacccgacggttaaagcatcggggtaccagagctcccagaaaaaatcttgcgtcgaagaacctgagcctgagcccgaagcagccgaaggcgacggcgacaaaaagggaaatgccgaggggtccagcgacgaggagggaaagttggtgatagacgagcctgccaaagagaagaatgaaaagggggccctcaaacgcagggctggcgacctgctggaagattcccctaagcgtccaaaggaggcggaaaaccccgaaggcgaggagaaggaagccgctacattggaagtcgaacggccgctgccaatggaggtggagaagaactccactccaagcgaacccgggtctggccgtggtcctccccaggaggaagaggaggaagaggacgaggaagaagaagctacaaaggaggacgccgaggcccccggcattagagatcatgagtctctttag

SEQ ID NO: 146825 - DNA, 2380 bp, Artificial Sequence
  derived and/or modified sequence
gaggaggagtggggaccgggcggggggtggaggaagaggcctcgcgcagaggagggagcaattgaatttcaaacacaaacaactgcacgagcgcgcacccaccgcgccggagccttgccccgatccgcgcccgccccgtccgtgcggcgcgcgggcggagacgccgtggccgcgccggagctcgggccgggggccaccatcgaggcgggggccgcgcgagggccggagcggagcggcgccgccaccgccgcacgcgcaaacttgggctcgcgcttcccggcccggcgcggagcccggggcgcccggagccccgccatgtcgcgatccaaccggcagaaggagtacaaatgcggggacctggtgttcgccaagatgaagggctacccacactggccggcccggattgacgagatgcctgaggctgccgtgaaatcaacagccaacaaataccaagtcttttttttcgggacccacgagacggcattcctgggccccaaagacctcttcccttacgaggaatccaaggagaagtttggcaagcccaacaagaggaaagggttcagcgaggggctgtgggagatcgagaacaaccctactgtcaaggcttccggctatcagtcctcccagaaaaagagctgtgtggaagagcctgaaccagagcccgaagctgcagagggtgacggtgataagaaggggaatgcagagggcagcagcgacgaggaagggaagctggtcattgatgagccagccaaggagaagaacgagaaaggagcgttgaagaggagagcaggggacttgctggaggactctcctaaacgtcccaaggaggcagaaaaccctgaaggagaggagaaggaggcagccaccttggaggttgagaggccccttcctatggaggtggaaaagaatagcaccccctctgagcccggctctggccgggggcctccccaagaggaagaagaggaggaggatgaagaggaagaggctaccaaggaagatgctgaggccccaggcatcagagatcatgagagcctgtagccaccaatgtttcaagaggagcccccaccctgttcctgctgctgtctgggtgctactggggaaactggccatggcctgcaaactgggaacccctttcccaccccaacctgctctcctcttctactcacttttcccactccaagcccagcccatggagattgacctggatggggcaggccacctggctctcacctctaggtccccatactcctatgatctgagtcagagccatgtcttctccctggaatgagttgaggccactgtgttccttccgcttggagctattttccaggcttctgctggggcctgggacaactgctcccacctcctgacacccttctcccactctcctaggcattctggacctctgggttgggatcaggggtaggaatggaaaggatggagcatcaacagcagggtgggcttgtggggcctgggaggggcaatcctcaaatgcggggtgggggcagcacaggagggcggcctccttctgagctcctgtcccctgctacacctattatcccagctgcctagattcagggaaagtgggacagcttgtaggggaggggctcctttccataaatccttgatgattgacaacacccatttttccttttgccgaccccaagagttttgggagttgtagttaatcatcaagagaatttggggcttccaagttgttcgggccaaggacctgagacctgaagggttgactttacccatttgggtgggagtgttgagcatctgtccccctttagatctctgaagccacaaataggatgcttgggaagactcctagctgtcctttttcctctccacacagtgctcaaggccagcttatagtcatatatatcacccagacataaaggaaaagacacattttttaggaaatgtttttaataaaagaaaattacaaaaaaaaattttaaagacccctaaccctttgtgtgctctccattctgctccttccccatcgttgcccccatttctgaggtgcactgggaggctccccttctatttggggcttgatgactttctttttgtagctggggctttgatgttccttccagtgtcatttctcatccacataccctgacctggccccctcagtgttgtcaccagatctgatttgtaacccactgagaggacagagagaaataagtgccctctcccaccctcttcctactggtctctctatgcctctctacagtctcgtctcttttaccctggcccctctcccttgggctctgatgaaaaattgctgactgtagctttggaagtttagctctgagaaccgtagatgatttcagttctaggaaaataaaacccgttgattactata

SEQ ID NO: 146826 - DNA, 992 bp, Artificial Sequence
  derived and/or modified sequence
accgccgcacgcgcaaacttgggctcgcgcttcccggcccggcgcggagcccggggcgcccggagccccgccatgtcgcgatccaaccggcagaaggagtacaaatgcggggacctggtgttcgccaagatgaagggctacccacactggccggcccggattgacgagatgcctgaggctgccgtgaaatcaacagccaacaaataccaagtctttttttcgggacccacgagacggcattcctgggccccaaagacctcttcccttacgaggaatccaaggagaagtttggcaagcccaacaagaggaaagggttcagcgaggggctgtgggagatcgagaacaaccctactgtcaaggcttccggctatcagccctcccccctcctgcacagagccctgcctgcccggccagtgggtttaccccggggctaatccgacagagtcctcccagaaaaagagctgtgtggaagagcctgaaccagagcccgaagctgcagagggtgacggtgataagaaggggaatgcagagggcagcagcgacgaggaagggaagctggtcattgatgagccagccaaggagaagaacgagaaaggagcgttgaagaggagagcaggggacttgctggaggactctcctaaacgtcccaaggaggcagaaaaccctgaaggagaggagaaggaggcagccaccttggaggttgagaggccccttcctatggaggtggaaaagaatagcaccccctctgagcccggctctggccgggggcctccccaagaggaagaagaggaggaggatgaagaggaagaggctaccaaggaagatgctgaggccccaggcatcagagatcatgagaggtgagtgagccccctgaccccttggcagctggactaggggggaccggccactctcggagaagaggatgaaaagggcctgcagtggtcagcctctcgggaggcagggtgggctctcctaggagaccggcactggct

SEQ ID NO: 146827 - DNA, 2073 bp, Artificial Sequence
  derived and/or modified sequence
gcgcgcgggcggagacgccgtggccgcgccggagctcgggccgggggccaccatcgaggcgggggccgcgcgagggccggagcggagcggcgccgccaccgccgcacgcgcaaacttgggctcgcgcttcccggcccggcgcggagcccggggcgcccggagccccgccatgtcgcgatccaaccggcagaaggagtacaaatgcggggacctggtgttcgccaagatgaagggctacccacactggccggcccggattgacgagatgcctgaggctgccgtgaaatcaacagccaacaaataccaagtcttttttttcgggacccacgagacggcattcctgggccccaaagacctcttcccttacgaggaatccaaggagaagtttggcaagcccaacaagaggaaagggttcagcgaggggctgtgggagatcgagaacaaccctactgtcaaggcttccggctatcagtcctcccagaaaaagagctgtgtggaagagcctgaaccagagcccgaagctgcagagggtgacggtgataagaaggggaatgcagagggcagcagcgacgaggaagggaagctggtcattgatgagccagccaaggagaagaacgagaaaggagcgttgaagaggagagcaggggacttgctggaggactctcctaaacgtcccaaggaggcagaaaaccctgaaggagaggagaaggaggcagccaccttggaggttgagaggccccttcctatggaggtggaaaagaatagcaccccctctgagcccggctctggccgggggcctccccaagaggaagaagaggaggaggatgaagaggaagaggctaccaaggaagatgctgaggccccaggcatcagagatcatgagagcctgtagccaccaatgtttcaagaggagcccccaccctgttcctgctgctgtctgggtgctactggggaaactggccatggcctgcaaactgggaacccctttcccaccccaacctgctctcctcttctactcacttttcccactccaagcccagcccatggagattgacctggatggggcaggccacctggctctcacctctaggtccccatactcctatgatctgagtcagagccatgtcttctccctggaatgagttgaggccactgtgttccttccgcttgggaggggcaatcctcaaatgcggggtgggggcagcacaggagggcggcctccttctgagctcctgtcccctgctacacctattatcccagctgcctagattcagggaaagtgggacagcttgtaggggaggggctcctttccataaatccttgatgattgacaacacccatttttccttttgccgaccccaagagttttgggagttgtagttaatcatcaagagaatttggggcttccaagttgttcgggccaaggacctgagacctgaagggttgactttacccatttgggtgggagtgttgagcatctgtccccctttagatctctgaagccacaaataggatgcttgggaagactcctagctgtcctttttcctctccacacagtgctcaaggccagcttatagtcatatatatcacccagacataaaggaaaagacacattttttaggaaatgtttttaataaaagaaaattacaaaaaaaaattttaaagacccctaaccctttgtgtgctctccattctgctccttccccatcgttgcccccatttctgaggtgcactgggaggctccccttctatttggggcttgatgactttctttttgtagctggggctttgatgttccttccagtgtcatttctcatccacataccctgacctggccccctcagtgttgtcaccagatctgatttgtaacccactgagaggacagagagaaataagtgccctctcccaccctcttcctactggtctctctatgcctctctacagtctcgtctcttttaccctggcccctctcccttgggctctgatgaaaaattgctgactgtagctttggaagtttagctctgagaaccgtagatgatttcagttctaggaaaataaaacccgttgattact

SEQ ID NO: 146828 - DNA, 723 bp, Artificial Sequence
  derived and/or modified sequence
atgagccgcagcaaccggcagaaggagtacaagtgtggggacctggtgtttgccaagatgaagggctacccccactggccagccagaattgatgagatgcctgaggccgctgtgaagagcacagccaacaagtaccaggtgttcttcttcggcacccatgaaacagccttcctgggccccaaggacctcttcccctatgaggagagcaaggagaagtttgggaagcccaacaagaggaagggcttcagcgagggcctgtgggagattgagaacaaccccaccgtgaaggccagcggctaccagagcagccagaagaagagctgtgtggaggagcctgagcctgagcctgaggccgcagaaggagatggagacaagaagggaaatgctgagggcagcagtgatgaggagggcaagctggtgattgatgagcccgccaaggagaagaatgaaaaaggagccctgaagaggcgggccggggacctgctggaggacagccccaagaggcccaaggaggctgaaaatcctgagggggaggagaaggaggccgccaccctggaggtggagcggcccctgcccatggaggtggagaagaacagcacccccagcgagcccggcagcggccggggccccccccaggaggaggaggaggaggaggatgaggaggaggaggccaccaaggaggatgctgaggcccctggcatccgggaccacgagagcctgtag

SEQ ID NO: 146829 - DNA, 789 bp, Artificial Sequence
  derived and/or modified sequence
atgagccgcagcaaccggcagaaggagtacaagtgtggggacctggtgtttgccaagatgaagggctacccccactggccagccagaattgatgagatgcctgaggccgctgtgaagagcacagccaacaagtaccaggtgttcttcagcggccccacccggcggcacagctgggcccccaagaccagcagcctgaccaggaacccccggcgcagcctggccagccccacccggggcaagggcagcgcccggggctgcggccgcagcaggaccaccctgctgagccggctgcctgccatcagccccccacccagctgcacagagccctgcctgcccggccagtgggtgtacccaggggccaaccccacagagagcagccagaagaagagctgtgtggaggagcctgagcctgagcctgaggccgcagaaggagatggagacaagaagggaaatgctgagggcagcagtgatgaggagggcaagctggtgattgatgagcccgccaaggagaagaatgagaagggggccctgaagagaagagctggggacctgctggaggacagccccaagaggcccaaggaggccgagaaccctgagggggaggagaaggaggccgccaccctggaggtggagcggcccctgcccatggaggtggagaagaacagcaccccatctgagcccggcagcggccggggccccccccaggaggaggaggaggaggaggatgaggaggaggaggccaccaaggaggatgctgaggcccctggcatccgggaccacgagaggtag

SEQ ID NO: 146830 - DNA, 723 bp, Artificial Sequence
  derived and/or modified sequence
atgagccggagcaaccggcagaaggagtacaagtgcggcgacctggtattcgccaaaatgaaaggatatccccactggccagctcggattgacgagatgcctgaggctgcagtgaagtcaacagcaaacaagtaccaggtcttcttctttggcactcatgagaccgcttttctgggacctaaggatttgttcccttatgaagaatcaaaggaaaagtttggtaagccaaataaacgcaagggtttcagcgagggcctatgggaaatcgagaacaaccctacggttaaagctagcggttaccaaagttcgcagaagaaatcctgtgtcgaggaacccgagcccgaacccgaggctgccgaaggtgatggcgataagaaaggtaatgccgagggcagctctgacgaggaggggaagcttgtaatcgatgagcctgccaaagagaagaacgagaaaggtgccttaaaacgccgggccggggacctgctggaggactccccaaaacgtcctaaagaagccgaaaaccctgaaggagaagaaaaagaggctgctacccttgaagtcgaacgaccgctcccaatggaggtggagaaaaactctaccccttcagagcccggctctggccgcggacctccccaagaggaggaagaagaagaggacgaggaagaggaggcgacaaaagaggatgctgaggcccctggaatccgcgaccatgagagcttgtag

SEQ ID NO: 146831 - DNA, 789 bp, Artificial Sequence
  derived and/or modified sequence
atgagccggagcaaccggcagaaggagtacaagtgcggcgacctggtattcgccaagatgaaggggtacccgcactggcccgctagaatcgatgaaatgccagaagccgcggtcaaatctacggccaacaaataccaagtttttttttccggtcccacccgcagacattcctgggcccccaaaactagctcactgaccagaaacccaagacgctccctcgctagccctaccagaggtaaaggctctgctcggggctgcggacgatcaaggacaacattgttatcacggctgcccgccatcagtcccccgccatcctgcaccgaaccttgcttgcctggtcagtgggtttatccgggcgcgaaccccacggagagctctcagaaaaaaagttgcgtcgaggaacccgaacccgagcccgaagccgcagagggagacggcgataagaaaggcaatgctgaggggtctagtgatgaggagggcaagctagttatcgacgagcctgctaaagaaaaaaacgagaaaggtgccctcaagaggagagctggcgacctgctggaagattcacccaaaaggccaaaggaggcagaaaaccctgagggtgaggagaaggaagctgcgactctggaggtcgaacgaccgctgccaatggaggtggaaaagaattcgaccccctcagagccaggcagcggacgggggcccccccaggaggaagaagaggaagaagatgaagaggaagaggctactaaggaagacgctgaggcgcccggaatccgcgaccacgaaagatag

SEQ ID NO: 146832 - DNA, 723 bp, Artificial Sequence
  derived and/or modified sequence
atgagccggagcaaccggcagaaggagtacaagtgcggcgacctggtgttcgcaaaaatgaagggttacccacattggcccgcccggatcgacgagatgccggaagccgcggtcaagtctactgccaacaagtatcaagtcttttttttcggcacccatgagacagcatttcttgggccaaaggatctgttcccttacgaagaaagtaaggaaaaatttggaaagcccaataaaaggaaggggtttagtgagggcctgtgggaaattgagaacaaccccaccgttaaggccagcggataccagtcctcccaaaaaaagagttgcgtggaggaacctgagccggagcccgaggcagcagaaggcgatggcgacaaaaaaggtaacgccgaggggtcctctgacgaggaaggaaaactagtgattgatgaacccgccaaggagaagaacgagaaaggagcattgaagcgccgcgccggcgatctgctggaagactcacctaaacggcctaaggaggctgagaaccccgaaggagaggagaaagaagcggcaacacttgaggtggaaaggccactgccaatggaagtcgaaaagaacagtaccccatcagagcctggctccggacgtggaccccctcaggaagaagaggaggaggaggatgaggaggaggaggccaccaaagaagacgccgaggctcccggcatcagggaccacgaaagcctatag

SEQ ID NO: 146833 - DNA, 723 bp, Artificial Sequence
  derived and/or modified sequence
atgagccgatccaatcgtcaaaaagagtacaagtgtggtgacctggtattcgcgaagatgaagggctacccccattggccagccagaatcgatgaaatgccagaagcagctgtaaagtctaccgctaataaatatcaggtcttctttttcggcactcatgaaacagcttttctgggtcctaaagacttgtttccctatgaagagagcaaagagaaattcggcaagcccaataagaggaagggcttttcggagggactgtgggagatcgaaaataatcccacagttaaggcctcgggatatcagtcaagccaaaagaaaagttgcgtggaggagccggagcctgagcccgaagcagccgaaggcgacggtgacaagaagggaaatgccgagggttcaagcgatgaagagggtaagctggtgatcgatgaacccgcaaaggaaaagaacgaaaagggggcattaaagaggagggcaggcgatctgcttgaagactctcccaagaggccaaaggaagcagagaaccccgagggtgaagagaaggaagcagctacgctggaagttgaaagaccgctccctatggaggttgaaaaaaattccaccccttctgagcccggttccggtcgcggtccccctcaggaggaggaggaggaggaagatgaggaggaggaggccactaaggaggacgcagaagccccagggataagagaccacgaatctctttag

SEQ ID NO: 146834 - DNA, 789 bp, Artificial Sequence
  derived and/or modified sequence
atgtctaggtccaaccggcaaaaggagtacaaatgcggagacctggtcttcgctaagatgaaggggtaccctcattggcccgcacgtatcgacgagatgcctgaggctgccgtgaagtcaaccgccaacaagtatcaggtcttcttttcaggacccacacgcagacatagctgggcccctaagacgagcagcttaacccgtaacccaagacgcagcctggctagtcccacaaggggaaaaggctccgcccgaggctgtgggagatcccgcactaccttattgtcacgtctgccagccatctccccccctccatcctgcacagagccctgccttcctggtcaatgggtgtacccaggcgctaaccccaccgagagcagtcagaagaaaagctgtgtggaagagcccgagcctgaaccagaggccgcagagggagatggcgataagaaggggaacgcggagggctcaagcgatgaagaaggaaaactggtgattgacgaacctgccaaggagaagaatgaaaagggggctcttaaacggagggccggagacttactagaggattcaccgaagaggccgaaggaggcggagaatcctgaaggggaggagaaggaagctgctacccttgaggtggaacggcctcttcctatggaagtggagaagaatagcacacccagcgaaccaggctctgggagggggccacctcaggaggaagaggaggaggaagacgaggaagaagaggctaccaaagaagatgcggaggcccctgggatccgcgatcacgaaagatag

SEQ ID NO: 146835 - DNA, 723 bp, Artificial Sequence
  derived and/or modified sequence
atgtctcgctccaaccgccagaaggaatacaagtgcggtgacctggtctttgctaaaatgaagggttatcctcactggcctgctaggatcgatgagatgccggaagccgcagttaaatccactgccaacaagtatcaggtgttctttttcggtacacatgagacggcatttctcggccctaaagatctctttccatacgaggaaagtaaagagaagttcggaaaacccaataaaagaaagggattcagtgagggactctgggagatcgagaacaaccctactgtcaaagcctctggctatcagagtagccagaagaagtcatgcgtggaggagccagagccagagcctgaagccgctgagggggatggtgacaagaagggtaacgccgaaggctcgtcagacgaggaagggaaattagtaatagacgagcctgctaaagaaaaaaacgagaaaggcgcattgaaacgcagagcaggcgatcttctcgaggattcacctaaacggcctaaggaggccgagaaccccgagggggaggagaaagaggccgctaccctggaggtcgagagaccactccctatggaagtagaaaagaatagcacacccagcgagcctggcagtggaagagggcctcctcaagaagaagaagaggaggaggatgaagaggaagaagcaacaaaggaggacgctgaagccccagggatccgcgatcacgaaagtctgtag

SEQ ID NO: 146836 - DNA, 723 bp, Artificial Sequence
  derived and/or modified sequence
atgagcagaagcaacagacagaaggagtacaagtgcggcgacctggtgttcgccaagatgaagggctacccccactggcccgccagaatcgacgagatgcccgaggccgccgtgaagagcaccgccaacaagtaccaggtgttcttcttcggcacccacgagaccgccttcctgggccccaaggacctgttcccctacgaggagagcaaggagaagttcggcaagcccaacaagagaaagggcttcagcgagggcctgtgggagatcgagaacaaccccaccgtgaaggccagcggctaccagagcagccagaagaagagctgcgtggaggagcccgagcccgagcccgaggccgccgagggcgacggcgacaagaagggcaacgccgagggcagcagcgacgaggagggcaagctggtgatcgacgagcccgccaaggagaagaacgagaagggcgccctgaagagaagagccggcgacctgctggaggacagccccaagagacccaaggaggccgagaaccccgagggcgaggagaaggaggccgccaccctggaggtggagagacccctgcccatggaggtggagaagaacagcacccccagcgagcccggcagcggcagaggccccccccaggaggaggaggaggaggaggacgaggaggaggaggccaccaaggaggacgccgaggcccccggcatcagagaccacgagagcctgtag

SEQ ID NO: 146837 - DNA, 789 bp, Artificial Sequence
  derived and/or modified sequence
atgagcagaagcaacagacagaaggagtacaagtgcggcgacctggtgttcgccaagatgaagggctacccccactggcccgccagaatcgacgagatgcccgaggccgccgtgaagagcaccgccaacaagtaccaggtgttcttcagcggccccaccagaagacacagctgggcccccaagaccagcagcctgaccagaaaccccagaagaagcctggccagccccaccagaggcaagggcagcgccagaggctgcggcagaagcagaaccaccctgctgagcagactgcccgccatcagccccccccccagctgcaccgagccctgcctgcccggccagtgggtgtaccccggcgccaaccccaccgagagcagccagaagaagagctgcgtggaggagcccgagcccgagcccgaggccgccgagggcgacggcgacaagaagggcaacgccgagggcagcagcgacgaggagggcaagctggtgatcgacgagcccgccaaggagaagaacgagaagggcgccctgaagagaagagccggcgacctgctggaggacagccccaagagacccaaggaggccgagaaccccgagggcgaggagaaggaggccgccaccctggaggtggagagacccctgcccatggaggtggagaagaacagcacccccagcgagcccggcagcggcagaggccccccccaggaggaggaggaggaggaggacgaggaggaggaggccaccaaggaggacgccgaggcccccggcatcagagaccacgagagatag

SEQ ID NO: 146838 - DNA, 1694 bp, Artificial Sequence
  derived and/or modified sequence
gaggccaggggagggtgcgaaggaggcgcctgcctccaacctgcgggcgggaggtgggtggctgcggggcaattgaaaaagagccggcgaggagttccccgaaacttgttggaactccgggctcgcgcggaggccaggagctgagcggcggcggctgccggacgatgggagcgtgagcaggacggtgataacctctccccgatcgggttgcgagggcgccgggcagaggccaggacgcgagccgccagcggtgggacccatcgacgacttcccggggcgacaggagcagccccgagagccagggcgagcgcccgttccaggtggccggaccgcccgccgcgtccgcgccgcgctccctgcaggcaacgggagacgcccccgcgcagcgcgagcgcctcagcgcggccgctcgctctccccctcgagggacaaacttttcccaaacccgatccgagcccttggaccaaactcgcctgcgccgagagccgtccgcgtagagcgctccgtctccggcgagatgtccgagcgcaaagaaggcagaggcaaagggaagggcaagaagaaggagcgaggctccggcaagaagccggagtccgcggcgggcagccagagcccagccttgcctccccgattgaaagagatgaaaagccaggaatcggctgcaggttccaaactagtccttcggtgtgaaaccagttctgaatactcctctctcagattcaagtggttcaagaatgggaatgaattgaatcgaaaaaacaaaccacaaaatatcaagatacaaaaaaagccagggaagtcagaacttcgcattaacaaagcatcactggctgattctggagagtatatgtgcaaagtgatcagcaaattaggaaatgacagtgcctctgccaatatcaccatcgtggaatcaaacgagatcatcactggtatgccagcctcaactgaaggagcatatgtgtcttcagagtctcccattagaatatcagtatccacagaaggagcaaatacttcttcatctacatctacatccaccactgggacaagccatcttgtaaaatgtgcggagaaggagaaaactttctgtgtgaatggaggggagtgcttcatggtgaaagacctttcaaacccctcgagatacttgtgcaagtaagaaaagaaatcctgtgtgtcgcttatgtctataactccttgtttcagatgattctatgtctcatgatgtattgttgctttttttccaattttgttgcatcatgttgaataatgctgttttatatgtagagtgttttaaaacattcacaccattcgtcatcactcctctgtcatatgcagaattgttttttgctcttttcaatgtgtgtgaggtgttttttgtttttgtttttgttttttgccatgttatttatagtgttgctttccttgtggtttttcttgttgttattcagaaaagatgtgcagatatcacagaggcctataacttttggtatctacttctacatccaatgtatgaattaagctgtaagataatgttgctttcttatcccagtgatcacctgccaaatgaataagacaacaaagagaagcagaagggcagaagattatttactgacatatatctattacacttgggattgtcttactgttgcataactattttttaaacggagtttagttttatattgctagtaaaaaaa

SEQ ID NO: 146839 - protein, 472 aa, Artificial Sequence
  derived and/or modified sequence
MLGTVKMEGHETSDWNSYYADTQEAYSSVPVSNMNSGLGSMNSMNTYMTMNTMTTSGNMTPASFNMSYANPGLGAGLSPGAVAGMPGGSAGAMNSMTAAGVTAMGTALSPSGMGAMGAQQAASMNGLGPYAAAMNPCMSPMAYAPSNLGRSRAGGGGDAKTFKRSYPHAKPPYSYISLITMAIQQAPSKMLTLSEIYQWIMDLFPYYRQNQQRWQNSIRHSLSFNDCFVKVARSPDKPGKGSYWTLHPDSGNMFENGCYLRRQKRFKCEKQPGAGGGGGSGSGGSGAKGGPESRKDPSGASNPSADSPLHRGVHGKTGQLEGAPAPGPAASPQTLDHSGATATGGASELKTPASSTAPPISSGPGALASVPASHPAHGLAPHESQLHLKGDPHYSFNHPFSINNLMSSSEQQHKLDFKAYEQALQYSPYGSTLPASLPLGSASVTTRSPIEPSALEPAYYQGVYSRPVLNTS

SEQ ID NO: 146840 - protein, 439 aa, Artificial Sequence
  derived and/or modified sequence
MNSGLGSMNSMNTYMTMNTMTTSGNMTPASFNMSYANPGLGAGLSPGAVAGMPGGSAGAMNSMTAAGVTAMGTALSPSGMGAMGAQQAASMNGLGPYAAAMNPCMSPMAYAPSNLGRSRAGGGGDAKTFKRSYPHAKPPYSYISLITMAIQQAPSKMLTLSEIYQWIMDLFPYYRQNQQRWQNSIRHSLSFNDCFVKVARSPDKPGKGSYWTLHPDSGNMFENGCYLRRQKRFKCEKQPGAGGGGGSGSGGSGAKGGPESRKDPSGASNPSADSPLHRGVHGKTGQLEGAPAPGPAASPQTLDHSGATATGGASELKTPASSTAPPISSGPGALASVPASHPAHGLAPHESQLHLKGDPHYSFNHPFSINNLMSSSEQQHKLDFKAYEQALQYSPYGSTLPASLPLGSASVTTRSPIEPSALEPAYYQGVYSRPVLNTS

SEQ ID NO: 146841 - DNA, 3124 bp, Artificial Sequence
  derived and/or modified sequence
taagatccacatcagctcaactgcacttgcctcgcagaggcagcccgctcacttcccgcggaggcgctccccggcgccgcgctccgcggcagccgcctgcccccggcgctgcccccgcccgccgcgccgccgccgccgccgcgcacgccgcgccccgcagctctgggcttcctcttcgcccgggtggcgttgggcccgcgcgggcgctcgggtgactgcagctgctcagctcccctcccccgccccgcgccgcgcggccgcccgtcgcttcgcacagggctggatggttgtattgggcagggtggctccaggatgttaggaactgtgaagatggaagggcatgaaaccagcgactggaacagctactacgcagacacgcaggaggcctactcctccgtcccggtcagcaacatgaactcaggcctgggctccatgaactccatgaacacctacatgaccatgaacaccatgactacgagcggcaacatgaccccggcgtccttcaacatgtcctatgccaacccgggcctaggggccggcctgagtcccggcgcagtagccggcatgccggggggctcggcgggcgccatgaacagcatgactgcggccggcgtgacggccatgggtacggcgctgagcccgagcggcatgggcgccatgggtgcgcagcaggcggcctccatgaatggcctgggcccctacgcggccgccatgaacccgtgcatgagccccatggcgtacgcgccgtccaacctgggccgcagccgcgcgggcggcggcggcgacgccaagacgttcaagcgcagctacccgcacgccaagccgccctactcgtacatctcgctcatcaccatggccatccagcaggcgcccagcaagatgctcacgctgagcgagatctaccagtggatcatggacctcttcccctattaccggcagaaccagcagcgctggcagaactccatccgccactcgctgtccttcaatgactgcttcgtcaaggtggcacgctccccggacaagccgggcaagggctcctactggacgctgcacccggactccggcaacatgttcgagaacggctgctacttgcgccgccagaagcgcttcaagtgcgagaagcagccgggggccggcggcgggggcgggagcggaagcgggggcagcggcgccaagggcggccctgagagccgcaaggacccctctggcgcctctaaccccagcgccgactcgcccctccatcggggtgtgcacgggaagaccggccagctagagggcgcgccggcccccgggcccgccgccagcccccagactctggaccacagtggggcgacggcgacagggggcgcctcggagttgaagactccagcctcctcaactgcgccccccataagctccgggcccggggcgctggcctctgtgcccgcctctcacccggcacacggcttggcaccccacgagtcccagctgcacctgaaaggggacccccactactccttcaaccacccgttctccatcaacaacctcatgtcctcctcggagcagcagcataagctggacttcaaggcatacgaacaggcactgcaatactcgccttacggctctacgttgcccgccagcctgcctctaggcagcgcctcggtgaccaccaggagccccatcgagccctcagccctggagccggcgtactaccaaggtgtgtattccagacccgtcctaaacacttcctagctcccgggactggggggtttgtctggcatagccatgctggtagcaagagagaaaaaatcaacagcaaacaaaaccacacaaaccaaaccgtcaacagcataataaaatcccaacaactatttttatttcatttttcatgcacaacctttcccccagtgcaaaagactgttactttattattgtattcaaaattcattgtgtatattactacaaagacaaccccaaaccaatttttttcctgcgaagtttaatgatccacaagtgtatatatgaaattctcctccttccttgcccccctctctttcttccctctttcccctccagacattctagtttgtggagggttatttaaaaaaacaaaaaaggaagatggtcaagtttgtaaaatatttgtttgtgctttttccccctccttacctgaccccctacgagtttacaggtctgtggcaatactcttaaccataagaattgaaatggtgaagaaacaagtatacactagaggctcttaaaagtattgaaagacaatactgctgttatatagcaagacataaacagattataaacatcagagccatttgcttctcagtttacatttctgatacatgcagatagcagatgtctttaaatgaaatacatgtatattgtgtatggacttaattatgcacatgctcagatgtgtagacatcctccgtatatttacataacatatagaggtaatagataggtgatatacatgatacattctcaagagttgcttgaccgaaagttacaaggaccccaacccctttgtcctctctacccacagatggccctgggaatcaattcctcaggaattgccctcaagaactctgcttcttgctttgcagagtgccatggtcatgtcattctgaggtcacataacacataaaattagtttctatgagtgtataccatttaaagaatttttttttcagtaaaagggaatattacaatgttggaggagagataagttatagggagctggatttcaaaacgtggtccaagattcaaaaatcctattgatagtggccattttaatcattgccatcgtgtgcttgtttcatccagtgttatgcactttccacagttggacatggtgttagtatagccagacgggtttcattattatttctctttgctttctcaatgttaatttattgcatggtttattctttttctttacagctgaaattgctttaaatgatggttaaaattacaaattaaattgttaatttttatcaatgtgattgtaattaaaaatattttgatttaaataacaaaaataataccagattttaagccgtggaaaatgttcttgatcatttgcagttaaggactttaaataaatcaaatgttaacaaaaaaaaaaaaaaaa

SEQ ID NO: 146842 - DNA, 1419 bp, Artificial Sequence
  derived and/or modified sequence
atgctgggcaccgtgaagatggagggccacgagaccagcgactggaacagctactacgccgacacccaggaggcctacagcagcgtgcccgtgagcaacatgaacagcggcctgggcagcatgaacagcatgaacacctacatgaccatgaacaccatgaccaccagcggcaacatgacccccgccagcttcaacatgagctacgccaaccccggcctgggcgccggcctgagccccggcgccgtggccggcatgcccggcggcagcgccggcgccatgaacagcatgaccgccgccggcgtgaccgccatgggcaccgccctgagccccagcggcatgggcgccatgggcgcccagcaggccgccagcatgaacggcctgggcccctacgccgccgccatgaacccctgcatgagccccatggcctacgcccccagcaacctgggcagaagcagagccggcggcggcggcgacgccaagaccttcaagagaagctacccccacgccaagcccccctacagctacatcagcctgatcaccatggccatccagcaggcccccagcaagatgctgaccctgagcgagatctaccagtggatcatggacctgttcccctactacagacagaaccagcagagatggcagaacagcatcagacacagcctgagcttcaacgactgcttcgtgaaggtggccagaagccccgacaagcccggcaagggcagctactggaccctgcaccccgacagcggcaacatgttcgagaacggctgctacctgagaagacagaagagattcaagtgcgagaagcagcccggcgccggcggcggcggcggcagcggcagcggcggcagcggcgccaagggcggccccgagagcagaaaggaccccagcggcgccagcaaccccagcgccgacagccccctgcacagaggcgtgcacggcaagaccggccagctggagggcgcccccgcccccggccccgccgccagcccccagaccctggaccacagcggcgccaccgccaccggcggcgccagcgagctgaagacccccgccagcagcaccgccccccccatcagcagcggccccggcgccctggccagcgtgcccgccagccaccccgcccacggcctggccccccacgagagccagctgcacctgaagggcgacccccactacagcttcaaccaccccttcagcatcaacaacctgatgagcagcagcgagcagcagcacaagctggacttcaaggcctacgagcaggccctgcagtacagcccctacggcagcaccctgcccgccagcctgcccctgggcagcgccagcgtgaccaccagaagccccatcgagcccagcgccctggagcccgcctactaccagggcgtgtacagcagacccgtgctgaacaccagctag

SEQ ID NO: 146843 - DNA, 1320 bp, Artificial Sequence
  derived and/or modified sequence
atgaacagcggcctgggcagcatgaacagcatgaacacctacatgaccatgaacaccatgaccaccagcggcaacatgacccccgccagcttcaacatgagctacgccaaccccggcctgggcgccggcctgagccccggcgccgtggccggcatgcccggcggcagcgccggcgccatgaacagcatgaccgccgccggcgtgaccgccatgggcaccgccctgagccccagcggcatgggcgccatgggcgcccagcaggccgccagcatgaacggcctgggcccctacgccgccgccatgaacccctgcatgagccccatggcctacgcccccagcaacctgggcagaagcagagccggcggcggcggcgacgccaagaccttcaagagaagctacccccacgccaagcccccctacagctacatcagcctgatcaccatggccatccagcaggcccccagcaagatgctgaccctgagcgagatctaccagtggatcatggacctgttcccctactacagacagaaccagcagagatggcagaacagcatcagacacagcctgagcttcaacgactgcttcgtgaaggtggccagaagccccgacaagcccggcaagggcagctactggaccctgcaccccgacagcggcaacatgttcgagaacggctgctacctgagaagacagaagagattcaagtgcgagaagcagcccggcgccggcggcggcggcggcagcggcagcggcggcagcggcgccaagggcggccccgagagcagaaaggaccccagcggcgccagcaaccccagcgccgacagccccctgcacagaggcgtgcacggcaagaccggccagctggagggcgcccccgcccccggccccgccgccagcccccagaccctggaccacagcggcgccaccgccaccggcggcgccagcgagctgaagacccccgccagcagcaccgccccccccatcagcagcggccccggcgccctggccagcgtgcccgccagccaccccgcccacggcctggccccccacgagagccagctgcacctgaagggcgacccccactacagcttcaaccaccccttcagcatcaacaacctgatgagcagcagcgagcagcagcacaagctggacttcaaggcctacgagcaggccctgcagtacagcccctacggcagcaccctgcccgccagcctgcccctgggcagcgccagcgtgaccaccagaagccccatcgagcccagcgccctggagcccgcctactaccagggcgtgtacagcagacccgtgctgaacaccagctag

SEQ ID NO: 146844 - DNA, 1419 bp, Artificial Sequence
  derived and/or modified sequence
atgctcggcacggtgaaaatggagggacacgaaacaagtgactggaatagctattatgccgacactcaagaggcctatagcagtgtgccagtctccaatatgaacagtgggctggggagtatgaactccatgaacacatacatgaccatgaataccatgacgacatcaggcaatatgacccctgcctcatttaacatgagctacgccaatcccggccttggcgccggactctctcctggagctgtagccgggatgcccgggggatctgccggcgcaatgaacagtatgaccgcagctggcgtgaccgccatgggtaccgccctgtcgccttccgggatgggcgcaatgggggcgcagcaggctgcttccatgaatggactgggaccatatgcggctgctatgaacccgtgtatgtctcccatggcttatgcaccatctaacctgggtaggtccagagccggaggaggtggcgatgcgaaaactttcaaaaggtcatacccacatgctaaacccccatatagctatatctcgctgattaccatggccattcaacaagctccctcaaaaatgctcactctgtcagagatctatcagtggatcatggacctgtttccctactaccggcagaaccagcagcggtggcaaaacagtatcagacactctctgagcttcaacgactgtttcgtgaaggttgctagaagccctgacaagcctgggaaggggagctactggactctgcaccccgacagcgggaacatgttcgagaatggatgctatctcagaaggcagaagaggtttaagtgtgaaaaacagccaggtgccggcggcggtggtggctctggcagcgggggttccggtgcaaagggcggacccgagagcaggaaggaccctagcggtgcatctaatccaagcgccgactctcccctgcaccgcggggtgcacgggaagaccggccagcttgagggggccccagcccccgggccagcagcctccccacagacgctcgatcactctggtgcaaccgcgaccggaggggcctccgagctgaagacacccgcttcctcaacggcccctccaatctcctccgggccaggagccctggcctcagtccctgcttcacatccggcccatggccttgcccctcacgagagccaattgcacctgaagggggacccacattactcattcaaccatccattttccatcaataatttgatgtctagcagcgaacagcagcataagctcgatttcaaggcttacgagcaggccctccagtattccccttatgggagcacgttaccagcttctctccccctgggctcagcaagtgtcaccaccaggtccccaatagaacctagcgccttggagccagcctactaccagggcgtgtatagtcggcctgtattaaatacgtcttag

SEQ ID NO: 146845 - DNA, 1320 bp, Artificial Sequence
  derived and/or modified sequence
atgaactcaggactgggcagtatgaattccatgaatacttacatgactatgaacacaatgaccacctcagggaatatgacacctgcgtcctttaacatgagttacgccaatcctgggctcggcgccggtctcagtcccggggctgttgctggtatgcctggcggcagtgccggagcaatgaattcgatgactgctgccggtgtgactgccatggggacagcattgtccccgtccggcatgggcgctatgggcgcgcagcaggccgccagcatgaacgggctcgggccctatgcagcagcaatgaatccatgtatgagtccaatggcctacgccccttctaatctgggaagaagccgcgcaggcggcggtggggatgccaaaacttttaagcggagttacccacatgccaaacccccctactcatacatttcccttatcaccatggccatccagcaagccccatcaaaaatgctgaccctgtctgaaatttaccaatggatcatggatcttttcccatattaccgccagaaccaacagaggtggcagaattcaattagacactccctaagctttaacgactgcttcgtgaaagtcgcccggagccccgataaacccggcaaggggtcgtattggactctccacccggatagcggaaatatgtttgaaaacggctgctaccttcgcagacagaagcggttcaagtgcgagaagcaacccggggctggaggcgggggcggcagtggaagcggtggttcgggtgccaaggggggtcccgaatcccggaaggatccctcaggcgcctctaatccgtcggcggactcacctctgcaccgtggggtgcatggaaagaccggccagctggagggcgcaccagcccctggtcctgcggcttccccccaaaccctcgaccatagcggtgccactgcaacaggcggagcgagtgagttaaaaactccagcttcaagcacggcccctcccatctcttcaggacctggcgccctcgcttccgtgcctgcctcccaccccgcccatggcctcgcacctcacgaaagtcagctccatctgaagggcgatccccactactcctttaatcacccgttctcgattaataatctgatgagcagcagtgagcagcagcataagctagactttaaggcttacgagcaagccctgcaatacagtccctatggctccaccctgcccgcatccttaccactggggtccgccagtgtgacaactcgctcacctatcgagccgtccgctctggaacccgcgtattatcagggtgtctacagcagaccagtgctgaatacttcgtag

SEQ ID NO: 146846 - DNA, 2862 bp, Artificial Sequence
  derived and/or modified sequence
cgcgcggccgcccgtcgcttcgcacagggctggatggttgtattgggcagggtggctccaggatgttaggaactgtgaagatggaagggcatgaaaccagcgactggaacagctactacgcagacacgcaggaggcctactcctccgtcccggtcagcaacatgaactcaggcctgggctccatgaactccatgaacacctacatgaccatgaacaccatgactacgagcggcaacatgaccccggcgtccttcaacatgtcctatgccaacccgggcctaggggccggcctgagtcccggcgcagtagccggcatgccggggggctcggcgggcgccatgaacagcatgactgcggccggcgtgacggccatgggtacggcgctgagcccgagcggcatgggcgccatgggtgcgcagcaggcggcctccatgaatggcctgggcccctacgcggccgccatgaacccgtgcatgagccccatggcgtacgcgccgtccaacctgggccgcagccgcgcgggcggcggcggcgacgccaagacgttcaagcgcagctacccgcacgccaagccgccctactcgtacatctcgctcatcaccatggccatccagcaggcgcccagcaagatgctcacgctgagcgagatctaccagtggatcatggacctcttcccctattaccggcagaaccagcagcgctggcagaactccatccgccactcgctgtccttcaatgactgcttcgtcaaggtggcacgctccccggacaagccgggcaagggctcctactggacgctgcacccggactccggcaacatgttcgagaacggctgctacttgcgccgccagaagcgcttcaagtgcgagaagcagccgggggccggcggcgggggcgggagcggaagcgggggcagcggcgccaagggcggccctgagagccgcaaggacccctctggcgcctctaaccccagcgccgactcgcccctccatcggggtgtgcacgggaagaccggccagctagagggcgcgccggcccccgggcccgccgccagcccccagactctggaccacagtggggcgacggcgacagggggcgcctcggagttgaagactccagcctcctcaactgcgccccccataagctccgggcccggggcgctggcctctgtgcccgcctctcacccggcacacggcttggcaccccacgagtcccagctgcacctgaaaggggacccccactactccttcaaccacccgttctccatcaacaacctcatgtcctcctcggagcagcagcataagctggacttcaaggcatacgaacaggcactgcaatactcgccttacggctctacgttgcccgccagcctgcctctaggcagcgcctcggtgaccaccaggagccccatcgagccctcagccctggagccggcgtactaccaaggtgtgtattccagacccgtcctaaacacttcctagctcccgggactggggggtttgtctggcatagccatgctggtagcaagagagaaaaaatcaacagcaaacaaaaccacacaaaccaaaccgtcaacagcataataaaatcccaacaactatttttatttcatttttcatgcacaacctttcccccagtgcaaaagactgttactttattattgtattcaaaattcattgtgtatattactacaaagacaaccccaaaccaatttttttcctgcgaagtttaatgatccacaagtgtatatatgaaattctcctccttccttgcccccctctctttcttccctctttcccctccagacattctagtttgtggagggttatttaaaaaaacaaaaaaggaagatggtcaagtttgtaaaatatttgtttgtgctttttccccctccttacctgaccccctacgagtttacaggtctgtggcaatactcttaaccataagaattgaaatggtgaagaaacaagtatacactagaggctcttaaaagtattgaaagacaatactgctgttatatagcaagacataaacagattataaacatcagagccatttgcttctcagtttacatttctgatacatgcagatagcagatgtctttaaatgaaatacatgtatattgtgtatggacttaattatgcacatgctcagatgtgtagacatcctccgtatatttacataacatatagaggtaatagataggtgatatacatgatacattctcaagagttgcttgaccgaaagttacaaggaccccaacccctttgtcctctctacccacagatggccctgggaatcaattcctcaggaattgccctcaagaactctgcttcttgctttgcagagtgccatggtcatgtcattctgaggtcacataacacataaaattagtttctatgagtgtataccatttaaagaatttttttttcagtaaaagggaatattacaatgttggaggagagataagttatagggagctggatttcaaaacgtggtccaagattcaaaaatcctattgatagtggccattttaatcattgccatcgtgtgcttgtttcatccagtgttatgcactttccacagttggacatggtgttagtatagccagacgggtttcattattatttctctttgctttctcaatgttaatttattgcatggtttattctttttctttacagctgaaattgctttaaatgatggttaaaattacaaattaaattgttaatttttatcaatgtgattgtaattaaaaatattttgatttaaataacaaaaataataccagattttaagccgtggaaaatgttcttgatcatttgcagttaaggactttaaataaatcaaatgttaacaaaa

SEQ ID NO: 146847 - DNA, 1792 bp, Artificial Sequence
  derived and/or modified sequence
aaagcccgaggatcctttcagcagcacagagcagagaccgcgctccccaggagggggatcggctggatgaggagggaccggctggggctgagcacgtcctccaacaggcgctgaccggtgtgaacaaaagcctactcctccgtcccggtcagcaacatgaactcaggcctgggctccatgaactccatgaacacctacatgaccatgaacaccatgactacgagcggcaacatgaccccggcgtccttcaacatgtcctatgccaacccgggcctaggggccggcctgagtcccggcgcagtagccggcatgccggggggctcggcgggcgccatgaacagcatgactgcggccggcgtgacggccatgggtacggcgctgagcccgagcggcatgggcgccatgggtgcgcagcaggcggcctccatgaatggcctgggcccctacgcggccgccatgaacccgtgcatgagccccatggcgtacgcgccgtccaacctgggccgcagccgcgcgggcggcggcggcgacgccaagacgttcaagcgcagctacccgcacgccaagccgccctactcgtacatctcgctcatcaccatggccatccagcaggcgcccagcaagatgctcacgctgagcgagatctaccagtggatcatggacctcttcccctattaccggcagaaccagcagcgctggcagaactccatccgccactcgctgtccttcaatgactgcttcgtcaaggtggcacgctccccggacaagccgggcaagggctcctactggacgctgcacccggactccggcaacatgttcgagaacggctgctacttgcgccgccagaagcgcttcaagtgcgagaagcagccgggggccggcggcgggggcgggagcggaagcgggggcagcggcgccaagggcggccctgagagccgcaaggacccctctggcgcctctaaccccagcgccgactcgcccctccatcggggtgtgcacgggaagaccggccagctagagggcgcgccggcccccgggcccgccgccagcccccagactctggaccacagtggggcgacggcgacagggggcgcctcggagttgaagactccagcctcctcaactgcgccccccataagctccgggcccggggcgctggcctctgtgcccgcctctcacccggcacacggcttggcaccccacgagtcccagctgcacctgaaaggggacccccactactccttcaaccacccgttctccatcaacaacctcatgtcctcctcggagcagcagcataagctggacttcaaggcatacgaacaggcactgcaatactcgccttacggctctacgttgcccgccagcctgcctctaggcagcgcctcggtgaccaccaggagccccatcgagccctcagccctggagccggcgtactaccaaggtgtgtattccagacccgtcctaaacacttcctagctcccgggactggggggtttgtctggcatagccatgctggtagcaagagagaaaaaatcaacagcaaacaaaaccacacaaaccaaaccgtcaacagcataataaaatcccaacaactatttttatttcatttttcatgcacaacctttcccccagtgcaaaagactgttactttattattgtattcaaaattcattgtgtatattactacaaagacaaccccaaaccaatttttttcctgcgaagtttaatgatccacaagtgtatatatgaaattctcctccttccttgcccccctctctttcttccctctttc

SEQ ID NO: 146848 - DNA, 1419 bp, Artificial Sequence
  derived and/or modified sequence
atgctgggcaccgtgaagatggagggccacgagaccagtgactggaacagctactatgctgacacccaggaggcctacagctctgtgcctgtgagcaacatgaacagcggcctgggctccatgaacagcatgaacacctacatgaccatgaacaccatgaccaccagcggcaacatgaccccagccagcttcaacatgtcctatgccaaccctggcctgggcgccggcctgagccctggagctgtggccggcatgcctgggggcagcgctggggccatgaacagcatgacagctgctggggtgacagccatgggcacagccctgagccccagcggcatgggcgccatgggcgcccagcaggccgcctccatgaatggcctgggcccctatgctgctgccatgaacccctgcatgagccccatggcctatgcccccagcaacctgggccgcagcagagctgggggcggcggagatgccaagaccttcaagaggagctacccccacgccaagccaccctacagctacatcagcctcatcaccatggccatccagcaggcccccagcaagatgctgaccctgtctgagatctaccagtggatcatggacctcttcccctactaccggcagaaccagcagcgctggcagaacagcatccgccacagcctgtccttcaatgactgctttgtgaaggtggcccggagcccagacaagccaggcaagggcagctactggaccctgcacccagacagcggcaacatgtttgaaaatggctgctacctgcggcggcagaagcgcttcaagtgtgagaagcagcccggggccggcggcggcggcggcagcggcagcggcggcagcggggccaagggcggccctgagagcaggaaggaccccagcggggccagcaaccccagcgctgacagccccctgcaccggggcgtgcacggcaagacaggccagctggagggcgccccagcccctggccctgctgccagcccccagaccctggaccacagcggggccacagccactggaggagccagcgagctgaagaccccagccagcagcacagccccacccatcagcagcggccctggggccctggcctctgtgcctgccagccacccagcccacggcctggcccctcatgagagccagctgcacctgaagggggacccccactacagcttcaaccaccccttcagcatcaacaacctgatgagcagcagcgagcagcagcacaagctggacttcaaggcctatgagcaggccctgcagtacagcccctacggcagcaccctgcctgccagcctgcccctgggcagcgcctctgtgaccaccaggagccccatcgagcccagcgccctggagcccgcctactaccagggcgtgtacagcaggcctgtgctgaacaccagctag

SEQ ID NO: 146849 - DNA, 1320 bp, Artificial Sequence
  derived and/or modified sequence
atgaacagcggcctgggctccatgaacagcatgaacacctacatgaccatgaacaccatgaccaccagcggcaacatgaccccagccagcttcaacatgtcctatgccaaccctggcctgggcgccggcctgagccctggagctgtggccggcatgcctgggggcagcgctggggccatgaacagcatgacagctgctggggtgacagccatgggcacagccctgagccccagcggcatgggcgccatgggcgcccagcaggccgcctccatgaatggcctgggcccctatgctgctgccatgaacccctgcatgagccccatggcctatgcccccagcaacctgggccgcagccgggccggcggcggcggagatgccaagaccttcaagaggagctacccccacgccaagccaccctacagctacatcagcctcatcaccatggccatccagcaggcccccagcaagatgctgaccctgtctgagatctaccagtggatcatggacctcttcccctactaccggcagaaccagcagcgctggcagaacagcatccgccacagcctgtccttcaatgactgctttgtgaaggtggcccggagcccagacaagccaggcaagggcagctactggaccctgcacccagattctggcaacatgtttgaaaatggctgctacctgcggcggcagaagcgcttcaagtgtgagaagcagcctggagctgggggcggcggcggcagcggcagcggcggcagcggggccaagggcggccctgagagcaggaaggaccccagcggggccagcaaccccagcgctgacagccccctgcacagaggagtgcacggcaagacaggccagctggagggcgccccagcccctggccctgctgccagcccccagaccctggaccacagcggggccacagccaccggcggggccagcgagctgaagaccccagccagcagcacagccccacccatcagcagcggccctggggccctggcctctgtgcctgccagccacccagcccacggcctggcccctcatgagagccagctgcacctgaagggggacccccactacagcttcaaccaccccttcagcatcaacaacctgatgagcagcagcgagcagcagcacaagctggacttcaaggcctatgagcaggccctgcagtacagcccctacggcagcaccctgcctgccagcctgcccctgggcagcgcctctgtgaccaccaggagccccatcgagcccagcgccctggagcccgcctactaccagggcgtgtacagcaggcctgtgctgaacaccagctag

SEQ ID NO: 146850 - DNA, 1419 bp, Artificial Sequence
  derived and/or modified sequence
atgctgggcaccgtgaagatggagggccacgagaccagcgactggaattcctactacgcagacacacaagaggcttactcatctgtgcccgtgagcaatatgaattctgggctaggttcgatgaactctatgaacacctacatgaccatgaataccatgactacatcagggaacatgaccccagcgagctttaacatgtcatatgccaacccggggctcggcgccggactttcacctggagctgtagctggaatgcctggtgggagcgcgggggcaatgaattctatgaccgctgccggtgtgacagcaatgggcacagcactgtctcccagcgggatgggcgctatgggggcccagcaggctgcgagcatgaatggtctgggaccgtatgctgctgccatgaacccttgcatgtctcccatggcctatgccccatctaatcttgggaggtctagggcggggggaggcggcgatgccaagacttttaaaaggtcttatccccacgccaaaccaccatactcttatatcagccttatcactatggccatccagcaggctccaagcaaaatgcttacactgtcggagatctaccagtggataatggatcttttcccctattatcgccagaatcaacaaaggtggcagaactcaattaggcatagcctctctttcaacgactgctttgtcaaagtggccagaagccctgacaagccaggtaagggaagctattggactctgcatcctgactccgggaatatgttcgagaatggctgttacttgcgtagacagaagagattcaagtgcgagaaacagccgggcgccggcggcggtgggggaagtggaagcggcgggtcaggcgccaagggtgggccagagtcccgcaaagatccaagcggggcctccaatccctccgccgattcccccctgcatcgaggcgtgcatggtaaaaccgggcaactggaaggggcacccgcccccggaccagctgccagcccgcagacgctagaccatagtggcgccaccgcaaccggtggagccagcgagctgaaaaccccagccagctccacagccccccccatcagtagcggcccgggcgccctagcttctgtccctgcctcacatcccgctcatggtctggctccacacgagtcgcagcttcacctaaaaggcgaccctcattactcattcaatcacccgttctctattaataatctcatgtcttcttcggagcagcagcacaagctggactttaaggcctacgaacaggcgttacagtattccccgtacggatctacacttcctgctagtctgccactcggtagcgcgagcgtaacaacaaggagtccgatcgaaccttccgctcttgagccggcatactaccagggagtgtatagtaggccggtcctcaacaccagttag

SEQ ID NO: 146851 - DNA, 1320 bp, Artificial Sequence
  derived and/or modified sequence
atgaacagcggcctgggcagcatgaacagcatgaacacctacatgacaatgaacacaatgaccacatctggcaacatgaccccagcctccttcaacatgtcttatgctaatcccggactgggggccggactctcacctggcgcggtcgccggaatgccaggcggctcagctggagctatgaatagcatgacggccgctggcgtcacagctatggggacagcattaagccctagtgggatgggggccatgggagcgcagcaggctgcctcaatgaatggcttggggccatacgctgccgccatgaatccctgcatgtcccctatggcctacgctcccagtaatttggggcgaagccgggcagggggagggggggacgcaaagacgttcaagcggagctaccctcatgctaagcctccctacagttacatcagccttataactatggccatacagcaagcgccatcaaagatgctgacacttagcgagatctatcagtggattatggatctcttcccctattaccgccaaaaccagcagagatggcagaactccattcggcactccttgagttttaacgactgcttcgtcaaagttgcgcgcagccccgacaagcctggaaagggttcctactggacactccatcccgattctggaaacatgttcgagaacgggtgctatctccgacggcagaagaggtttaaatgtgaaaaacagccaggagctggaggggggggaggcagtggctccggcggatccggcgctaagggaggccctgaatctcgaaaggacccaagtggggcatctaacccatctgccgacagtcccctgcataggggcgtgcacggtaagaccggtcaactcgagggcgcacctgctccagggcctgctgcatctcctcagactctggatcactcaggcgcaacagccaccgggggcgcatccgaactcaagactcccgccagctcaaccgcccccccaatttcttcaggcccaggagccctggcctccgtgcccgcatctcacccggcccacggccttgctccccacgaatcccagttacacttgaagggcgatccacattacagtttcaatcatccattctccataaacaacctgatgtccagttccgaacaacagcacaagctggactttaaagcttatgaacaagcactgcagtactctccttacggatcgactttgccagctagccttcccctcggatccgcctccgtgacaacccgaagtcctatagagccctcagcacttgagcctgcttactaccagggagtctattccaggccagtccttaatacttcatag

SEQ ID NO: 146852 - DNA, 1419 bp, Artificial Sequence
  derived and/or modified sequence
atgctgggtacagtgaaaatggagggtcacgagacctcggactggaactcctattatgcagatactcaagaagcctattcgagcgtgcctgttagtaatatgaattcaggcctggggagcatgaattctatgaacacatatatgacaatgaacaccatgactactagtggcaacatgacgccagccagtttcaatatgtcatacgctaatccaggactgggagccggtctcagccccggtgccgtggctggtatgccaggaggaagcgctggagcaatgaattcgatgacagcggctggagtcacagctatgggtaccgctctctccccctctggaatgggcgctatgggcgctcaacaagcagccagtatgaacggacttgggccatacgctgccgctatgaatccgtgtatgtctccaatggcctacgcaccctcaaacttgggccgttcccgggctggcggtggcggagacgccaaaacattcaagagatcctatcctcatgcaaagcccccatattcatacattagcctgatcacaatggccattcaacaggcgccttctaagatgctcactttgtcagagatctaccagtggattatggatctttttccttactaccggcagaatcagcagcgatggcagaatagcatcaggcactcgctttcctttaatgactgtttcgttaaggtcgccaggagccccgataaacctggaaaagggagctactggacgttacatccagattctgggaatatgtttgaaaacggttgttatctgcggagacagaaaaggtttaagtgcgagaagcagccaggtgccggtggaggaggcggttctggttccgggggaagcggggctaagggcggtccagagtctcgcaaggacccttcaggggcaagcaacccatcggccgacagcccacttcatcgaggagtccacgggaaaacaggacagctggaaggtgcgcctgcccctggccctgccgcaagcccccagaccctggatcactccggtgcaacagccaccgggggagccagtgagctgaagacgcctgcaagctcaaccgcccctcccattagctctgggccaggggctctcgctagcgtcccagcaagccacccggcacacgggctcgcccctcatgagtctcagctccatctgaagggcgacccacattactcctttaaccaccctttttcaattaacaacttaatgagctcctcagagcagcagcataaactggatttcaaagcctacgaacaggccctccagtacagcccatacgggtccaccttgcccgctagtttgcccctgggatccgcctccgtcacgacccgctccccaatcgaacccagtgccctggagcccgcatattaccagggcgtttattcacggccagtactcaacacatcctag

SEQ ID NO: 146853 - DNA, 1320 bp, Artificial Sequence
  derived and/or modified sequence
atgaatagcggtctggggtcaatgaacagcatgaatacatacatgaccatgaacacaatgactacatccggaaatatgacgccagccagtttcaatatgtcatatgcaaatcccggactgggagctggtctttcacctggagccgtggctggtatgcctggcggaagcgccggagcgatgaactcgatgaccgctgccggtgtgactgccatgggtactgcactcagtccgagtggaatgggggcaatgggcgctcaacaggctgccagcatgaatggactaggaccctatgccgctgccatgaatccatgcatgtcacccatggcatatgcgccttctaatctcggccgtagcagagccggaggaggtggcgacgccaagacatttaaacgtagctatccacatgcgaagcccccttattcatacatttctctgatcactatggctatacagcaggccccttccaaaatgcttacactgtccgaaatttaccagtggataatggatctctttccttattaccgccagaatcagcagcggtggcaaaacagtataagacattcccttagtttcaacgattgcttcgtcaaagttgccagatcacccgataagccagggaaaggctcttattggaccttacaccccgacagcggaaatatgtttgaaaacggatgttatctccgtaggcagaaacgcttcaagtgtgaaaaacagcccggagcagggggtggcggaggcagcgggagcggcggatccggcgctaagggaggaccagagtcccgcaaggatccttctggcgcatcgaacccaagcgccgacagccccctgcatcgcggagtgcacggaaaaacaggtcagctcgagggtgcacctgctccaggcccagccgcaagtccgcagacactggatcattcaggtgcgaccgcgacaggtggtgcaagcgagctcaagacaccagcctcatctacagctcctcccatctcctctgggcctggtgctcttgcgagcgtgcccgcatctcaccccgctcacggcctggccccacacgaatctcaattacacctcaaaggagatccccattactcatttaaccatccgtttagcattaacaatcttatgtcttcttctgaacagcaacataagcttgacttcaaagcgtacgagcaggccctgcagtacagcccctatgggagcacccttcctgctagcctgcctctgggttcggcaagtgttacaacacgaagtcctatagagcccagcgccctagagccagcatactaccaaggcgtctattcacggcctgtgctgaacactagttag

SEQ ID NO: 146854 - protein, 350 aa, Artificial Sequence
  derived and/or modified sequence
MLGSVKMEAHDLAEWSYYPEAGEVYSPVTPVPTMAPLNSYMTLNPLSSPYPPGGLPASPLPSGPLAPPAPAAPLGPTFPGLGVSGGSSSSGYGAPGPGLVHGKEMPKGYRRPLAHAKPPYSYISLITMAIQQAPGKMLTLSEIYQWIMDLFPYYRENQQRWQNSIRHSLSFNDCFVKVARSPDKPGKGSYWALHPSSGNMFENGCYLRRQKRFKLEEKVKKGGSGAATTTRNGTGSAASTTTPAATVTSPPQPPPPAPEPEAQGGEDVGALDCGSPASSTPYFTGLELPGELKLDAPYNFNHPFSINNLMSEQTPAPPKLDVGFGGYGAEGGEPGVYYQGLYSRSLLNAS

SEQ ID NO: 146855 - DNA, 1988 bp, Artificial Sequence
  derived and/or modified sequence
ggagcccggggcgggcgagggcgggggtgtcccggctataaagcgtggccgcctcccgcggcgctcgggacagccgtaccccgggcggtcggacgggcgggcgccggtgggagctcgggccgtgcccgctgagagatccagagcgctccgttcccccggggccggagcgggggcgggtgggggcgtaagcccgggggatgctgggctcagtgaagatggaggcccatgacctggccgagtggagctactacccggaggcgggcgaggtctactcgccggtgaccccagtgcccaccatggcccccctcaactcctacatgaccctgaatcctctaagctctccctatccccctggggggctccctgcctccccactgccctcaggacccctggcacccccagcacctgcagcccccctggggcccactttcccaggcctgggtgtcagcggtggcagcagcagctccgggtacggggccccgggtcctgggctggtgcacgggaaggagatgccgaaggggtatcggcggcccctggcacacgccaagccaccgtattcctatatctcactcatcaccatggccatccagcaggcgccgggcaagatgctgaccttgagtgaaatctaccagtggatcatggacctcttcccttactaccgggagaatcagcagcgctggcagaactccattcgccactcgctgtctttcaacgactgcttcgtcaaggtggcgcgttccccagacaagcctggcaagggctcctactgggccctacaccccagctcagggaacatgtttgagaatggctgctacctgcgccgccagaaacgcttcaagctggaggagaaggtgaaaaaagggggcagcggggctgccaccaccaccaggaacgggacagggtctgctgcctcgaccaccacccccgcggccacagtcacctccccgccccagcccccgcctccagcccctgagcctgaggcccagggcggggaagatgtgggggctctggactgtggctcacccgcttcctccacaccctatttcactggcctggagctcccaggggagctgaagctggacgcgccctacaacttcaaccaccctttctccatcaacaacctaatgtcagaacagacaccagcacctcccaaactggacgtggggtttgggggctacggggctgaaggtggggagcctggagtctactaccagggcctctattcccgctctttgcttaatgcatcctagcaggggttgggaacatggtggtgggtatggctggagctcacaccacgaagctcttggggcctgatccttctggtgacacttcacttgtcccattggttaacatctgggtgggtctattacttactgtgatgactgctgtctcagtgggcatggtgttgatccacggggtactgtgataaccaccatggatacattttggtggcccactgggtactgtgaggactgctacattgatggatgttattggctaatccactgcatggtttgatggccaccatctcggttggccctttgggtgtgatggtgatagcatttcagtgacatcttctttggccccccccattaggtgctgtgcccacttcttttttggtgtacttggcacagtaggtgccaagttggccaccattctgtgtaacaccttttttggcccattgggtgctttgatggacatcatactgggtaggtgacaacgtcagtgggccaccatgtgccatgatggctgctgcagccccgtgttggccatgtcgtcaccattctctctggcatgggttgggtaggggatggaggtgagaatactccttggttttctctgaagcccaccctttcccccaactctggtccaggagaaaccagaaaaggctggttagggtgtggggaatttctactgaagtctgattctttcccgggaagcggggtactggctgtgtttaatcattaaaggtaccgtgtccgcctctt

SEQ ID NO: 146856 - DNA, 1053 bp, Artificial Sequence
  derived and/or modified sequence
atgctggggtctgtcaaaatggaggcccacgacctggccgaatggtcctattacccggaagcaggagaggtatattcaccagtgacgccagtgcccactatggccccattgaactcctacatgacactgaacccactgtcttccccatacccgcctggtggtttgccagcttctcctttaccatctggccccctggcgcctccagcccctgctgcgccactcggaccaacttttccagggctgggcgtgtccggaggaagctccagcagcggatatggcgctcccgggcctggcctggtccacggtaaggagatgcccaaaggctaccgcagaccactggctcatgcgaaacctccgtattcttatatttctctgattacaatggcgattcagcaggcccccggaaagatgctgaccctgagcgaaatctatcagtggatcatggatctttttccatactatcgggagaaccagcagagatggcagaatagcattagacactcactctccttcaacgattgctttgtaaaggtagcccgatctcctgataagccggggaagggaagctactgggctcttcacccatcttcaggaaacatgtttgagaatggttgttacctccgcaggcagaagcgctttaagctggaagaaaaggtaaagaaagggggcagtggggccgccaccactacgagaaacggcaccggaagtgctgcttccacaaccaccccagccgctacggtcacctcccccccccaaccaccacctccggctcctgaaccagaggcccagggcggtgaggacgtaggagcactcgactgcggatctcctgcctccagcaccccttacttcaccggacttgagctccctggagaacttaagctggacgccccttataactttaaccacccattcagcataaataatttgatgagcgagcaaactccggcacctcccaagttggatgtggggttcggggggtatggggcagagggcggcgagccaggagtgtattatcagggtttgtactctagatcgctcctgaatgcttcctag

SEQ ID NO: 146857 - DNA, 1053 bp, Artificial Sequence
  derived and/or modified sequence
atgctgggctctgtgaagatggaggcccatgacctggccgagtggagctactacccagaggccggggaggtgtacagccctgtgacccctgtgcccaccatggcccccctgaacagctacatgaccctgaaccccctgagcagcccctacccacctgggggcctgcctgccagccccctgcccagcggccccctggcccccccagccccagctgcccccctgggccccaccttccctggcctgggcgtgtctgggggcagcagcagcagcggctacggggcccctggccctggcctggtgcacggcaaggagatgcccaagggctaccgccggcccctggcccacgccaagccaccctacagctacatcagcctcatcaccatggccatccagcaggcccctgggaagatgctgaccctgtctgagatctaccagtggatcatggacctcttcccctactaccgggagaaccagcagcgctggcagaacagcatccgccacagcctgtccttcaatgactgctttgtgaaggtggcccggagcccagacaagccaggcaagggcagctactgggccctgcaccccagcagcggcaacatgtttgaaaatggctgctacctgcggcggcagaagcgcttcaagctggaggagaaggtgaagaagggcggcagcggggccgccaccaccaccagaaatggcaccggcagcgctgccagcaccaccaccccagctgccaccgtgaccagccccccccagcccccacctccagcccctgagcctgaggcccagggcggggaggatgtgggcgccctggactgtggcagccctgccagcagcaccccctacttcaccggcctggagctgcctggagagctgaagctggatgccccctacaacttcaaccaccccttcagcatcaacaacctgatgtctgagcagaccccagccccacccaagctggatgtgggctttggaggctatggagctgagggcggggagcccggggtgtactaccagggcctgtacagccgcagcctgctgaatgccagctag

SEQ ID NO: 146858 - DNA, 1053 bp, Artificial Sequence
  derived and/or modified sequence
atgctgggcagcgtgaagatggaggcccacgacctggccgagtggtcctactaccccgaagcaggcgaggtctatagtccggtgactcccgtgcccaccatggcccccctgaattcttacatgacattgaatccactttcatcaccgtaccctcccgggggattacccgcctcccctctgccatccggaccactagcgcccccagcaccggcagcccccttgggcccaaccttccctgggcttggagtgtcgggcgggagtagtagttcagggtacggcgccccagggccaggactggttcacggcaaggagatgcctaagggctacagacgccccctagcacatgcgaagcctccttattcatatatcagcctcataacgatggccattcaacaggcccccggtaagatgcttaccctgagtgagatctatcagtggatcatggatctgtttccttactatagagaaaatcagcagcggtggcagaacagtattcgccacagtctctcctttaatgactgcttcgttaaagttgcacgatctccggacaaacccggtaaggggagctactgggcactccacccatcttcgggcaacatgtttgaaaacgggtgctacctgaggagacagaagaggtttaaactggaggaaaaagtcaaaaaagggggatccggcgcagcaactaccactcgaaatggcactggcagcgccgcgtccacaacgacccccgccgcaaccgtgacctcccctccccagccaccacctcccgctccagagcctgaagctcaaggcggtgaggatgtgggggctctggactgtggaagccctgccagctccactccttacttcacgggactggaactccctggtgaactaaagctggacgcaccatacaactttaaccatccgttcagtatcaacaatctcatgtctgaacaaactcccgccccccctaaactggacgtaggatttgggggatacggggcggaaggaggtgagccaggggtgtactatcaaggcctgtacagcaggtcccttcttaacgcttcatag

SEQ ID NO: 146859 - DNA, 1053 bp, Artificial Sequence
  derived and/or modified sequence
atgctaggttcagtgaagatggaagcacacgatctcgctgagtggtcttactaccccgaggccggagaggtgtactcccctgtcactccagtgcctacaatggccccattgaatagctatatgacattgaacccacttagcagcccatatccacccggaggcctcccagccagcccactgccctcgggacccctggcccctcccgctcccgctgcgcctctcggcccaacatttcccggtctgggcgtgtctggcggaagtagttcgtccggttatggcgctcccggacctggtctcgtgcatggtaaggagatgccaaagggatataggcgacccctcgcacacgcaaagcccccttattcgtatatctctctcattaccatggccatccagcaggccccagggaagatgttgacgttgtcagagatttatcagtggatcatggatctgttcccttattaccgggagaaccagcagaggtggcaaaatagtattaggcacagcctcagttttaacgattgttttgtcaaggttgccaggtctcctgataaaccaggcaaaggctcttattgggccctgcacccttcctcaggtaatatgttcgaaaacgggtgttacctcagacgccagaaacggttcaagctggaagaaaaagtgaagaagggagggtccggagccgctacaacgacaaggaatgggaccggttcggccgcaagcactaccacacccgctgccaccgtgacttcacctccacaacctcctccccctgccccagagcccgaggcacagggcggtgaggacgtcggagcactagactgtggatcgcccgcaagttctactccatatttcacaggtctggaactgccaggtgaactgaagctcgatgccccatacaactttaaccaccctttcagcatcaataacctgatgtctgaacagactcccgctccacctaaactggacgtggggtttggaggatacggcgctgagggaggtgagccaggggtgtattaccaggggctttactctaggtctctcctaaacgcctcctag

SEQ ID NO: 146860 - DNA, 1053 bp, Artificial Sequence
  derived and/or modified sequence
atgctgggcagcgtgaagatggaggcccacgacctggccgagtggagctactaccccgaggccggcgaggtgtacagccccgtgacccccgtgcccaccatggcccccctgaacagctacatgaccctgaaccccctgagcagcccctacccccccggcggcctgcccgccagccccctgcccagcggccccctggccccccccgcccccgccgcccccctgggccccaccttccccggcctgggcgtgagcggcggcagcagcagcagcggctacggcgcccccggccccggcctggtgcacggcaaggagatgcccaagggctacagaagacccctggcccacgccaagcccccctacagctacatcagcctgatcaccatggccatccagcaggcccccggcaagatgctgaccctgagcgagatctaccagtggatcatggacctgttcccctactacagagagaaccagcagagatggcagaacagcatcagacacagcctgagcttcaacgactgcttcgtgaaggtggccagaagccccgacaagcccggcaagggcagctactgggccctgcaccccagcagcggcaacatgttcgagaacggctgctacctgagaagacagaagagattcaagctggaggagaaggtgaagaagggcggcagcggcgccgccaccaccaccagaaacggcaccggcagcgccgccagcaccaccacccccgccgccaccgtgaccagccccccccagccccccccccccgcccccgagcccgaggcccagggcggcgaggacgtgggcgccctggactgcggcagccccgccagcagcaccccctacttcaccggcctggagctgcccggcgagctgaagctggacgccccctacaacttcaaccaccccttcagcatcaacaacctgatgagcgagcagacccccgccccccccaagctggacgtgggcttcggcggctacggcgccgagggcggcgagcccggcgtgtactaccagggcctgtacagcagaagcctgctgaacgccagctag

SEQ ID NO: 146861 - protein, 465 aa, Artificial Sequence
  derived and/or modified sequence
MNAQLTMEAIGELHGVSHEPVPAPADLLGGSPHARSSVAHRGSHLPPAHPRSMGMASLLDGGSGGGDYHHHHRAPEHSLAGPLHPTMTMACETPPGMSMPTTYTTLTPLQPLPPISTVSDKFPHHHHHHHHHHHPHHHQRLAGNVSGSFTLMRDERGLASMNNLYTPYHKDVAGMGQSLSPLSSSGLGSIHNSQQGLPHYAHPGAAMPTDKMLTPNGFEAHHPAMLGRHGEQHLTPTSAGMVPINGLPPHHPHAHLNAQGHGQLLGTAREPNPSVTGAQVSNGSNSGQMEEINTKEVAQRITTELKRYSIPQAIFAQRVLCRSQGTLSDLLRNPKPWSKLKSGRETFRRMWKWLQEPEFQRMSALRLAACKRKEQEHGKDRGNTPKKPRLVFTDVQRRTLHAIFKENKRPSKELQITISQQLGLELSTVSNFFMNARRRSLDKWQDEGSSNSGNSSSSSSTCTKA

SEQ ID NO: 146862 - DNA, 1925 bp, Artificial Sequence
  derived and/or modified sequence
ccccacagtgagaggaaggaaggcaacagtcgccagcagccgatgtgaagaccggactccgtgcgcccctcgccgcctctgcctggccacatcgatgttgtgtccgccgcctgctcgcccggatcacgatgaacgcgcagctgaccatggaagcgatcggcgagctgcacggggtgagccatgagccggtgcccgcccctgccgacctgctgggcggcagcccccacgcgcgcagctccgtggcgcaccgcggcagccacctgccccccgcgcacccgcgctccatgggcatggcgtccctgctggacggcggcagcggcggcggagattaccaccaccaccaccgggcccctgagcacagcctggccggccccctgcatcccaccatgaccatggcctgcgagactcccccaggtatgagcatgcccaccacctacaccaccttgacccctctgcagccgctgcctcccatctccacagtctcggacaagttcccccaccatcaccaccaccaccatcaccaccaccacccgcaccaccaccagcgcctggcgggcaacgtgagcggtagcttcacgctcatgcgggatgagcgcgggctggcctccatgaataacctctataccccctaccacaaggacgtggccggcatgggccagagcctctcgcccctctccagctccggtctgggcagcatccacaactcccagcaagggctcccccactatgcccacccgggggccgccatgcccaccgacaagatgctcacccccaacggcttcgaagcccaccacccggccatgctcggccgccacggggagcagcacctcacgcccacctcggccggcatggtgcccatcaacggccttcctccgcaccatccccacgcccacctgaacgcccagggccacgggcaactcctgggcacagcccgggagcccaacccttcggtgaccggcgcgcaggtcagcaatggaagtaattcagggcagatggaagagatcaataccaaagaggtggcgcagcgtatcaccaccgagctcaagcgctacagcatcccacaggccatcttcgcgcagagggtgctctgccgctcccaggggaccctctcggacctgctgcgcaaccccaaaccctggagcaaactcaaatccggccgggagaccttccggaggatgtggaagtggctgcaggagccggagttccagcgcatgtccgcgctccgcttagcagcatgcaaaaggaaagaacaagaacatgggaaggatagaggcaacacacccaaaaagcccaggttggtcttcacagatgtccagcgtcgaactctacatgcaatattcaaggaaaataagcgtccatccaaagaattgcaaatcaccatttcccagcagctggggttggagctgagcactgtcagcaacttcttcatgaacgcaagaaggaggagtctggacaagtggcaggacgagggcagctccaattcaggcaactcatcttcttcatcaagcacttgtaccaaagcatgaaggaagaaccacaaactaaaacctcggtggaaaagctttaaattaaaaaaaatttttaaaagaccaggacctcaagatagcaggtttatacttagaaatatttgaagaaaaaaaagcgttatttatagtccaaagaaaccaaagacttagctcacctgcattctgactttgtttggagacacacacttcagcagggcggcgacttggcaagacaaatgatgagcaggaaaacaccactggatctcacaccttcaatccatgaccatcctcgctgtgcttggctgtttagtggtttggagcatagtgattttgagccattgagcggacatcttttaagatcgaactttctcatctgttctaccatgccacgaaggtgtatggtgtctcagtactaccacc

SEQ ID NO: 146863 - DNA, 1398 bp, Artificial Sequence
  derived and/or modified sequence
atgaatgcacagctaaccatggaagcaatcggggaactccacggtgtgtcccacgagcctgtcccggcacccgctgatctcctgggcggttctccacacgcgagaagctctgtggcgcatagaggaagtcatttgccccccgcccatccacggtctatggggatggcatcccttctggatggggggtccggaggcggggattaccatcaccaccacagagctccagagcatagtttggccgggcccttgcaccctacaatgaccatggcctgtgaaacaccacctggaatgagtatgcctaccacatatacaacacttactccgctccagcctctgccacccatttccaccgtatccgataagtttcctcatcaccatcatcatcatcaccatcatcaccacccgcatcaccaccagagactcgcaggcaacgtctccggttcattcacactcatgcgtgatgagagaggtcttgcctcgatgaataatctgtacaccccgtatcacaaggacgtggcggggatggggcagtccttaagccctctgagctcatccggacttggatccatccacaacagtcagcagggactgccccattatgcccaccccggcgcagctatgccaacagacaaaatgctcactccaaatggattcgaagcccaccaccctgctatgcttggacggcatggagagcaacacctgacgcctacatccgcagggatggtaccgattaacggactgcctccgcatcacccccacgcccacctcaatgctcagggtcatggacagctgctcggaacagcgagggagcctaatccatcagtgacgggagcacaggtgtcaaacgggtctaacagcggtcagatggaggaaattaatactaaagaggtagctcagcgaatcactactgagcttaagagatatagcatcccccaagcgatctttgcccagcgcgtgctgtgtcggtcacagggcacgttgagcgatctgctccgtaaccctaagccatggtctaaactcaaatccggtcgtgagactttccgccgaatgtggaaatggctacaggagcccgagtttcagcggatgtctgccctgcgcttggccgcatgtaagcggaaggaacaagagcatgggaaagatcgggggaacacgcctaaaaaacctaggttggtgttcacagacgtacagagacgtacacttcatgcgatctttaaggaaaacaagaggccaagtaaagagctgcagataaccatatcccaacagctcggattggagttgtccaccgttagcaatttctttatgaacgcacgaagacgttcactggacaagtggcaggacgaaggttcgagcaatagtgggaactcaagttcatcatcatctacttgtaccaaagcctag

SEQ ID NO: 146864 - DNA, 1398 bp, Artificial Sequence
  derived and/or modified sequence
atgaatgcccagctgaccatggaggccatcggggagctgcacggcgtgtcccatgagcctgtgcctgccccagctgacctgctgggcggcagcccccacgcccggagctctgtggcccaccggggcagccacctgcccccagcccaccccaggtccatgggcatggccagcctgctggatggcggcagcggcggcggggactaccaccaccaccaccgggcccctgagcacagcctggccggccccctgcaccccaccatgaccatggcctgtgagaccccacctggcatgtccatgcccaccacctacaccaccctgacccccctgcagcccctgccccccatcagcacagtgtctgacaagttcccccaccaccaccaccaccaccaccaccaccaccacccccaccaccaccagaggctggccggaaatgtgtctggcagcttcaccctgatgagagatgagcggggcctggcctccatgaacaacctgtacaccccctaccacaaggatgtggccggcatgggccagagcctgagccccctgagcagcagcggcctgggcagcatccacaacagccagcagggcctgccccactacgcccaccctggagctgccatgcccacagacaagatgctgacccccaacggctttgaggcccaccacccagccatgctgggcagacatggagagcagcacctgacccccaccagcgctggcatggtgcccatcaatggcctgcccccccaccacccccacgcccacctgaatgcccagggccacggccagctgctgggcacagcccgggagcccaaccccagcgtgactggagcccaggtgtccaatggcagcaacagcggccagatggaggagatcaacaccaaggaggtggcccagaggatcaccacagagctgaagcgctacagcatcccccaggccatctttgcccagagggtgctgtgccgcagccagggcaccctgagtgacctgctgaggaaccccaagccctggagcaagctgaagagcggccgggagaccttccggaggatgtggaagtggctgcaggagcctgagttccagaggatgtctgccctgcggctggccgcctgcaagaggaaggagcaggagcacggcaaggaccggggcaacacccccaagaagccccggctggtgttcacagatgtgcagaggaggaccctgcacgccatcttcaaggagaacaagaggcccagcaaggagctgcagatcaccatcagccagcagctgggcctggagctgagcacagtgagcaacttcttcatgaatgcccggcggcgcagcctggacaagtggcaggatgagggcagcagcaacagcggcaacagcagcagcagcagcagcacctgcaccaaggcctag

SEQ ID NO: 146865 - DNA, 1398 bp, Artificial Sequence
  derived and/or modified sequence
atgaacgcccagctgaccatggaggccatcggcgagctgcacggcgttagtcacgaaccagtacctgctccggcggacctgctgggcggttcgcctcacgcacgttcttccgtggctcaccgtggctcccacctgccccctgcccaccctaggagcatgggtatggcaagcttgctagatggggggtctggagggggagactaccaccaccaccacagagccccggaacattctctggctgggcctctgcacccaacaatgaccatggcttgtgagaccccccccgggatgtccatgcccacgacgtatacaactctcactccactgcagcccctgcctcccatttctacggtgagcgataagttcccacaccaccaccaccaccaccatcatcatcaccaccctcatcatcaccaacgtcttgctggaaacgtgagtggcagttttacactaatgagagacgagcgcgggcttgccagtatgaacaacctttatacaccctaccataaggacgtggcagggatgggccagagcctcagccctctttcttctagcggattgggaagcatccataattcacagcaaggccttccacattacgcccacccaggggcagcaatgccgacagataaaatgctgacaccaaacggttttgaggctcaccaccctgcaatgctgggtcgccacggagagcagcatctgaccccaaccagtgccgggatggttccgattaatgggctcccccctcaccacccccatgcacacctgaatgcgcagggccacggacagttactgggtacagcaagagagccgaacccttcagtgacaggagctcaggtctctaacgggtctaattccggccaaatggaagagatcaatacaaaggaagtagcccagcgcatcaccacagagctaaagaggtactcaatcccccaggcaatcttcgcgcaacgggtcctgtgtcgctctcagggcactcttagtgacctcctgagaaatccgaagccttggtccaaactgaaaagcggcagagagactttccgccgcatgtggaaatggttgcaggagcctgaatttcagcggatgagtgcccttcggctcgctgcgtgtaaacgtaaagagcaagaacacggaaaggaccgcggcaacacccccaagaaaccaagactagtttttacagatgttcagcggcgaacactgcacgccatcttcaaggaaaataaacgaccatctaaggaactacaaatcacaatttcccaacagctgggcctggagctgtcaaccgtgtctaatttttttatgaatgccagacgtagatcattagataaatggcaagacgagggcagcagcaactccggcaactcgtcatcctcatcgtccacttgtacaaaagcatag

SEQ ID NO: 146866 - DNA, 2092 bp, Artificial Sequence
  derived and/or modified sequence
ccccacagtgagaggaaggaaggcaacagtcgccagcagccgatgtgaagaccggactccgtgcgcccctcgccgcctctgcctggccacatcgatgttgtgtccgccgcctgctcgcccggatcacgatgaacgcgcagctgaccatggaagcgatcggcgagctgcacggggtgagccatgagccggtgcccgcccctgccgacctgctgggcggcagcccccacgcgcgcagctccgtggcgcaccgcggcagccacctgccccccgcgcacccgcgctccatgggcatggcgtccctgctggacggcggcagcggcggcggagattaccaccaccaccaccgggcccctgagcacagcctggccggccccctgcatcccaccatgaccatggcctgcgagactcccccaggtatgagcatgcccaccacctacaccaccttgacccctctgcagccgctgcctcccatctccacagtctcggacaagttcccccaccatcaccaccaccaccatcaccaccaccacccgcaccaccaccagcgcctggcgggcaacgtgagcggtagcttcacgctcatgcgggatgagcgcgggctggcctccatgaataacctctataccccctaccacaaggacgtggccggcatgggccagagcctctcgcccctctccagctccggtctgggcagcatccacaactcccagcaagggctcccccactatgcccacccgggggccgccatgcccaccgacaagatgctcacccccaacggcttcgaagcccaccacccggccatgctcggccgccacggggagcagcacctcacgcccacctcggccggcatggtgcccatcaacggccttcctccgcaccatccccacgcccacctgaacgcccagggccacgggcaactcctgggcacagcccgggagcccaacccttcggtgaccggcgcgcaggtcagcaatggaagtaattcagggcagatggaagagatcaataccaaagaggtggcgcagcgtatcaccaccgagctcaagcgctacagcatcccacaggccatcttcgcgcagagggtgctctgccgctcccaggggaccctctcggacctgctgcgcaaccccaaaccctggagcaaactcaaatccggccgggagaccttccggaggatgtggaagtggctgcaggagccggagttccagcgcatgtccgcgctccgcttagcagcatgcaaaaggaaagaacaagaacatgggaaggatagaggcaacacacccaaaaagcccaggttggtcttcacagatgtccagcgtcgaactctacatgcaatattcaaggaaaataagcgtccatccaaagaattgcaaatcaccatttcccagcagctggggttggagctgagcactgtcagcaacttcttcatgaacgcaagaaggaggagtctggacaagtggcaggacgagggcagctccaattcaggcaactcatcttcttcatcaagcacttgtaccaaagcatgaaggaagaaccacaaactaaaacctcggtggaaaagctttaaattaaaaaaaatttttaaaagaccaggacctcaagatagcaggtttatacttagaaatatttgaagaaaaaaaagcgttatttatagtccaaagaaaccaaagacttagctcacctgcattctgactttgtttggagacacacacttcagcagggcggcgacttggcaagacaaatgatgagcaggaaaacaccactggatctcacaccttcaatccatgaccatcctcgctgtgcttggctgtttagtggtttggagcatagtgattttgagccattgagcggacatcttttaagatcgaactttctcatctgttctaccatgccacgaaggtgtatggtgtctcagtactaccaccaccagtggttacagacttaggcagagctggtcttcagaaatggttgttctataggagtgcaaccaacatggtatggggttgtctgagttcattggattaggagtgtgattttgctcgtctagcctaacgtttgaacctgccaggcccgcaacctaaatgcagattca

SEQ ID NO: 146867 - DNA, 1398 bp, Artificial Sequence
  derived and/or modified sequence
atgaacgcccagttgaccatggaggccataggtgagctgcatggggtgtctcacgagcctgtcccagccccagcagacctgctgggtggcagtcctcatgcaaggagttccgtggcccaccggggtagccacctgccaccagctcatccacgatcaatgggaatggcatcgctgctggatggcggaagtggtgggggagattaccaccaccaccacagggcgccagaacattcactggcgggacccctgcatcctacaatgacaatggcctgcgaaacgccgcctggaatgagcatgcctacaacctacaccacacttacaccattgcaaccccttcccccaataagtaccgtcagcgataaatttccgcaccatcaccatcaccaccaccaccatcatcatcctcaccatcaccagcggctcgcgggaaacgtgagcggtagcttcacactcatgcgcgacgaacgcggtctggcctccatgaacaatctgtatactccctatcacaaggacgttgctggcatgggtcagagcctctcacctctgtcctcttcaggtctgggctcaatccacaacagtcaacagggtctcccacattatgcacaccctggcgctgctatgcctactgataagatgctgacccccaacggcttcgaagcccatcatccagctatgctgggacgacacggtgaacaacatctgacaccaacttccgcgggaatggtgccgattaacggactccctccacatcatccacacgctcacctgaacgcgcagggccacggccaactgctaggcacggcacgggaacccaacccctccgtaactggagcgcaggttagcaatggttccaattccggacagatggaagagatcaacaccaaagaagtcgcccaacggattacaacagaacttaagcgatacagcatcccacaggccattttcgcccagagggtgctctgtcggtcacagggcacactgagtgacttgttgcgaaaccctaagccatggtcgaaactgaagagcggcagggaaacattccggagaatgtggaagtggctgcaagaacctgaatttcagagaatgtcggctctgcggctggctgcctgcaagcggaaagagcaagagcatgggaaggacagaggaaatacccccaaaaagcccagattggtcttcactgatgtccagaggcggaccctgcatgcaatcttcaaggaaaacaaacgaccgagtaaagagctgcagattacgatttcacagcagctggggttagaactctcaactgtctcaaacttttttatgaatgccagacgcaggagtctcgacaagtggcaggatgaaggctcaagcaattccggcaattctagctccagctcaagcacgtgcacaaaggcctag

SEQ ID NO: 146868 - DNA, 1398 bp, Artificial Sequence
  derived and/or modified sequence
atgaacgcccagctgaccatggaggccatcggcgagctgcacggcgtgagccacgagcccgtgcccgcccccgccgacctgctgggcggcagcccccacgccagaagcagcgtggcccacagaggcagccacctgccccccgcccaccccagaagcatgggcatggccagcctgctggacggcggcagcggcggcggcgactaccaccaccaccacagagcccccgagcacagcctggccggccccctgcaccccaccatgaccatggcctgcgagaccccccccggcatgagcatgcccaccacctacaccaccctgacccccctgcagcccctgccccccatcagcaccgtgagcgacaagttcccccaccaccaccaccaccaccaccaccaccaccacccccaccaccaccagagactggccggcaacgtgagcggcagcttcaccctgatgagagacgagagaggcctggccagcatgaacaacctgtacaccccctaccacaaggacgtggccggcatgggccagagcctgagccccctgagcagcagcggcctgggcagcatccacaacagccagcagggcctgccccactacgcccaccccggcgccgccatgcccaccgacaagatgctgacccccaacggcttcgaggcccaccaccccgccatgctgggcagacacggcgagcagcacctgacccccaccagcgccggcatggtgcccatcaacggcctgcccccccaccacccccacgcccacctgaacgcccagggccacggccagctgctgggcaccgccagagagcccaaccccagcgtgaccggcgcccaggtgagcaacggcagcaacagcggccagatggaggagatcaacaccaaggaggtggcccagagaatcaccaccgagctgaagagatacagcatcccccaggccatcttcgcccagagagtgctgtgcagaagccagggcaccctgagcgacctgctgagaaaccccaagccctggagcaagctgaagagcggcagagagaccttcagaagaatgtggaagtggctgcaggagcccgagttccagagaatgagcgccctgagactggccgcctgcaagagaaaggagcaggagcacggcaaggacagaggcaacacccccaagaagcccagactggtgttcaccgacgtgcagagaagaaccctgcacgccatcttcaaggagaacaagagacccagcaaggagctgcagatcaccatcagccagcagctgggcctggagctgagcaccgtgagcaacttcttcatgaacgccagaagaagaagcctggacaagtggcaggacgagggcagcagcaacagcggcaacagcagcagcagcagcagcacctgcaccaaggcctag

SEQ ID NO: 146869 - protein, 285 aa, Artificial Sequence
  derived and/or modified sequence
MSEAGEEQPMETTGATENGHEAVPEGESPAGAGTGAAAGAGGATAAPPSGNQNGAEGDQINASKNEEDAGKMFVGGLSWDTSKKDLKDYFTKFGEVVDCTIKMDPNTGRSRGFGFILFKDAASVEKVLDQKEHRLDGRVIDPKKAMAMKKDPVKKIFVGGLNPEATEEKIREYFGEFGEIEAIELPMDPKLNKRRGFVFITFKEEEPVKKVLEKKFHTVSGSKCEIKVAQPKEVYQQQQYGSGGRGNRNRGNRGSGGGGGGGGQGSTNYGKSQRRGGHQNNYKPY

SEQ ID NO: 146870 - DNA, 858 bp, Artificial Sequence
  derived and/or modified sequence
atgagcgaggccggcgaggagcagcccatggagaccaccggcgccaccgagaacggccacgaggccgtgcccgagggcgagagccccgccggcgccggcaccggcgccgccgccggcgccggcggcgccaccgccgccccccccagcggcaaccagaacggcgccgagggcgaccagatcaacgccagcaagaacgaggaggacgccggcaagatgttcgtgggcggcctgagctgggacaccagcaagaaggacctgaaggactacttcaccaagttcggcgaggtggtggactgcaccatcaagatggaccccaacaccggcagaagcagaggcttcggcttcatcctgttcaaggacgccgccagcgtggagaaggtgctggaccagaaggagcacagactggacggcagagtgatcgaccccaagaaggccatggccatgaagaaggaccccgtgaagaagatcttcgtgggcggcctgaaccccgaggccaccgaggagaagatcagagagtacttcggcgagttcggcgagatcgaggccatcgagctgcccatggaccccaagctgaacaagagaagaggcttcgtgttcatcaccttcaaggaggaggagcccgtgaagaaggtgctggagaagaagttccacaccgtgagcggcagcaagtgcgagatcaaggtggcccagcccaaggaggtgtaccagcagcagcagtacggcagcggcggcagaggcaacagaaacagaggcaacagaggcagcggcggcggcggcggcggcggcggccagggcagcaccaactacggcaagagccagagaagaggcggccaccagaacaactacaagccctactag

SEQ ID NO: 146871 - DNA, 999 bp, Artificial Sequence
  derived and/or modified sequence
atgagcgaggccggcgaggagcagcccatggagaccaccggcgccaccgagaacggccacgaggccgtgcccgagggcgagagccccgccggcgccggcaccggcgccgccgccggcgccggcggcgccaccgccgccccccccagcggcaaccagaacggcgccgagggcgaccagatcaacgccagcaagaacgaggaggacgccggcaagatgttcgtgggcggcctgagctgggacaccagcaagaaggacctgaaggactacttcaccaagttcggcgaggtggtggactgcaccatcaagatggaccccaacaccggcagaagcagaggcttcggcttcatcctgttcaaggacgccgccagcgtggagaaggtgctggaccagaaggagcacagactggacggcagagtgatcgaccccaagaaggccatggccatgaagaaggaccccgtgaagaagatcttcgtgggcggcctgaaccccgaggccaccgaggagaagatcagagagtacttcggcgagttcggcgagatcgaggccatcgagctgcccatggaccccaagctgaacaagagaagaggcttcgtgttcatcaccttcaaggaggaggagcccgtgaagaaggtgctggagaagaagttccacaccgtgagcggcagcaagtgcgagatcaaggtggcccagcccaaggaggtgtaccagcagcagcagtacggcagcggcggcagaggcaacagaaacagaggcaacagaggcagcggcggcggcggcggcggcggcggccagagccagagctggaaccagggctacggcaactactggaaccagggctacggctaccagcagggctacggccccggctacggcggctacgactacagcccctacggctactacggctacggccccggctacgactacagccagggcagcaccaactacggcaagagccagagaagaggcggccaccagaacaactacaagccctactag

SEQ ID NO: 146872 - DNA, 1602 bp, Artificial Sequence
  derived and/or modified sequence
cggcaccgcgcgggacggagcttggctgttggtcggtgggttcccgtgcggcggcggccaaggaggaggagacacagttggagcagctccgtgggctgactggggcgaggcctcagcagcgcgagcttgagtgcggccgagcctgcggcgccttcccctgcgggtggggacgagcgggccccgcggcgtcatcggcggcgaggagccgccgcgcctcggcctagcatgtcggaagcgggcgaggagcagcccatggagacgacgggcgccaccgagaacggacatgaggccgtccccgaaggcgagtcgccggccggggctggcacgggcgccgcggcgggggctggaggcgcgaccgcggcgcccccgagcgggaatcagaacggcgccgagggcgaccagatcaacgccagcaagaacgaggaggacgcgggaaaaatgttcgttggtggcctgagctgggatactagcaaaaaagatttaaaagactattttactaaatttggagaggtcgttgactgtacaataaaaatggatcccaacactggacggtcaagagggtttgggtttatcctgttcaaagatgcagccagtgtggagaaggtcctagaccagaaggagcacaggctggatggccgtgtcattgaccctaaaaaggccatggctatgaagaaggacccggtgaagaaaatcttcgttgggggtctgaatcctgaagccactgaggaaaagatcagggagtactttggcgagtttggggagattgaggccattgaattgccaatggatccaaagttgaacaaaagacgaggttttgtgtttatcacctttaaagaagaagaacccgtgaagaaggttctggagaaaaagttccatactgtcagtggaagcaagtgtgagatcaaggtggcccagcccaaagaagtctatcagcagcagcagtatggctctgggggccgtggaaaccgcaaccgagggaaccgaggcagcggaggtggtggtggaggtggaggtcagggtagtacaaactacggcaagagccagcgacgtggtggccatcagaataactacaagccatactgaggcggcagcaggagcgaccaactgatcgcacacatgctttgtttggatatggagtgaacacaattatgtaccaaatttaacttggcaaactttctattgcctgtcccatgtgcatcttatttaaaatttcccccatggaaatcactctcctgttgactatttccagagctctaggtgtttaggcagcgtgtggtgtctgagaggccatagcgccatcatgggctgatttttattaccaggtcccccagaagcaggtgggaggctctgcttcctgctgccgctctgcagcctggacctgtggaccctggttgtaaagagtaaattgtatcttaggaaaccagtgtcacctttttttcaccttttaattttatattatttgcgtcatacatttcctgtaacggaagtgttaattttactgtactttttggtaccttttgggaatctaatgtattgtaaggtattttacacgtgtcctgattttgccacaacctggatattgaagctatccaagcttttgaa

SEQ ID NO: 146873 - DNA, 1796 bp, Artificial Sequence
  derived and/or modified sequence
aaagggcgccacgagtcggcattgtcaggcggcggcaccgcgcgggacggagcttggctgttggtcggtgggttcccgtgcggcggcggccaaggaggaggagacacagttggagcagctccgtgggctgactggggcgaggcctcagcagcgcgagcttgagtgcggccgagcctgcggcgccttcccctgcgggtggggacgagcgggccccgcggcgtcatcggcggcgaggagccgccgcgcctcggcctagcatgtcggaagcgggcgaggagcagcccatggagacgacgggcgccaccgagaacggacatgaggccgtccccgaaggcgagtcgccggccggggctggcacgggcgccgcggcgggggctggaggcgcgaccgcggcgcccccgagcgggaatcagaacggcgccgagggcgaccagatcaacgccagcaagaacgaggaggacgcgggaaaaatgttcgttggtggcctgagctgggatactagcaaaaaagatttaaaagactattttactaaatttggagaggtcgttgactgtacaataaaaatggatcccaacactggacggtcaagagggtttgggtttatcctgttcaaagatgcagccagtgtggagaaggtcctagaccagaaggagcacaggctggatggccgtgtcattgaccctaaaaaggccatggctatgaagaaggacccggtgaagaaaatcttcgttgggggtctgaatcctgaagccactgaggaaaagatcagggagtactttggcgagtttggggagattgaggccattgaattgccaatggatccaaagttgaacaaaagacgaggttttgtgtttatcacctttaaagaagaagaacccgtgaagaaggttctggagaaaaagttccatactgtcagtggaagcaagtgtgagatcaaggtggcccagcccaaagaagtctatcagcagcagcagtatggctctgggggccgtggaaaccgcaaccgagggaaccgaggcagcggaggtggtggtggaggtggaggtcagagtcagagttggaatcagggctacggcaactactggaaccagggctacggctaccagcagggctacgggcctggctatggcggctacgactactcgccctatggctattacggctacggccccggctacgactacagtcagggtagtacaaactacggcaagagccagcgacgtggtggccatcagaataactacaagccatactgaggcggcagcaggagcgaccaactgatcgcacacatgctttgtttggatatggagtgaacacaattatgtaccaaatttaacttggcaaactttctattgcctgtcccatgtgcatcttatttaaaatttcccccatggaaatcactctcctgttgactatttccagagctctaggtgtttaggcagcgtgtggtgtctgagaggccatagcgccatcatgggctgatttttattaccaggtcccccagaagcaggtgggaggctctgcttcctgctgccgctctgcagcctggacctgtggaccctggttgtaaagagtaaattgtatcttaggaaaccagtgtcacctttttttcaccttttaattttatattatttgcgtcatacatttcctgtaacggaagtgttaattttactgtactttttggtaccttttgggaatctaatgtattgtaaggtattttacacgtgtcctgattttgccacaacctggatattgaagctatccaagcttttgaaataaaatttaaaaacccccaa

SEQ ID NO: 146874 - DNA, 858 bp, Artificial Sequence
  derived and/or modified sequence
atgtccgaagctggagaggaacagccaatggagacgaccggcgcaactgagaatggacatgaggccgtgcccgaaggagaaagccccgcaggagcagggacaggagcagccgccggagcaggcggtgcgacagccgctccgcccagcggcaatcaaaacggggccgaaggcgatcagataaacgcaagtaaaaacgaggaggacgctggcaagatgttcgttgggggactgtcctgggatacctcaaagaaggacctcaaggattatttcaccaagtttggcgaagtggtagattgtaccatcaagatggaccctaatactggcagatctagggggtttggattcatcctgttcaaggatgccgccagtgtggaaaaagtgctggaccagaaagagcaccgattagacggccgggtcattgatcccaagaaggcgatggcaatgaaaaaagaccccgtcaaaaagatcttcgtcggaggcctgaaccccgaggcaaccgaggagaaaattcgggaatattttggtgaattcggtgagattgaagctattgagctgcctatggatccaaagttgaataaacgacgagggtttgtattcatcaccttcaaggaagaagagccagtaaaaaaggtgctggagaaaaagtttcatacagtttccggaagcaaatgcgaaatcaaggtcgcgcagcccaaggaggtctaccagcagcaacaatatgggagcgggggtagagggaaccgaaatcgaggcaaccgtggcagcggaggcggaggcggtgggggagggcagggtagcaccaactacggcaaaagccagcgaaggggcgggcatcagaataactataaaccttactag

SEQ ID NO: 146875 - DNA, 999 bp, Artificial Sequence
  derived and/or modified sequence
atgtcggaggctggggaagagcagccgatggaaacgacaggcgcaacggagaacggacacgaagcggttcctgagggcgagtctcccgccggagcagggactggggccgcagccggcgctggcggtgcaacagcggccccaccatccgggaatcagaatggcgctgagggtgatcaaatcaatgcctccaaaaacgaggaggacgcagggaagatgtttgtcggcggactctcatgggataccagcaagaaggacctcaaggactacttcacaaagttcggtgaagtggtcgattgtaccattaagatggatcccaacacagggagaagccgcggatttgggttcattctgtttaaggacgctgcctctgtcgagaaggtcctggatcaaaaagagcaccggctggatggtagagtgatcgacccaaagaaggccatggcgatgaaaaaggatcctgtaaaaaagatcttcgtgggaggactgaacccagaagccactgaggagaaaatcagggaatacttcggggagttcggggagatcgaggccattgagctccctatggacccaaagctcaacaaacgccggggcttcgtgtttattacgtttaaagaagaagaacctgtgaagaaggtcctagaaaagaaatttcatacagtctcgggctccaagtgtgagatcaaagtcgcccagcctaaagaagtctaccaacagcagcagtacggcagcgggggaagaggaaatcgcaacagaggcaaccgcggatctggcgggggaggtggaggcggcggtcagtcacagtcttggaaccaaggttacgggaactactggaaccagggatatggttatcaacagggctacgggcctggttacggtggttatgactatagtccctatggttattacgggtacggacccggttatgactattcccaggggtccacaaattacggtaaatctcagaggcggggaggacaccagaataattacaagccatattag

SEQ ID NO: 146876 - DNA, 999 bp, Artificial Sequence
  derived and/or modified sequence
atgtccgaggcgggagaagagcaacccatggaaacaactggtgctaccgaaaatgggcacgaagccgtccctgagggggagtctcctgcgggcgcgggcacgggtgccgctgcaggtgctggaggggcgaccgccgctcctccctcaggaaatcagaatggggccgagggcgatcagattaatgctagtaagaatgaggaagacgcaggaaaaatgttcgtgggaggtctcagttgggacaccagcaagaaagatctgaaggattacttcactaaattcggcgaggtggtggattgcactattaagatggaccccaatactgggaggtcccgaggatttggattcattctcttcaaagacgctgcctctgtggagaaagtgctagaccagaaagaacacagattggatggcagggtaattgatcccaagaaagccatggccatgaaaaaagatccagtcaagaaaatctttgtgggcggtttaaaccctgaagcaactgaagagaagattcgagaatatttcggagaatttggagagatcgaagctatagaactgccaatggacccaaaacttaataagcggagggggtttgtgttcataacttttaaggaggaggaacctgtaaaaaaggtgctggagaagaagttccatactgtgtcaggaagtaaatgcgagattaaggtagctcagcctaaggaggtctaccagcagcagcaatacggaagcggaggccggggaaatcgtaacagggggaatcggggaagcggtggaggaggcggcggtgggggacagtctcagagttggaatcagggctatggcaattattggaatcagggctacggctatcaacagggctacggcccgggatatggagggtacgattacagtccatatggctactacggatatggcccaggatatgactactctcagggctctaccaactacgggaagagccagagacgcggagggcaccagaacaattataagccatattag

SEQ ID NO: 146877 - DNA, 858 bp, Artificial Sequence
  derived and/or modified sequence
atgagtgaagcaggtgaagagcagccgatggagactactggggcaacagaaaatggacatgaagccgtacccgaaggggagtcgccagcaggtgctgggacaggtgcagcagctggagccggtggtgccaccgctgctcccccttctggtaatcaaaatggcgccgagggtgaccagataaatgcctcaaagaatgaggaggatgcagggaagatgttcgtcggaggcctttcgtgggacacatcaaagaaagatttgaaagattatttcaccaagtttggagaggttgttgattgtacaattaagatggaccctaacacaggtcgaagcagaggtttcggctttatcctattcaaggacgccgcatcagtcgagaaagttcttgaccagaaagaacatagactggacggcagagtgatcgatccgaaaaaagcaatggcaatgaagaaagaccccgtgaagaagatctttgtgggcgggttaaaccctgaagcaacggaggaaaaaatacgagagtattttggcgaatttggcgaaattgaggcaatcgaactgcctatggatcctaaactgaacaagcgtaggggattcgtgttcataacattcaaggaagaggagcccgtgaagaaggtcctcgaaaagaaatttcacaccgttagcggatccaaatgcgaaattaaagtggcgcagcctaaagaggtgtatcaacagcagcagtatggctccggtggcagaggcaatcggaaccgggggaatcgcggttcaggcggcggcggtggcggaggcggccagggtagcacgaattacggtaaatctcagaggcgaggcggtcaccaaaacaactacaagccttattag

SEQ ID NO: 146878 - DNA, 858 bp, Artificial Sequence
  derived and/or modified sequence
atgtctgaggccggggaggagcagcccatggagaccactggagccacagaaaatggccacgaggccgtgcctgagggggagagccctgctggggccggcaccggggctgctgctggggccggcggggccacagctgcccctccttctggcaaccagaatggagctgagggggaccagatcaatgccagcaagaatgaagaagatgctgggaagatgtttgtgggcggcctgtcctgggacaccagcaagaaggacctgaaggactacttcaccaagtttggagaggtggtggactgcaccatcaagatggaccccaacacaggccgcagccggggcttcggcttcatcctcttcaaggatgctgcctctgtggagaaggtgctggaccagaaggagcaccggctggatggccgggtcatcgaccccaagaaggccatggccatgaagaaggaccctgtgaagaagatctttgtgggcggcctgaaccctgaggccacagaggagaagatccgggagtactttggagaatttggagaaattgaggccatcgagctgcccatggaccccaagctgaacaagaggcggggctttgtgttcatcaccttcaaggaggaggagcctgtgaagaaggtgctggagaagaagttccacacagtgtctggcagcaaatgtgagatcaaggtggcccagcccaaggaggtgtaccagcagcagcagtatggcagcggcggccggggcaacagaaacagaggcaacagaggcagcggcggcggcggcggcggcggcggccagggcagcaccaactacggcaagagccagaggcggggcggccaccagaacaactacaagccctactag

SEQ ID NO: 146879 - DNA, 999 bp, Artificial Sequence
  derived and/or modified sequence
atgtctgaggccggggaggagcagcccatggagaccactggagccacagaaaatggccacgaggccgtgcctgagggggagagccctgctggggccggcaccggggctgctgctggggccggcggggccacagctgcccctccttctggcaaccagaatggagctgagggggaccagatcaatgccagcaagaatgaagaagatgctgggaagatgtttgtgggcggcctgtcctgggacaccagcaagaaggacctgaaggactacttcaccaagtttggagaggtggtggactgcaccatcaagatggaccccaacacaggccgcagccggggcttcggcttcatcctcttcaaggatgctgcctctgtggagaaggtgctggaccagaaggagcaccggctggatggccgggtcatcgaccccaagaaggccatggccatgaagaaggaccctgtgaagaagatctttgtgggcggcctgaaccctgaggccacagaggagaagatccgggagtactttggagaatttggagaaattgaggccatcgagctgcccatggaccccaagctgaacaagaggcggggctttgtgttcatcaccttcaaggaggaggagcctgtgaagaaggtgctggagaagaagttccacacagtgtctggcagcaaatgtgagatcaaggtggcccagcccaaggaggtgtaccagcagcagcagtatggcagcggcggccggggcaacagaaacagaggcaacagaggcagcggcggcggcggcggcggcggcggccagagccagagctggaaccagggctacggcaactactggaaccagggctacggctaccagcagggctacggccctggctacggcggctatgactacagcccctacggctactacggctacggccctggctatgactacagccagggcagcaccaactacggcaagagccagaggagaggaggccaccagaacaactacaagccctactag

SEQ ID NO: 146880 - DNA, 858 bp, Artificial Sequence
  derived and/or modified sequence
atgagcgaggccggcgaggagcagcccatggagaccaccggcgccaccgaaaatggccacgaagccgtaccagagggcgaaagccccgcgggagctggaaccggtgctgccgcaggagctgggggcgccacagctgctcctccctcggggaaccaaaacggcgcagagggggatcagataaacgcctcaaaaaacgaggaagacgctggcaaaatgttcgtcgggggtctgagctgggacacatccaaaaaagacctaaaggactatttcacgaagtttggcgaagtggtggactgtacgatcaagatggacccaaatacgggacgcagccgcgggttcggatttattctgtttaaggatgcagcatccgtcgagaaagtgttagaccagaaggagcatcgcctggacggccgggtcatcgacccaaagaaagccatggcaatgaagaaggatcctgtgaaaaagatctttgtgggcggactcaacccagaggctactgaagagaagatcagagaatatttcggcgaattcggagagatagaggcgattgagttgcccatggatcctaagctcaacaaacgaagaggtttcgtgtttattacatttaaggaagaggagcctgtaaagaaagtgctcgagaagaagttccacactgtgtcaggatctaagtgcgaaatcaaagtcgctcagcccaaggaggtctaccagcagcaacaatacggctccggtgggaggggaaatcggaataggggtaatcggggatccggcgggggtggaggaggtggtggccaggggtcaacaaattacggcaaatcgcagcgcagaggcggccaccagaacaattataaaccctactag

SEQ ID NO: 146881 - DNA, 999 bp, Artificial Sequence
  derived and/or modified sequence
atgagcgaggccggcgaggagcagcccatggagaccaccggcgccaccgaaaatggacacgaggctgtccccgaaggggagagtcccgccggcgcgggtacaggggcagccgccggagcagggggagcgaccgccgcccctccttcagggaatcagaatggtgccgagggtgatcagatcaatgcaagtaagaatgaggaggacgcgggtaagatgtttgtcggtggcctctcatgggacacatccaaaaaagatttgaaggactacttcactaagttcggggaggtcgtcgactgtaccattaaaatggaccctaatactggacgtagtcgcggtttcggctttattctctttaaagatgcggcttctgtagaaaaagtcctagaccagaaggagcatcgactggacggtcgcgtgattgaccctaagaaagccatggctatgaaaaaggacccggttaaaaagatcttcgtgggagggttaaacccggaggccactgaggaaaagatccgcgaatattttggtgaattcggtgagatagaggccattgagctgcccatggatcctaagctgaataaacgcagggggtttgtcttcatcacctttaaagaggaagagccggtgaagaaagtgttagagaaaaagtttcacacagtttccggcagtaaatgcgaaatcaaggtggcccagcccaaggaagtgtaccagcagcagcagtatgggagtggcggcagaggcaatagaaatcgaggcaatagaggctctggagggggagggggtgggggtgggcagtcccagagctggaaccagggctacgggaactactggaatcagggctacggctaccagcagggatacggtccagggtatggggggtacgactactcaccctacggctattacggttatggacctgggtatgactattctcagggtagtacaaattatgggaagagccagaggaggggcggtcaccaaaacaattataaaccctattag

SEQ ID NO: 146882 - DNA, 999 bp, Artificial Sequence
  derived and/or modified sequence
atgagcgaggccggcgaggagcagcccatggagaccaccggcgccactgagaacggccacgaagccgtgcctgaaggagagagtcccgcaggggccggaaccggtgccgcggctggcgccggcggtgctaccgccgccccaccaagtgggaatcagaatggggcagagggcgaccagatcaatgctagtaagaacgaagaagatgctggtaagatgttcgtgggcggactttcttgggacaccagcaaaaaggatctgaaggattacttcaccaagtttggagaggtcgtcgactgtacgatcaagatggatcccaataccgggcgctcccgcgggtttgggttcatccttttcaaagatgccgcatccgtggaaaaagtcctcgatcagaaggaacatagattggacggtcgggtcattgatccaaagaaagcgatggccatgaaaaaggatccggtcaagaagattttcgtcggcggtcttaacccggaagctacggaggaaaagattcgcgaatactttggagagttcggggagatcgaagcgattgaactgccgatggaccctaaattgaacaaaaggcgaggattcgtctttatcaccttcaaagaagaggagccagtcaagaaggtgcttgagaagaagttccacaccgtgtccggttcgaagtgtgagatcaaggtagcgcagccaaaggaggtttaccagcagcagcaatacggatccggtgggcgaggaaatcggaatcgaggtaacaggggtagcgggggcggcgggggaggcggaggacagagccagagttggaaccaagggtatggtaattactggaaccaaggatatggatatcaacagggatacggccctggatacggcgggtatgattacagcccctatgggtattacgggtacggtcctgggtacgactatagtcaagggtctacgaattacggaaaatcacagcgacgtggtggacaccagaataattataagccttactag

SEQ ID NO: 146883 - DNA, 858 bp, Artificial Sequence
  derived and/or modified sequence
atgagcgaggccggcgaggagcagcccatggagaccaccggcgccacagaaaacggacacgaggctgtacccgaaggtgaatcaccggcaggcgccggcacaggcgccgcggccggggctgggggcgctactgccgcaccaccctcggggaaccagaacggtgcagaaggagatcagatcaacgcgtctaagaatgaagaagacgctgggaagatgtttgtgggtgggttgtcatgggacacctcgaaaaaggacctgaaggattacttcaccaagtttggggaggtggtggactgtactatcaagatggatcccaacaccgggagatccaggggctttggcttcatcctattcaaggacgctgcttcggtggaaaaagtgctggaccagaaagagcatcggctggatggacgcgtgatcgacccaaaaaaagccatggctatgaaaaaagatccagtgaaaaagatatttgtgggtggcctcaatccagaggccaccgaggagaaaattagggaatattttggtgagttcggcgagatagaagccatcgagttgcccatggaccctaaactgaacaagcgtagaggttttgtctttataaccttcaaggaggaagagcccgtcaaaaaagttttagagaaaaagtttcataccgtcagtggtagtaagtgtgaaattaaggtggcgcagcccaaagaagtctaccagcaacagcagtacggctctggtggtaggggcaaccggaaccgcggaaacagaggatccggcggaggggggggcggtggcggccaggggtcaactaattatggaaagtctcaaaggcggggcggccatcagaacaactacaaaccgtattag

SEQ ID NO: 146884 - DNA, 858 bp, Artificial Sequence
  derived and/or modified sequence
atgtccgaagcaggtgaagaacagccaatggaaaccaccggagccactgagaacgggcacgaagccgtcccggaaggtgaaagcccagcaggagccggaacaggagctgccgctggagcaggcggagcaactgccgcacctcctagcgggaatcagaatggtgcagaaggagatcagatcaacgcatcaaagaacgaagaggatgccggaaaaatgtttgtaggaggtctgagctgggacacaagcaaaaaggacctcaaggactattttacaaagtttggcgaggtggttgactgcaccatcaaaatggatccaaacactgggagatcccggggatttggattcattctttttaaggatgctgcgagcgttgagaaagtgttggatcaaaaggagcatcgcctcgatggacgcgtgattgaccccaagaaagccatggctatgaaaaaggacccagtgaagaagatctttgtcggaggcctgaatccagaagcaaccgaggaaaaaatccgtgaatacttcggcgaattcggcgaaattgaggctatagagctgcctatggatcccaagctgaataagaggagaggatttgtgttcattacctttaaggaagaggagccagtcaagaaggtgttggagaagaagtttcataccgtgtcgggaagcaagtgcgagattaaggtcgctcagccaaaagaagtgtatcagcagcaacagtatggttcgggcggacgaggcaatcgaaatcgcggaaatcggggtagcggcggtggaggagggggagggggtcaaggctcaaccaattacggtaagtcccagcggaggggaggacaccaaaataactataagccatactag

SEQ ID NO: 146885 - DNA, 999 bp, Artificial Sequence
  derived and/or modified sequence
atgtctgaggctggggaggaacagccaatggagactactggcgcaacagaaaatgggcacgaggctgtgcctgagggcgaaagcccagcaggtgccggaactggggctgcagcaggggctggcggagctacggccgcacctccctctgggaatcagaatggtgctgagggtgaccaaattaacgcttccaagaacgaggaggacgcgggtaagatgtttgtgggaggcttgtcatgggatacaagcaagaaggatttgaaggattattttaccaagtttggcgaggtggtggattgcaccattaaaatggaccccaacactggcagaagtaggggatttggattcatcctgttcaaagatgccgctagtgtggagaaggtcttggaccagaaagaacatagattggatggacgtgttatcgatcctaagaaagccatggctatgaaaaaggatcccgttaagaaaattttcgtggggggtctcaacccagaggccactgaagaaaagatcagagagtacttcggagagtttggggagatcgaggcgatagaactccccatggacccaaaactgaacaaaagacgtggtttcgtgtttatcaccttcaaggaggaggagccagttaagaaagtgctcgaaaagaaatttcacaccgtttccggaagcaagtgtgagataaaggttgcacagcctaaggaggtgtaccagcagcagcagtatggaagcggtggcagaggaaatcgcaacagagggaatcgtggcagcggaggcggagggggtgggggaggccagtcacagtcctggaatcagggatacggtaattactggaatcagggatacgggtatcaacagggctacggccctggctacgggggatacgattattctccttatgggtattatggctacgggccagggtacgattactctcaggggagcaccaactatgggaagagccagagacgaggcggtcatcagaataattacaagccatattag

SEQ ID NO: 146886 - DNA, 999 bp, Artificial Sequence
  derived and/or modified sequence
atgtccgaggccggtgaagaacaaccaatggaaacaaccggagccacagagaatgggcacgaggccgtgcctgagggagagagtcccgctggcgcaggaacaggtgccgctgcgggtgctggcggagctactgccgctcctccaagtgggaatcagaacggggcagaaggagaccaaatcaacgcgagtaaaaacgaggaagacgcgggaaagatgtttgtcgggggactctcctgggacacgtccaagaaggatctcaaggattactttacaaagttcggcgaggtggtggattgtaccatcaagatggatcccaacacaggcagatcccgcggtttcgggttcattttgtttaaggatgccgctagcgttgaaaaagtcttggaccagaaggagcatcgccttgacgggagagtcattgatcccaaaaaggccatggcgatgaaaaaggatccggttaaaaagatttttgtgggcggtttgaaccccgaggctactgaggagaagatccgtgaatattttggggagttcggtgagattgaggcaattgagctgccaatggaccccaaattgaataagaggcgaggctttgttttcatcactttcaaggaagaagagcccgtgaaaaaggttctggaaaagaagtttcatactgtatcgggatccaagtgtgagattaaggtggcccagccgaaagaagtgtaccagcaacagcagtatggcagcgggggaagaggcaaccgcaatagagggaaccggggaagcggcggaggcggaggcggaggcggacagagtcagagttggaaccaaggttacggaaattattggaatcaggggtacggatatcagcagggctatggcccaggctatggtggatacgactactccccgtacggctattatggctatgggccaggttacgattactctcaaggcagtacaaattacggaaaatctcagcggaggggcggtcatcagaacaattacaaaccgtattag

SEQ ID NO: 146887 - DNA, 858 bp, Artificial Sequence
  derived and/or modified sequence
atgtcggaagccggtgaggagcaaccaatggaaacgaccggggcaacagaaaacggccatgaggcagttcctgagggcgaaagccctgccggagctggtacaggcgcagccgcaggtgcaggaggagctaccgccgcacccccttcgggaaatcagaatggcgctgagggagatcagataaatgcctcaaagaacgaggaggacgccggaaaaatgttcgtggggggattgagttgggatacctcaaagaaagatctgaaagactattttacaaagttcggtgaggttgtggattgtaccatcaagatggatcctaatacggggagatccagggggttcggatttatcctgttcaaggacgccgcaagcgtggaaaaggtcctggatcaaaaggaacacagactggatgggcgagtcatcgaccctaaaaaggccatggccatgaagaaggacccagtgaagaagatttttgtcggaggactgaatccagaggctaccgaggagaagatacgggagtactttggggagttcggcgagatcgaagcgatagagctccccatggatccgaagctgaataagcggcgaggatttgtgtttataacctttaaagaagaggagcccgtaaagaaagtgctggagaagaagttccatacggtctctggctcaaagtgcgagattaaggtcgcccagcccaaggaggtctaccagcagcagcagtacggctccggcggacggggaaatcggaataggggaaatagggggtccgggggaggtgggggtggaggaggccagggttcgactaattacggcaaatcccagcggagaggtggacaccagaacaactataaaccttattag

SEQ ID NO: 146888 - DNA, 1785 bp, Artificial Sequence
  derived and/or modified sequence
tcggtgggttcccgtgcggcggcggccaaggaggaggagacacagttggagcagctccgtgggctgactggggcgaggcctcagcagcgcgagcttgagtgcggccgagcctgcggcgccttcccctgcgggtggggacgagcgggccccgcggcgtcatcggcggcgaggtgagcggcggccggcgggcgggagctctggcgggagccgcgccggcctgacgcgctgtcgccgctggttgcaggagccgccgcgcctcggcctagcatgtcggaagcgggcgaggagcagcccatggagacgacgggcgccaccgagaacggacatgaggccgtccccgaaggcgagtcgccggccggggctggcacgggcgccgcggcgggggctggaggcgcgaccgcggcgcccccgagcgggaatcagaacggcgccgagggcgaccagatcaacgccagcaagaacgaggaggacgcgggaaaaatgttcgttggtggcctgagctgggatactagcaaaaaagatttaaaagactattttactaaatttggagaggtcgttgactgtacaataaaaatggatcccaacactggacggtcaagagggtttgggtttatcctgttcaaagatgcagccagtgtggagaaggtcctagaccagaaggagcacaggctggatggccgtgtcattgaccctaaaaaggccatggctatgaagaaggacccggtgaagaaaatcttcgttgggggtctgaatcctgaagccactgaggaaaagatcagggagtactttggcgagtttggggagattgaggccattgaattgccaatggatccaaagttgaacaaaagacgaggttttgtgtttatcacctttaaagaagaagaacccgtgaagaaggttctggagaaaaagttccatactgtcagtggaagcaagtgtgagatcaaggtggcccagcccaaagaagtctatcagcagcagcagtatggctctgggggccgtggaaaccgcaaccgagggaaccgaggcagcggaggtggtggtggaggtggaggtcagagtcagagttggaatcagggctacggcaactactggaaccagggctacggctaccagcagggctacgggcctggctatggcggctacgactactcgccctatggctattacggctacggccccggctacgactacagtcagggtagtacaaactacggcaagagccagcgacgtggtggccatcagaataactacaagccatactgaggcggcagcaggagcgaccaactgatcgcacacatgctttgtttggatatggagtgaacacaattatgtaccaaatttaacttggcaaactttctattgcctgtcccatgtgcatcttatttaaaatttcccccatggaaatcactctcctgttgactatttccagagctctaggtgtttaggcagcgtgtggtgtctgagaggccatagcgccatcatgggctgatttttattaccaggtcccccagaagcaggtgggaggctctgcttcctgctgccgctctgcagcctggacctgtggaccctggttgtaaagagtaaattgtatcttaggaaaccagtgtcacctttttttcaccttttaattttatattatttgcgtcatacatttcctgtaacggaagtgttaattttactgtactttttggtaccttttgggaatctaatgtattgtaaggtattttacacgtgtcctgattttgccacaacctggatattgaagctatccaagcttttgaa

SEQ ID NO: 146889 - DNA, 1674 bp, Artificial Sequence
  derived and/or modified sequence
gcgggacggagcttggctgttggtcggtgggttcccgtgcggcggcggccaaggaggaggagacacagttggagcagctccgtgggctgactggggcgaggcctcagcagcgcgagcttgagtgcggccgagcctgcggcgccttcccctgcgggtggggacgagcgggccccgcggcgtcatcggcggcgaggtgagcggcggccggcgggcgggagctctggcgggagccgcgccggcctgacgcgctgtcgccgctggttgcaggagccgccgcgcctcggcctagcatgtcggaagcgggcgaggagcagcccatggagacgacgggcgccaccgagaacggacatgaggccgtccccgaaggcgagtcgccggccggggctggcacgggcgccgcggcgggggctggaggcgcgaccgcggcgcccccgagcgggaatcagaacggcgccgagggcgaccagatcaacgccagcaagaacgaggaggacgcgggaaaaatgttcgttggtggcctgagctgggatactagcaaaaaagatttaaaagactattttactaaatttggagaggtcgttgactgtacaataaaaatggatcccaacactggacggtcaagagggtttgggtttatcctgttcaaagatgcagccagtgtggagaaggtcctagaccagaaggagcacaggctggatggccgtgtcattgaccctaaaaaggccatggctatgaagaaggacccggtgaagaaaatcttcgttgggggtctgaatcctgaagccactgaggaaaagatcagggagtactttggcgagtttggggagattgaggccattgaattgccaatggatccaaagttgaacaaaagacgaggttttgtgtttatcacctttaaagaagaagaacccgtgaagaaggttctggagaaaaagttccatactgtcagtggaagcaagtgtgagatcaaggtggcccagcccaaagaagtctatcagcagcagcagtatggctctgggggccgtggaaaccgcaaccgagggaaccgaggcagcggaggtggtggtggaggtggaggtcagggtagtacaaactacggcaagagccagcgacgtggtggccatcagaataactacaagccatactgaggcggcagcaggagcgaccaactgatcgcacacatgctttgtttggatatggagtgaacacaattatgtaccaaatttaacttggcaaactttctattgcctgtcccatgtgcatcttatttaaaatttcccccatggaaatcactctcctgttgactatttccagagctctaggtgtttaggcagcgtgtggtgtctgagaggccatagcgccatcatgggctgatttttattaccaggtcccccagaagcaggtgggaggctctgcttcctgctgccgctctgcagcctggacctgtggaccctggttgtaaagagtaaattgtatcttaggaaaccagtgtcacctttttttcaccttttaattttatattatttgcgtcatacatttcctgtaacggaagtgttaattttactgtactttttggtaccttttgggaatctaatgtattgtaaggtattttacacgtgtcctgattttgccacaacctggatattgaagctatccaagcttttgaaataaaat

SEQ ID NO: 146890 - protein, 806 aa, Artificial Sequence
  derived and/or modified sequence
MSSSPVNVKKLKVSELKEELKKRRLSDKGLKAELMERLQAALDDEEAGGRPAMEPGNGSLDLGGDSAGRSGAGLEQEAAAGGDEEEEEEEEEEEGISALDGDQMELGEENGAAGAADSGPMEEEEAASEDENGDDQGFQEGEDELGDEEEGAGDENGHGEQQPQPPATQQQQPQQQRGAAKEAAGKSSGPTSLFAVTVAPPGARQGQQQAGGDGKTEQKGGDKKRGVKRPREDHGRGYFEYIEENKYSRAKSPQPPVEEEDEHFDDTVVCLDTYNCDLHFKISRDRLSASSLTMESFAFLWAGGRASYGVSKGKVCFEMKVTEKIPVRHLYTKDIDIHEVRIGWSLTTSGMLLGEEEFSYGYSLKGIKTCNCETEDYGEKFDENDVITCFANFESDEVELSYAKNGQDLGVAFKISKEVLAGRPLFPHVLCHNCAVEFNFGQKEKPYFPIPEEYTFIQNVPLEDRVRGPKGPEEKKDCEVVMMIGLPGAGKTTWVTKHAAENPGKYNILGTNTIMDKMMVAGFKKQMADTGKLNTLLQRAPQCLGKFIEIAARKKRNFILDQTNVSAAAQRRKMCLFAGFQRKAVVVCPKDEDYKQRTQKKAEVEGKDLPEHAVLKMKGNFTLPEVAECFDEITYVELQKEEAQKLLEQYKEESKKALPPEKKQNTGSKKSNKNKSGKNQFNRGGGHRGRGGFNMRGGNFRGGAPGNRGGYNRRGNMPQRGGGGGGSGGIGYPYPRAPVFPGRGSYSNRGNYNRGGMPNRGNYNQNFRGRGNNRGYKNQSQGYNQWQQGQFWGQKPWSQHYHQGYY

SEQ ID NO: 146891 - DNA, 729 bp, Artificial Sequence
  derived and/or modified sequence
atgggcctggtgtgcgtgctgggcgacggcaagaccgagcagaagggcggcgacaagaagagaggcgtgaagagacccagagaggaccacggcagaggctacttcgagtacatcgaggagaacaagtacagcagagccaagagcccccagccccccgtggaggaggaggacgagcacttcgacgacaccgtggtgtgcctggacacctacaactgcgacctgcacttcaagatcagcagagacagactgagcgccagcagcctgaccatggagagcttcgccttcctgtgggccggcggcagagccagctacggcgtgagcaagggcaaggtgtgcttcgagatgaaggtgaccgagaagatccccgtgagacacctgtacaccaaggacatcgacatccacgaggtgagaatcggctggagcctgaccaccagcggcatgctgctgggcgaggaggagttcagctacggctacagcctgaagggcatcaagacctgcaactgcgagaccgaggactacggcgagaagttcgacgagaacgacgtgatcacctgcttcgccaacttcgagagcgacgaggtggagctgagctacgccaagaacggccaggacctgggcgtggccttcaagatcagcaaggaggtgctggccggcagacccctgttcccccacgtgctgtgccacaactgcgccgtggagttcaacttcggccagaaggagaagccctag

SEQ ID NO: 146892 - DNA, 2421 bp, Artificial Sequence
  derived and/or modified sequence
atgagcagcagccccgtgaacgtgaagaagctgaaggtgagcgagctgaaggaggagctgaagaagagaagactgagcgacaagggcctgaaggccgagctgatggagagactgcaggccgccctggacgacgaggaggccggcggcagacccgccatggagcccggcaacggcagcctggacctgggcggcgacagcgccggcagaagcggcgccggcctggagcaggaggccgccgccggcggcgacgaggaggaggaggaggaggaggaggaggaggagggcatcagcgccctggacggcgaccagatggagctgggcgaggagaacggcgccgccggcgccgccgacagcggccccatggaggaggaggaggccgccagcgaggacgagaacggcgacgaccagggcttccaggagggcgaggacgagctgggcgacgaggaggagggcgccggcgacgagaacggccacggcgagcagcagccccagccccccgccacccagcagcagcagccccagcagcagagaggcgccgccaaggaggccgccggcaagagcagcggccccaccagcctgttcgccgtgaccgtggccccccccggcgccagacagggccagcagcaggccggcggcgacggcaagaccgagcagaagggcggcgacaagaagagaggcgtgaagagacccagagaggaccacggcagaggctacttcgagtacatcgaggagaacaagtacagcagagccaagagcccccagccccccgtggaggaggaggacgagcacttcgacgacaccgtggtgtgcctggacacctacaactgcgacctgcacttcaagatcagcagagacagactgagcgccagcagcctgaccatggagagcttcgccttcctgtgggccggcggcagagccagctacggcgtgagcaagggcaaggtgtgcttcgagatgaaggtgaccgagaagatccccgtgagacacctgtacaccaaggacatcgacatccacgaggtgagaatcggctggagcctgaccaccagcggcatgctgctgggcgaggaggagttcagctacggctacagcctgaagggcatcaagacctgcaactgcgagaccgaggactacggcgagaagttcgacgagaacgacgtgatcacctgcttcgccaacttcgagagcgacgaggtggagctgagctacgccaagaacggccaggacctgggcgtggccttcaagatcagcaaggaggtgctggccggcagacccctgttcccccacgtgctgtgccacaactgcgccgtggagttcaacttcggccagaaggagaagccctacttccccatccccgaggagtacaccttcatccagaacgtgcccctggaggacagagtgagaggccccaagggccccgaggagaagaaggactgcgaggtggtgatgatgatcggcctgcccggcgccggcaagaccacctgggtgaccaagcacgccgccgagaaccccggcaagtacaacatcctgggcaccaacaccatcatggacaagatgatggtggccggcttcaagaagcagatggccgacaccggcaagctgaacaccctgctgcagagagccccccagtgcctgggcaagttcatcgagatcgccgccagaaagaagagaaacttcatcctggaccagaccaacgtgagcgccgccgcccagagaagaaagatgtgcctgttcgccggcttccagagaaaggccgtggtggtgtgccccaaggacgaggactacaagcagagaacccagaagaaggccgaggtggagggcaaggacctgcccgagcacgccgtgctgaagatgaagggcaacttcaccctgcccgaggtggccgagtgcttcgacgagatcacctacgtggagctgcagaaggaggaggcccagaagctgctggagcagtacaaggaggagagcaagaaggccctgccccccgagaagaagcagaacaccggcagcaagaagagcaacaagaacaagagcggcaagaaccagttcaacagaggcggcggccacagaggcagaggcggcttcaacatgagaggcggcaacttcagaggcggcgcccccggcaacagaggcggctacaacagaagaggcaacatgccccagagaggcggcggcggcggcggcagcggcggcatcggctacccctaccccagagcccccgtgttccccggcagaggcagctacagcaacagaggcaactacaacagaggcggcatgcccaacagaggcaactacaaccagaacttcagaggcagaggcaacaacagaggctacaagaaccagagccagggctacaaccagtggcagcagggccagttctggggccagaagccctggagccagcactaccaccagggctactactag

SEQ ID NO: 146893 - DNA, 729 bp, Artificial Sequence
  derived and/or modified sequence
atggggctcgtgtgtgtgctcggggacggtaaaaccgagcaaaagggtggggataagaaacggggcgtcaaaaggccccgagaggaccacggcagaggatactttgagtatattgaggagaacaagtacagtcgggccaagtccccccagccacccgtggaagaggaagacgagcattttgatgatactgtggtgtgtttagacacctataattgtgatttacatttcaagatctcccgggataggctgtcagcctcctcccttactatggagtcctttgccttcctctgggccggcggtcgcgcctcgtacggtgtgagcaagggcaaagtttgtttcgagatgaaagtgactgagaagatccctgtcagacacttgtatacaaaagacatcgatatccatgaagtgcggatagggtggtccttaacaaccagtggaatgctgctgggggaagaggagttctcttatggttattctctgaaaggcattaagacatgcaattgtgagaccgaagactatggggagaagttcgacgagaacgacgtcataacatgcttcgccaactttgagtccgatgaggtcgaattatcctatgccaagaatggccaagacctaggagttgcatttaagattagcaaggaagtcttggccgggcgacccttgttcccccatgtgctatgccacaactgcgccgtcgaatttaatttcgggcagaaggagaagccatag

SEQ ID NO: 146894 - DNA, 2421 bp, Artificial Sequence
  derived and/or modified sequence
atgtcgtcctctcccgttaatgtaaaaaaattaaaagtatcagaactaaaagaagaactgaagaaaagaaggttgtcagataagggtctaaaagcagagttgatggagaggctgcaggccgcgttggatgatgaagaagctgggggcaggcccgccatggagccagggaatggctccctggatttgggcggcgattcggccggtaggagcggcgctgggctggaacaggaggccgcagcaggcggcgacgaagaggaggaggaggaggaggaagaagaagagggtattagcgccttggatggagaccaaatggagttgggggaagaaaatggggctgcaggcgctgcagactctggacctatggaggaggaggaagccgcgtcagaggatgaaaatggcgatgaccaagggttccaagagggagaggatgagctcggcgacgaggaagaaggggcaggcgacgaaaatggccatggggagcagcagccccaaccccccgcaacccagcagcaacaacctcaacagcagagaggtgcggcaaaagaggccgcagggaaaagcagtggtcctaccagcctctttgccgtcactgtcgccccgcccggggcccgccagggccagcagcaagcaggtggcgacggcaaaacagagcaaaaaggcggcgacaagaaacgcggcgttaaacgaccccgggaggaccacggccgagggtatttcgagtacatcgaagaaaataaatatagccgggccaagagtccccagccaccggtggaagaagaggacgagcacttcgacgataccgtggtgtgtctggatacttataactgcgacttacactttaaaatctctagggaccggctgagcgcctcatccctgaccatggagtctttcgcattcttatgggctggcggtcgggcttcctatggtgtgtccaagggaaaggtttgttttgagatgaaagtgacggaaaaaattccagtgcggcatttgtatacaaaggacatcgacatccatgaggttcgtattggctggagtctaacaacttcaggcatgttgttaggagaagaggaattctcttacgggtattcattgaagggtataaagacctgtaattgcgaaaccgaagactacggcgagaaatttgacgagaacgatgtaatcacgtgtttcgctaatttcgagtcggacgaggttgagcttagctacgccaagaatggacaggatttaggagtcgcctttaaaatttcaaaagaagtgctagccgggcgtcccctgttcccccatgttctctgtcataactgtgctgtggaattcaactttggacagaaggagaagccatatttccccatccccgaggagtatactttcattcagaacgtccccctggaggatagggtccgtggcccgaagggtccagaggagaagaaggattgcgaagtggtgatgatgattggcctgccaggtgccggcaaaacaacatgggttacgaagcacgccgcagagaatcccggaaagtacaatatactggggacaaacacaatcatggacaagatgatggtcgctgggttcaagaagcagatggccgacaccgggaagttaaatactctgctgcaacgcgcaccacaatgtctcggaaagtttattgaaattgctgcaagaaaaaagcgtaatttcatactggatcaaaccaacgtatcagctgctgctcagcgccgaaaaatgtgcttgtttgctgggtttcaacgtaaagcagtggtagtgtgcccgaaggatgaggactacaaacaacgaacccagaaaaaagccgaagtcgagggcaaagacttgcccgagcatgccgtcctgaagatgaagggaaactttacactgcccgaagtagcagaatgctttgatgaaattacctatgttgaactccagaaagaggaagctcagaaactactggaacaatacaaagaggagtctaagaaagcgttgcccccagaaaagaagcaaaatacagggtctaaaaagtcaaacaagaataagagcgggaaaaaccagttcaaccgaggaggtgggcatcgtggccgaggcgggtttaatatgcggggaggtaatttcaggggaggcgctcccggaaatagggggggctacaacagacgagggaatatgcctcagcgggggggagggggtggcggctcaggaggaatcgggtacccatacccacgtgctcccgtattccccgggcgcggatcgtattccaatcgggggaactacaatagaggcggaatgccgaataggggtaactacaaccagaactttcgcggaaggggcaataaccggggttataaaaatcaaagccagggctataatcaatggcagcagggccagttttggggccaaaaaccgtggtcacagcattatcaccagggttactattag

SEQ ID NO: 146895 - DNA, 729 bp, Artificial Sequence
  derived and/or modified sequence
atgggcctggtgtgtgtgctgggagatggcaagacagagcagaagggcggggacaagaagaggggcgtgaagaggccccgggaggaccacggccggggctactttgagtacatcgaggagaacaagtacagccgggccaagagcccccagccccctgtggaggaggaggatgagcactttgatgacacagtggtgtgcctggacacctacaactgtgacctgcacttcaagatcagccgggaccggctgagcgccagcagcctgaccatggagagctttgccttcctgtgggccggcggccgggccagctatggagtgtccaagggcaaggtgtgctttgagatgaaggtgacagagaagatccctgtgcgccacctgtacaccaaggacatcgacatccacgaggtgcgcatcggctggagcctgaccaccagcggcatgctgctgggggaggaggagttctcctatggctacagcctgaagggcatcaagacctgcaactgtgaaacagaagattatggagagaagtttgatgaaaatgatgtgatcacctgctttgccaactttgaaagtgatgaggtggagctgtcctatgccaagaatggccaggacctgggcgtggccttcaagatcagcaaggaggtgctggccggccggcccctcttcccccacgtgctgtgccacaactgtgctgtggagttcaactttggccagaaggagaagccctag

SEQ ID NO: 146896 - DNA, 2421 bp, Artificial Sequence
  derived and/or modified sequence
atgagcagcagccctgtgaatgtgaagaagctgaaggtgtctgagctgaaggaggagctgaagaagaggcggctgagtgacaagggcctgaaggccgagctgatggagcggctgcaggccgccctggatgatgaggaggccggcggccgcccagccatggagcctggaaatggcagcctggacctgggcggggacagcgctggccgcagcggggccggcctggagcaggaggccgctgctggaggagatgaggaggaggaggaggaggaggaggaggaggagggcatcagcgccctggatggagaccagatggagctgggggaggagaatggagctgctggagctgctgacagcggccccatggaggaggaggaggccgcctctgaagatgaaaatggagatgaccagggcttccaggagggggaggatgagctgggagatgaggaggagggcgctggagatgaaaatggccacggggagcagcagccccagcccccagccacccagcagcagcagccccagcagcagagaggagctgccaaggaggccgccggcaagagcagcggccccaccagcctgtttgctgtgacagtggcccctcctggggcccggcagggccagcagcaggccggaggagatggcaagacagagcagaagggcggggacaagaagaggggcgtgaagaggccccgggaggaccacggccggggctactttgagtacatcgaggagaacaagtacagccgggccaagagcccccagccccctgtggaggaggaggatgagcactttgatgacacagtggtgtgcctggacacctacaactgtgacctgcacttcaagatcagccgggaccggctgagcgccagcagcctgaccatggagagctttgccttcctgtgggccggcggccgggccagctatggagtgtccaagggcaaggtgtgctttgagatgaaggtgacagagaagatccctgtgcgccacctgtacaccaaggacatcgacatccacgaggtgcgcatcggctggagcctgaccaccagcggcatgctgctgggggaggaggagttctcctatggctacagcctgaagggcatcaagacctgcaactgtgaaacagaagattatggagagaagtttgatgaaaatgatgtgatcacctgctttgccaactttgaaagtgatgaggtggagctgtcctatgccaagaatggccaggacctgggcgtggccttcaagatcagcaaggaggtgctggccggccggcccctcttcccccacgtgctgtgccacaactgtgctgtggagttcaactttggccagaaggagaagccctacttccccatccctgaggagtacaccttcatccagaatgtgcccctggaggacagagtgcggggccccaagggccctgaggagaagaaggactgtgaggtggtgatgatgattggcctgcctggagctgggaagaccacctgggtgaccaagcatgctgctgaaaatcctgggaagtacaacatcctgggcaccaacaccatcatggacaagatgatggtggccggcttcaagaagcagatggctgacaccgggaagctgaacaccctgctgcagagggccccccagtgcctgggcaagttcatcgagattgctgccaggaagaagaggaacttcatcctggaccagaccaacgtgtctgctgctgcccagaggaggaagatgtgcctgtttgctggcttccagaggaaggctgtggtggtgtgccccaaggatgaggactacaagcagaggacccagaagaaggccgaggtggagggcaaggacctgcctgagcacgctgtgctgaagatgaagggcaacttcaccctgcctgaggtggccgagtgctttgatgagatcacctacgtggagctgcagaaggaggaggcccagaagctgctggagcagtacaaggaggagagcaagaaggccctgcccccagagaagaagcagaacacaggcagcaagaagagcaacaagaacaagagcggcaagaaccagttcaacagaggaggcggccaccggggccggggcggcttcaacatgagaggaggcaacttccggggcggggcccctggcaacagaggaggctacaacagaagaggcaacatgccccagagaggaggcggcggcggcggcagcggcggcatcggctacccctacccccgggcccctgtgtttcctggccggggcagctacagcaacagaggcaactacaacagaggaggcatgcccaacagaggcaactacaaccagaacttccggggccggggcaacaacagaggctacaagaaccagagccagggctacaaccagtggcagcagggccagttctggggccagaagccctggagccagcactaccaccagggctactactag

SEQ ID NO: 146897 - DNA, 729 bp, Artificial Sequence
  derived and/or modified sequence
atgggcctggtgtgcgtgctgggcgacggcaagaccgagcagaagggaggggacaaaaaaagaggggtgaaacggcccagggaagatcacggacgcggttactttgagtacatagaggagaataagtatagtagggcaaaatcacctcagccaccagtggaggaagaggacgagcatttcgatgataccgttgtgtgtctggacacctataactgcgacctgcattttaaaatatcgagggaccgactgagcgcctcttcacttaccatggaatccttcgcattcctgtgggccggtggccgggccagttatggcgtgagcaaaggaaaggtgtgcttcgaaatgaaggtcactgaaaagattcctgtcagacatctgtatacaaaggacatagatatacatgaggtgagaatcggctggtcactgacgacatccggtatgctgctgggagaagaggagttctcatacggctactccctaaagggcattaagacgtgcaactgcgaaacggaagactatggagaaaagtttgatgaaaatgatgtgattacttgttttgccaatttcgaatcagatgaggtcgagctgagttatgctaagaacggtcaagatctcggagtggcctttaagatctcgaaggaggtgctggccggtcgacccttgttcccacacgtcctttgccataactgcgctgtggagttcaattttgggcagaaggagaaaccctag

SEQ ID NO: 146898 - DNA, 2421 bp, Artificial Sequence
  derived and/or modified sequence
atgagcagcagccccgtgaacgtgaagaagctgaaggtgagcgagctgaaagaggaattgaagaaaagacggcttagcgacaagggactgaaggccgagctcatggagcgtctgcaggcagcactcgatgacgaggaggccgggggacgacccgctatggaacccgggaatggctcattggatcttgggggagactcggccgggagatcgggtgctggactcgagcaagaggccgctgctgggggcgatgaggaggaggaggaagaggaagaggaggaagaaggcatctccgccctggacggcgatcagatggagttaggcgaggagaacggcgccgcaggagccgctgactcaggccccatggaggaagaggaggcagcatctgaggacgaaaacggagatgatcagggattccaggagggcgaagacgagttgggcgatgaagaagagggtgccggagacgaaaacggccacggagaacagcagcctcaaccacccgcaacccagcaacagcagccccagcaacaaagaggagcagcgaaggaagcagctggtaagagttccggtccaacttcgctctttgcagtgaccgttgccccccctggggctcgccaaggccaacagcaagctggcggtgatggaaagacagaacagaagggcggtgataagaagagaggagtgaaaagaccacgggaggatcatggacgaggatactttgaatacatcgaagaaaacaaatattcacgcgctaagtccccccagccgcctgtcgaagaggaagatgaacatttcgatgacactgtcgtatgcctggacacctataattgcgatctccactttaagatatcacgtgatcggctgagcgccagctcattgacgatggaaagtttcgcttttctctgggccgggggcagggccagttacggagtctctaaaggtaaagtgtgctttgaaatgaaggtcaccgagaaaattcccgtgagacatttgtacacaaaagacatcgacattcatgaggtgaggattggttggtccctcacaaccagcggcatgctgctgggcgaagaggagttcagctatggctactccctgaagggcattaagacctgcaactgcgaaaccgaagattacggcgagaagttcgatgagaacgacgtgatcacatgctttgccaattttgagtctgatgaggttgaactatcctacgcgaaaaatgggcaggacctaggtgtcgcctttaaaataagcaaggaagtcctggctggtcgacccctgttccctcatgtgctgtgtcacaactgtgccgttgagtttaactttggccagaaggaaaaaccatacttccccatccctgaagaatatactttcatccaaaatgtcccactagaagaccgcgtcagaggacctaaagggccggaggagaaaaaggactgcgaagtcgtgatgatgattggactgccaggagctggaaagacgacctgggtcacaaaacacgccgccgaaaaccccggcaaatacaatattctgggcaccaacacgatcatggacaagatgatggttgccggctttaaaaagcagatggctgacaccgggaagctcaatacactgctgcaaagggcgcctcagtgcctgggcaagtttattgagatcgcagctagaaagaagcggaacttcatcctggaccagaccaacgtgtcggccgcggctcagaggcgcaagatgtgtttgtttgctggctttcaacgaaaggctgtcgtggtgtgccccaaagacgaggattacaaacagcgcacccagaagaaggcagaagtcgaaggtaaagatctgcctgagcacgctgtgctgaagatgaaaggtaacttcacactgcccgaggtcgctgagtgcttcgatgaaattacttacgtggagctccaaaaggaggaagcccagaagctgttagagcagtataaagaagaatctaagaaagccctgcctcctgagaagaagcaaaataccggttcaaagaagagcaacaagaataaatctggcaagaaccagttcaaccgaggcgggggccatagagggagaggcgggtttaacatgcgcggcggtaacttccgagggggagcaccaggcaacagaggcggctataatcgcagagggaacatgccacagaggggtgggggcggtggggggagtggagggatagggtatccctaccctcgggctccggtctttcccggacgcggctcatatagtaaccgagggaactataatcgtgggggaatgcctaatcgcggaaattataaccagaacttcaggggaagagggaacaaccggggttataagaaccaatcacagggctataatcagtggcagcagggccagttctggggtcagaagccttggagccaacactaccatcagggatattactag

SEQ ID NO: 146899 - DNA, 729 bp, Artificial Sequence
  derived and/or modified sequence
atgggactcgtgtgtgtgctcggtgacggtaaaaccgagcagaagggtggggacaaaaagcgcggagttaagaggccaagggaggaccatggcagaggatatttcgaatacattgaagagaataagtatagccgcgctaagagtccacagccacctgtcgaggaggaggatgagcatttcgacgacacagttgtctgcttggatacttataattgcgatctccacttcaaaattagtagggaccgcctatccgcctcgtctctcacaatggagtcattcgccttcctctgggctggagggagagctagctacggcgtttcaaagggcaaggtgtgttttgagatgaaagtcaccgaaaagattcccgtaaggcacctgtatacgaaggatatcgacatccacgaggttcgcatcgggtggtccctcaccactagcgggatgcttctaggtgaggaggaattctcttacggatactcactgaagggtataaaaacatgcaactgcgagaccgaggattatggggagaagttcgacgaaaatgacgtgatcacatgttttgcgaacttcgagtcggacgaagtggaattgagctatgccaagaatggccaggacttgggagtggcatttaaaatcagcaaggaggtgctggccggtcggcctctcttccctcatgtgctgtgtcacaattgcgccgtcgagtttaacttcggacaaaaggagaagccctag

SEQ ID NO: 146900 - DNA, 2421 bp, Artificial Sequence
  derived and/or modified sequence
atgagcagcagccctgtgaacgtgaagaagttgaaagtttccgagctcaaggaggagctaaagaagcggaggctgtctgataaaggtctgaaggccgagctgatggaacggctccaggccgctctcgatgacgaggaagcgggtgggcgtcccgcaatggagcccggaaacggatcacttgaccttgggggagactccgcaggaagatccggggcaggcctcgaacaagaggccgctgctggcggagacgaagaagaggaggaggaagaagaggaggaggagggcataagcgctttggatggggaccagatggagctcggggaggagaacggggctgccggagccgctgacagcggtcccatggaggaagaagaggccgcttctgaggacgaaaatggggatgaccaaggtttccaggaaggagaagacgagttgggcgatgaggaggagggggctggagacgagaatggacacggcgaacagcagccgcagcctcccgctactcagcagcagcaaccacagcaacagaggggagccgctaaagaagcagcaggaaaatctagtggtcctacatctttatttgctgtcacggtagcacctccgggagctaggcaggggcagcagcaggccggtggtgatggtaaaacagaacagaagggaggagataagaaaagaggagtgaaacggcctcgggaggatcatggaagagggtatttcgagtatattgaagaaaacaagtacagcagagctaaatctccccagcctccagttgaggaggaggacgagcacttcgatgatactgtcgtctgtcttgacacctataattgcgatctccatttcaaaatttctagagacagactgtcggcgagttccctcacaatggaaagctttgctttcttatgggccggtggccgagctagttatggcgttagtaaagggaaggtgtgctttgagatgaaggtcaccgagaaaattcccgttaggcacctgtatacaaaggatatagacattcatgaagttcggataggttggagcttgaccacaagcgggatgcttctcggtgaggaggagttcagttacggatattcgcttaaaggcatcaagacgtgtaactgcgagacagaagactacggcgaaaaatttgatgagaacgatgttatcacatgttttgctaactttgaatcagatgaagtagaactctcgtacgccaagaacggccaagaccttggtgtcgcctttaagatctctaaagaagtgcttgctggaaggcctctgtttccccatgtcctgtgtcataactgcgccgtcgaattcaattttggacagaaagaaaaaccatactttcctataccggaggaatacacctttattcagaacgtccccctcgaagatagggtgagaggcccaaaaggtccagaagaaaagaaggattgtgaagtagtgatgatgatcgggctgcctggcgcaggaaagacaacctgggtgacaaagcacgccgcagaaaatcccggaaagtacaacattctcggaaccaatactataatggacaaaatgatggtcgctggatttaaaaagcaaatggcagacaccggcaagctgaatacactgctgcagcgggcaccccaatgtctgggcaagttcatcgagatcgctgccaggaaaaagcgaaatttcatactggaccaaactaatgtgagtgccgctgcacaacgaagaaaaatgtgtctgttcgccggatttcagcgcaaggcagtcgtggtgtgcccaaaggacgaagactacaagcagcggacccagaagaaggccgaagtggaggggaaagacttgccggagcatgcagtactcaagatgaagggcaattttacactcccagaagtcgcggaatgcttcgacgagattacctacgtggagctccagaaggaggaagctcagaaattgctggagcagtacaaagaggagtccaaaaaggcactaccgccagaaaaaaaacagaacacaggatccaagaaatccaataaaaacaagagtggcaagaaccagtttaacagagggggtggccatcggggtcgaggcggattcaacatgaggggcggaaattttaggggcggagcgccaggaaacagggggggttacaatcgcagaggtaacatgcctcagagaggcggtggtggcggagggtccggaggcataggatatccataccctcgggcacctgtcttccctgggcgaggctcctattctaacagaggtaattacaatagaggcggaatgcctaatcgaggcaattacaatcaaaactttcgcggacggggaaacaacaggggctacaagaatcaatctcaggggtataaccagtggcaacagggccaattttgggggcaaaaaccctggtcccagcattaccatcagggatattattag

SEQ ID NO: 146901 - DNA, 1067 bp, Artificial Sequence
  derived and/or modified sequence
agtacaatgcggccgcggggagcgcgggcccgcgggggaggggagcgccgccgcgccgggctcggcccctccccctctctgcgctctcttcgggatacacgtgggcttcgggcctgggccgcgcagtttttctttggctttctcgaatcatcgaggagactggcaaaattagtaatgtctttagactgcgtcactagcgccaatcgaattcgtagttgattgttctttgaattcacatttgagtcctcggttaaaacctcagttaaaaagcaggataaagtcgagctgctttggttctcggaacggaaaagcgtttttttgttgtttagaggcttggcctttatggggctcgtgtgtgttttaggggacggcaaaacagaacagaaaggcggagataaaaagaggggtgttaaaagaccacgagaagatcatggccgtggatattttgagtacattgaagagaacaagtatagcagagccaaatctcctcagccacctgttgaagaagaagatgaacacttcgatgacacagtggtttgtcttgatacttataattgtgatctacattttaaaatatcaagagatcgtctcagtgcttcttcccttacaatggagagttttgcttttctttgggctggaggaagagcatcctatggtgtgtcaaaaggcaaagtgtgttttgagatgaaggttacagagaagatcccagtaaggcatttatatacaaaagatattgacatacatgaagttcgtattggctggtcactaactacaagtggaatgttacttggtgaagaagaattttcttatgggtattctctaaaaggaataaaaacatgcaactgtgagactgaagattatggagaaaagtttgatgaaaatgatgtgattacatgttttgctaactttgaaagtgatgaagtagaactctcgtatgctaagaatggacaagatcttggcgttgccttcaaaatcagtaaggaagttcttgctggacggccactgttcccgcatgttctctgccacaactgtgcagttgaatttaattttggtcagaaggaaaagcc

SEQ ID NO: 146902 - DNA, 5940 bp, Artificial Sequence
  derived and/or modified sequence
aggacgttgcgtgctcgctcgcgccaggcgagtctccgcgtctccctcgcgaactcggtgaaaggaattggcgccgttcgacaccaggcggatccgctctgcagcacgaacccatctccagccgcagccgcagccgccgcccgggccgaggagcagccgcagcagccgccaccagtggccgagtgagcggagccgagtttgaggcagcgcctagcggtgaatcggggccctcaccatgagttcctcgcctgttaatgtaaaaaagctgaaggtgtcggagctgaaagaggagctcaagaagcgacgcctttctgacaagggtctcaaggccgagctcatggagcgactccaggctgcgctggacgacgaggaggccgggggccgccccgccatggagcccgggaacggcagcctagacctgggcggggattccgctgggcgctcgggagcaggcctcgagcaggaggccgcggccggcggcgatgaagaggaggaggaagaggaagaggaggaggaaggaatctccgctctggacggcgaccagatggagctaggagaggagaacggggccgcgggggcggccgactcgggcccgatggaggaggaggaggccgcctcggaagacgagaacggcgacgatcagggtttccaggaaggggaagatgagctcggggacgaagaggaaggcgcgggcgacgagaacgggcacggggagcagcagcctcaaccgccggcgacgcagcagcaacagccccaacagcagcgcggggccgccaaggaggccgcggggaagagcagcggccccacctcgctgttcgcggtgacggtggcgccgcccggggcgaggcagggccagcagcaggcgggaggggacggcaaaacagaacagaaaggcggagataaaaagaggggtgttaaaagaccacgagaagatcatggccgtggatattttgagtacattgaagagaacaagtatagcagagccaaatctcctcagccacctgttgaagaagaagatgaacacttcgatgacacagtggtttgtcttgatacttataattgtgatctacattttaaaatatcaagagatcgtctcagtgcttcttcccttacaatggagagttttgcttttctttgggctggaggaagagcatcctatggtgtgtcaaaaggcaaagtgtgttttgagatgaaggttacagagaagatcccagtaaggcatttatatacaaaagatattgacatacatgaagttcgtattggctggtcactaactacaagtggaatgttacttggtgaagaagaattttcttatgggtattctctaaaaggaataaaaacatgcaactgtgagactgaagattatggagaaaagtttgatgaaaatgatgtgattacatgttttgctaactttgaaagtgatgaagtagaactctcgtatgctaagaatggacaagatcttggcgttgccttcaaaatcagtaaggaagttcttgctggacggccactgttcccgcatgttctctgccacaactgtgcagttgaatttaattttggtcagaaggaaaagccatattttccaatacctgaagagtatactttcatccagaacgtccccttagaggatcgagttagaggaccaaaggggcctgaagagaagaaagattgtgaagttgtgatgatgattggcttgccaggagctggaaaaactacctgggttactaaacatgcagcagaaaatccagggaaatataacattcttggcacaaatactattatggataagatgatggtggcaggttttaagaagcaaatggcagatactggaaaactgaacacactgttgcagagagccccccagtgtcttgggaaatttattgagattgctgcccgaaagaagcgaaattttattctggatcagacaaatgtgtctgctgctgcccagaggagaaaaatgtgcctgtttgcaggcttccagcgaaaagctgttgtagtttgcccaaaagatgaagactataagcaaagaacacagaagaaagcagaagtagaggggaaagacctaccagaacatgcggtcctcaaaatgaaaggaaactttaccctcccagaggtagctgagtgctttgatgaaataacctatgttgaacttcagaaggaagaagcccaaaaactcttggagcaatataaggaagaaagcaaaaaggctcttccaccagaaaagaaacagaacactggctcaaagaaaagcaataaaaataagagtggcaagaaccagtttaacagaggtggtggccatagaggacgtggaggattcaatatgcgtggtggaaatttcagaggaggagcccctgggaatcgtggcggatataataggaggggcaacatgccacagagaggtggtggcggtggaggaagtggtggaatcggctatccataccctcgtgcccctgtttttcctggccgtggtagttactcaaacagagggaactacaacagaggtggaatgcccaacagagggaactacaaccagaacttcagaggacgaggaaacaatcgtggctacaaaaatcaatctcagggctacaaccagtggcagcagggtcaattctggggtcagaagccatggagtcagcattatcaccaaggatattattgaatacccaaataaaacgaactgatacatatttctccaaaaccttcacaagaagtcgactgttttctttagtaggctaactttttaaacattccacaagaggaagtgcctgcgggttccttttttagaagctttgtgggttgattttttttcttttcttttttgtacatttttaattgcagtttaaaagtgaatcgtaagagaacctcagcattgtgcacgataagagaatgtgtcagtatttcagggttctacattttatctgtaaaatgtgacttttttttttttttatcacaacagaagtaaaatgttgctttgtacctggtgtcttttattaagaatttactccccccatttctcacagagaataacagtcgggagtcattgtcacaatataatagaaatgttagcaaccagattcatgtaaggactaagtggtcctcatgaattgcattaagactctgtactgctcatattacactccatcctctctgtagtttgctgggtagtggagggggtaagctaaatcatagtttctgacaataactgggaaggttttttcttaaaataacaatggaattggtataattgggattgaaaactaaaacttggaactaagatagagaagatggagtgtatgtagaagggctgttaaaaatgtaaaacttggttgcattatttgtggaggctcaaacttgtgaaggttaataccataatttttccatttgttctgcattttgattctgaaaagaaagctggctttgcccatttcttattaaaaaaacttgttgtaaatccagttgtctaatgggatctatatgaagttagccatgtctgtatgcccttctcccacaaaatactgtataactagtgtgcttgtagtagttaactccaccatctttgtaagctaatgaaattgtgagtcacccatttatatcttaatttttaatcatgtcagttcttgaatgggtatctccttagcctgctgatttctttttctttctaaagaaagtgggtggagaaattaatttagacgtttgtttgcaataaaaagaattcattttactcttgttttgggattctcgccatcaaggttcaaaatccctttatataactcccaagaggagaaatttattaagtgtgtgctttctggacagcttattctttactctgcatagaacatttaggttttaaaaacttaaatgtatactgacaattgatacataattatgaagtaaagttgaattcttcccttcccctcccccccagacaacttttaacatatttaatgaggggaaaaggtactggctgggagaagttaacactgagtttatcatctttacagaatgctaatgctgtcctcaactgattattttatatacatatatatgatacatgaaactctgggatcagatgcttttagaagccatcatgcaagccagtcattgatgtcactgctacacaacactgctaacttgactgtagctatgtaataacattagatcccctaattgtaattatattgggtttgcacagaacactttaatcttcccctcaccaatgtgaagtgaggaatcaggagtcaaactgtagaactaaaatttgacttcagtctagcgtttccttggtgtttttaggttgctttggtaagtttaggtttgctatatttctgattgcttagaattttgttttagccctttaaaatcagatcataaatatgaattcatacttctaaggaattttcttgctataagctggagtttaggtgatgtataggttcagttgagacatttttggaacaggcaaatccttagttaacataagatatttaacagttgaagatagtgtcatggatttttatcttttttagcaagtaatgctaagaaccactggcctgagctactactcttcagtatacattattaggattgcatagacttactagaggaacagtttcaggttttgatgctaatcagtgttgtgtcctaaagttgtcctttgtgcctttaaaaagttttggatatatcttctagtttaaaattgcttattaaggaattcattttataattgcagtgggaaagtaatggtcaagtaacactaggtagactatcatgcctgtttagcccagagaatttggggggagagagaatagataaaaatggcacccagaaaaatgttaaaatctttagtcaagactagaattaatacaattgtctacacttgtatggcagaaataaccttataaagtgtttaaggaattcagagaagggaatgtaccaaataagcaacagggagaaaattaggtaagaagtaagatacgaacgagaaacctgatttattgctcatccttcccttgcctccctaatggcaagcaaaactctgaacatctgaaaaggatgtagttctggacaaatcctgactacccagaggaaactcactgtgagattgctgttgatttgaagggtgctttcactaaggttatattttaaagtagaataacacatgctgagtgtaaactggctttggattggtcagctgcagtagtacaaaaacagcatagaatttgagaaaactaaaactgctatgagatagctatgagaaaactaaaactgctatgagatagaaatgatgtaaaattatgtggaaagttttccctcatatactcacatacagcctttgaagggctctggctctgaccggttgatggccttgagcgagatgaaatcatgaaattgagtcaaatcaatttgacattgaaatgacaagaggaaactcttaaatacataaaaacaagctctcatttgcctaggatagatactgtcttaaaaataaagactgaacctagatgttctgagcactagcaacaaggtattttaacaagtttaaaggaattctctgaaaaagttataaaattattctaggaaacataaccataatagtgttttaagggactttcacctggggattttatattcatgaacagagtgtattctgtatttaaaatgtctcatttgtgggaattggatgacatgttttttgataaatttattcacaatataaattgactttttattctaggaccatgtgaataatgggttccattgcacaaatacaaatattttaatagcttcttaggcagtggtgtagacatcttggatataaataattgtagatcttgtatatttgatttttaaaaaactagaataaacagagaggcataaacatatcttagagtccaagtggtagtgtttagcattggatataataaatggatgttttacaaagtg

SEQ ID NO: 146903 - protein, 217 aa, Artificial Sequence
  derived and/or modified sequence
MSSLYYANTLFSKYPASSSVFATGAFPEQTSCAFASNPQRPGYGAGSGASFAASMQGLYPGGGGMAGQSAAGVYAAGYGLEPSSFNMHCAPFEQNLSGVCPGDSAKAAGAKEQRDSDLAAESNFRIYPWMRSSGTDRKRGRQTYTRYQTLELEKEFHYNRYLTRRRRIEIAHTLCLTERQIKIWFQNRRMKWKKENKTAGPGTTGQDRAEAEEEEEE

SEQ ID NO: 146904 - protein, 28 aa, Artificial Sequence
  derived and/or modified sequence
MKWKKENKTAGPGTTGQDRAEAEEEEEE

SEQ ID NO: 146905 - DNA, 654 bp, Artificial Sequence
  derived and/or modified sequence
atgtcctctttatactatgccaatacgctattcagcaagtaccccgcgtcttcttcagtttttgcgactggggcctttccagaacagacctcatgtgcattcgcgtccaatcctcagcgtcctgggtatggcgctggtagcggggccagttttgcagcaagcatgcaggggttatacccaggcggagggggtatggcgggccagtctgccgccggcgtctacgcagccggctatggccttgaaccatcctccttcaacatgcactgcgcaccttttgaacagaatctgtctggggtatgccctggggattccgctaaggcggccggagcaaaggagcagcgcgacagcgatctggctgccgaatccaatttcaggatctacccgtggatgaggtcatcaggaactgacagaaagcgcgggcgccagacctacacaagataccagaccctagagctggagaaagaattccactacaatcgatacttaacacgcagaagaaggattgagatcgctcacacactatgcctcacagagaggcaaatcaaaatttggttccagaaccgaaggatgaagtggaagaaagagaataagacagcggggcccgggacaacgggtcaggatagggctgaggccgaggaggaggaggaggaatag

SEQ ID NO: 146906 - DNA, 87 bp, Artificial Sequence
  derived and/or modified sequence
atgaagtggaaaaaggagaacaaaacagccggcccggggaccaccggccaagatagggcagaggctgaggaagaggaagaggagtag

SEQ ID NO: 146907 - DNA, 1367 bp, Artificial Sequence
  derived and/or modified sequence
ctttttggtgtaaatctggactctaattctgtaatatatcaaggaatctcgtaaaaccgacactaaaacgtccctgcctacaaatcatccggccaaattatgagttcattgtattatgcgaatactttattttctaaatatccagcctcaagttcggttttcgctaccggagccttcccagaacaaacttcttgtgcgtttgcttccaacccccagcgcccgggctatggagcgggttcgggcgcttccttcgccgcctcgatgcagggcttgtaccccggcggggggggcatggcgggccagagcgcggccggcgtctacgcggccggctatgggctcgagccgagttccttcaacatgcactgcgcgccctttgagcagaacctctccggggtgtgtcccggcgactccgccaaggcggcgggcgccaaggagcagagggactcggacttggcggccgagagtaacttccggatctacccctggatgcgaagctcaggaactgaccgcaaacgaggccgccagacctacacccgctaccagaccctggagctggagaaagaatttcactacaatcgctacctgacgcggcggcggcgcatcgagatcgcgcacacgctctgcctcacggaaagacagatcaagatttggtttcagaaccggcgcatgaagtggaaaaaggagaacaagaccgcgggcccggggaccaccggccaagacagggctgaagcagaggaggaagaggaagagtgagggatggagaaagggcagaggaagagacatgagaaagggagaggaagagaagcccagctctgggaactgaatcaggaaactcaaatcgaatagggaagtaaaaaaacaaaacaaaaaacaaaaaaaacaaaaaaaaaaccctatttaaatgaaaggagtttaaaaacattttttaaggagggagaaaggagaaattttggtttttcaacactgaaaaaatactacctataggaaagtctgtcaggtttggtttttttgtacaatatgaaaaggatattatctacctgttctgtagctttctggaatttacctccccttttctatgttgctattgtaaggtctttgtaaaatcttgcagttttgtaagccctctttaatgctgtctttgtggactgtgggtctggactaaccctgtggttgcctgccctcctgagcctccgccttcccagcagcggcaccaaggggccttagggagccccaaaacctaccactcgcgtgttccccaagcgcctggctgctgcttcttgcttcccgtcccccagccccatgctcccttttacattctgtgtgtatctaaaggatggaaaaataaaacgcaattaaaaataaacaga

SEQ ID NO: 146908 - DNA, 475 bp, Artificial Sequence
  derived and/or modified sequence
gcggccgctggctccgcaccttccgacggccgcgcactgccggcaccgccgccgcccaggaactgaccgcaaacgaggccgccagacctacacccgctaccagaccctggagctggagaaagaatttcactacaatcgctacctgacgcggcggcggcgcatcgagatcgcgcacacgctctgcctcacggaaagacagatcaagatttggtttcagaaccggcgcatgaagtggaaaaaggagaacaagaccgcgggcccggggaccaccggccaagacagggctgaagcagaggaggaagaggaagagtgagggatggagaaagggcagaggaagagacatgagaaagggagaggaagagaagcccagctctgggaactgaatcaggaaactcaaatcgaatagggaagtaaaaaaacaaaacaaaaaacaaaaaaaacaaaaaaaaaaccctatttaaatgaaaggagttta

SEQ ID NO: 146909 - DNA, 654 bp, Artificial Sequence
  derived and/or modified sequence
atgagcagcctgtactatgccaacaccctcttcagcaagtacccagccagcagctctgtgtttgccactggagccttccctgagcagaccagctgtgcctttgccagcaacccccagaggcctggctatggagctggcagcggggccagctttgctgcctccatgcagggcctgtacccaggcggcggcggcatggccggccagagcgctgctggggtgtatgctgctggctacggcctggagcccagcagcttcaacatgcactgtgccccctttgagcagaacctgtctggagtgtgccctggggacagcgccaaggccgccggggccaaggagcagagggacagcgacctggccgctgagagcaacttccgcatctacccctggatgaggagcagcggcacagacaggaagaggggccggcagacctacacccgctaccagaccctggagctggagaaggagttccactacaaccgctacctgaccaggagaagacgcatcgagatcgcccacaccctgtgcctgacagagcggcagatcaagatctggttccagaacagaaggatgaagtggaagaaggagaacaagacagctggccctggcaccaccggccaggacagagctgaggccgaggaggaggaggaggagtag

SEQ ID NO: 146910 - DNA, 87 bp, Artificial Sequence
  derived and/or modified sequence
atgaagtggaagaaggagaacaagacagctggccctggcaccaccggccaggacagagctgaggccgaggaggaggaggaggagtag

SEQ ID NO: 146911 - DNA, 654 bp, Artificial Sequence
  derived and/or modified sequence
atgagcagcctgtactacgccaacaccctgttcagcaagtaccccgccagctcatccgtatttgccaccggcgccttcccagagcagacatcttgcgctttcgcgagtaatccacaacgcccagggtatggtgcaggaagcggagctagtttcgctgccagcatgcagggcttatacccaggggggggtggaatggctggacaatccgctgccggtgtgtacgcggcaggttatggtctggaaccaagtagcttcaacatgcactgcgccccttttgagcagaacctgtcaggggtgtgcccgggcgacagcgcaaaagctgcaggggccaaggaacaacgcgacagcgacctggctgcagagtccaactttcggatctacccttggatgagaagcagcggaactgaccgaaaacgagggagacagacttacacgaggtaccaaacactggagctggaaaaagaattccattacaatcggtatctcacccggcgacgaagaatagagatcgctcacaccctgtgcctgacggaaagacagatcaagatctggttccagaaccgtcgaatgaagtggaaaaaagagaataaaaccgctggccccggcacaacggggcaggaccgcgcagaagcagaagaagaagaagaggaatag

SEQ ID NO: 146912 - DNA, 87 bp, Artificial Sequence
  derived and/or modified sequence
atgaagtggaagaaggagaacaagaccgccggccccggcaccaccggccaggaccgggccgaagctgaggaggaagaggaagagtag

SEQ ID NO: 146913 - DNA, 654 bp, Artificial Sequence
  derived and/or modified sequence
atgagctccctctactacgccaacaccttgttttcaaagtatcccgcaagcagctcggtgtttgctacgggcgctttcccagagcagacctcctgcgcctttgcctccaacccacaacgtccagggtacggggcaggctccggcgctagctttgctgcctccatgcagggactgtaccccggaggcggaggcatggccggtcagtccgcagccggtgtctacgccgctggctacgggctcgagcctagctcttttaacatgcattgtgccccttttgaacagaatcttagcggagtgtgtccaggggacagtgcaaaggcagcaggagccaaggagcagagggactccgacctcgcagctgagtccaatttcaggatatacccttggatgcgtagctctggcaccgatcgcaaaaggggccgtcaaacgtacactaggtatcagaccctcgagctcgaaaaagaattccactataatcggtatcttactagacggagacggattgaaatcgcccataccctttgtctgacagaaagacaaattaagatttggttccagaatcggagaatgaaatggaagaaggaaaacaagacagctgggcctggcaccaccggacaggatcgggctgaagctgaagaagaggaagaagaatag

SEQ ID NO: 146914 - DNA, 87 bp, Artificial Sequence
  derived and/or modified sequence
atgaagtggaagaaggaaaacaaaacagccggaccaggcactaccggccaagacagggccgaagccgaggaagaagaggaagagtag

SEQ ID NO: 146915 - DNA, 654 bp, Artificial Sequence
  derived and/or modified sequence
atgagcagcctgtactacgccaacaccctgttcagcaagtaccccgccagcagcagcgtgttcgccaccggcgccttccccgagcagaccagctgcgccttcgccagcaacccccagagacccggctacggcgccggcagcggcgccagcttcgccgccagcatgcagggcctgtaccccggcggcggcggcatggccggccagagcgccgccggcgtgtacgccgccggctacggcctggagcccagcagcttcaacatgcactgcgcccccttcgagcagaacctgagcggcgtgtgccccggcgacagcgccaaggccgccggcgccaaggagcagagagacagcgacctggccgccgagagcaacttcagaatctacccctggatgagaagcagcggcaccgacagaaagagaggcagacagacctacaccagataccagaccctggagctggagaaggagttccactacaacagatacctgaccagaagaagaagaatcgagatcgcccacaccctgtgcctgaccgagagacagatcaagatctggttccagaacagaagaatgaagtggaagaaggagaacaagaccgccggccccggcaccaccggccaggacagagccgaggccgaggaggaggaggaggagtag

SEQ ID NO: 146916 - DNA, 87 bp, Artificial Sequence
  derived and/or modified sequence
atgaagtggaagaaggagaacaagaccgccggccccggcaccaccggccaggacagagccgaggccgaggaggaggaggaggagtag

SEQ ID NO: 146917 - protein, 235 aa, Artificial Sequence
  derived and/or modified sequence
MNSYFTNPSLSCHLAGGQDVLPNVALNSTAYDPVRHFSTYGAAVAQNRIYSTPFYSPQENVVFSSSRGPYDYGSNSFYQEKDMLSNCRQNTLGHNTQTSIAQDFSSEQGRTAPQDQKASIQIYPWMQRMNSHSGVGYGADRRRGRQIYSRYQTLELEKEFHFNRYLTRRRRIEIANALCLTERQIKIWFQNRRMKWKKESNLTSTLSGGGGGATADSLGGKEEKREETEEEKQKE

SEQ ID NO: 146918 - protein, 153 aa, Artificial Sequence
  derived and/or modified sequence
MLSNCRQNTLGHNTQTSIAQDFSSEQGRTAPQDQKASIQIYPWMQRMNSHSGVGYGADRRRGRQIYSRYQTLELEKEFHFNRYLTRRRRIEIANALCLTERQIKIWFQNRRMKWKKESNLTSTLSGGGGGATADSLGGKEEKREETEEEKQKE

SEQ ID NO: 146919 - DNA, 1681 bp, Artificial Sequence
  derived and/or modified sequence
ttttgtctgtcctggattggagccgtccctataaccatctagttccgagtacaaactggagacagaaataaatattaaagaaatcatagaccgaccaggtaaaggcaaagggatgaattcctacttcactaacccttccttatcctgccacctcgccgggggccaggacgtcctccccaacgtcgccctcaattccaccgcctatgatccagtgaggcatttctcgacctatggagcggccgttgcccagaaccggatctactcgactcccttttattcgccacaggagaatgtcgtgttcagttccagccgggggccgtatgactatggatctaattccttttaccaggagaaagacatgctctcaaactgcagacaaaacaccttaggacataacacacagacctcaatcgctcaggattttagttctgagcagggcaggactgcgccccaggaccagaaagccagtatccagatttacccctggatgcagcgaatgaattcgcacagtggggtcggctacggagcggaccggaggcgcggccgccagatctactcgcggtaccagaccctggaactggagaaggaatttcacttcaatcgctacctaacgcggcgccggcgcatcgagatcgccaacgcgctttgcctgaccgagcgacagatcaaaatctggttccagaaccgccggatgaagtggaaaaaagaatctaatctcacatccactctctcggggggcggcggaggggccaccgccgacagcctgggcggaaaagaggaaaagcgggaagagacagaagaggagaagcagaaagagtgaccaggactgtccctgccacccctctctccctttctccctcgctccccaccaactctcccctaatcacacactctgtatttatcactggcacaattgatgtgttttgattccctaaaacaaaattagggagtcaaacgtggacctgaaagtcagctctggaccccctccctcaccgcacaactctctttcaccacgcgcctcctcctcctcgctcccttgctagctcgttctcggcttgtctacaggcccttttccccgtccaggccttgggggctcggaccctgaactcagactctacagattgccctccaagtgaggacttggctcccccactccttcgacgcccccacccccgccccccgtgcagagagccggctcctgggcctgctggggcctctgctccagggcctcagggcccggcctggcagccggggagggccggaggcccaaggagggcgcgccttggccccacaccaacccccagggcctccccgcagtccctgcctagcccctctgccccagcaaatgcccagcccaggcaaattgtatttaaagaatcctgggggtcattatggcattttacaaactgtgaccgtttctgtgtgaagatttttagctgtatttgtggtctctgtatttatatttatgtttagcaccgtcagtgttcctatccaatttcaaaaaaggaaaaaaaagagggaaaattacaaaaagagagaaaaaaagtgaatgacgtttgtttagccagtaggagaaaataaataaataaataaatcccttcgtgttaccctcctgtataaatccaacctctgggtccgttctcgaatatttaataaaactgatattatttttaaaacttta

SEQ ID NO: 146920 - DNA, 708 bp, Artificial Sequence
  derived and/or modified sequence
atgaacagctatttcaccaatccctcactttcttgccatctggcagggggacaagatgtgctgcctaatgtcgcccttaattctactgcctacgatcccgtaaggcatttcagcacctatggggccgcggtggcacagaatcgaatctactccacacctttttactctccacaggagaacgttgtgttcagtagctctagaggaccttacgattatggaagcaactctttttaccaggaaaaagacatgctgtcgaattgtagacagaataccctcggccacaatacacaaacttctattgcacaagattttagtagcgaacaagggaggaccgccccacaagatcagaaggcttccattcagatatatccttggatgcagagaatgaactcgcacagcggggtgggctacggtgccgatcggcggcggggtaggcagatttactctagataccagacgctcgaacttgagaaggagttccactttaatcgttatctgactcggagacgccggatagaaatagctaacgcactgtgtctgactgaacggcagattaaaatttggttccaaaatcgtagaatgaagtggaagaaagagtcaaatctaacgtctacgctgagcggagggggtggtggggccactgctgacagtttagggggcaaagaagaaaagcgggaggagactgaagaagagaagcagaaagagtag

SEQ ID NO: 146921 - DNA, 1733 bp, Artificial Sequence
  derived and/or modified sequence
ttcctgacatctggcttgcgattggctgggagggggtcagctgactttgtcattttgtctgtcctggattggagccgtccctataaccatctagttccgagtacaaactggagacagaaataaatattaaagaaatcatagaccgaccaggtaaaggcaaagggatgaattcctacttcactaacccttccttatcctgccacctcgccgggggccaggacgtcctccccaacgtcgccctcaattccaccgcctatgatccagtgaggcatttctcgacctatggagcggccgttgcccagaaccggatctactcgactcccttttattcgccacaggagaatgtcgtgttcagttccagccgggggccgtatgactatggatctaattccttttaccaggagaaagacatgctctcaaactgcagacaaaacaccttaggacataacacacagacctcaatcgctcaggattttagttctgagcagggcaggactgcgccccaggaccagaaagccagtatccagatttacccctggatgcagcgaatgaattcgcacagtggggtcggctacggagcggaccggaggcgcggccgccagatctactcgcggtaccagaccctggaactggagaaggaatttcacttcaatcgctacctaacgcggcgccggcgcatcgagatcgccaacgcgctttgcctgaccgagcgacagatcaaaatctggttccagaaccgccggatgaagtggaaaaaagaatctaatctcacatccactctctcggggggcggcggaggggccaccgccgacagcctgggcggaaaagaggaaaagcgggaagagacagaagaggagaagcagaaagagtgaccaggactgtccctgccacccctctctccctttctccctcgctccccaccaactctcccctaatcacacactctgtatttatcactggcacaattgatgtgttttgattccctaaaacaaaattagggagtcaaacgtggacctgaaagtcagctctggaccccctccctcaccgcacaactctctttcaccacgcgcctcctcctcctcgctcccttgctagctcgttctcggcttgtctacaggcccttttccccgtccaggccttgggggctcggaccctgaactcagactctacagattgccctccaagtgaggacttggctcccccactccttcgacgcccccacccccgccccccgtgcagagagccggctcctgggcctgctggggcctctgctccagggcctcagggcccggcctggcagccggggagggccggaggcccaaggagggcgcgccttggccccacaccaacccccagggcctccccgcagtccctgcctagcccctctgccccagcaaatgcccagcccaggcaaattgtatttaaagaatcctgggggtcattatggcattttacaaactgtgaccgtttctgtgtgaagatttttagctgtatttgtggtctctgtatttatatttatgtttagcaccgtcagtgttcctatccaatttcaaaaaaggaaaaaaaagagggaaaattacaaaaagagagaaaaaaagtgaatgacgtttgtttagccagtaggagaaaataaataaataaataaatcccttcgtgttaccctcctgtataaatccaacctctgggtccgttctcgaatatttaataaaactgatattatttttaaaacttta

SEQ ID NO: 146922 - DNA, 2943 bp, Artificial Sequence
  derived and/or modified sequence
acattgaatcaggaaatttttctgagaaaggcaggtgggtatgggcaatctgacacgatccaaaaggcttactgccttgcacccctccccgcaaaaaggaagtagagaccaagatcttgggctttaattttatttttaattgtaaaaagatttcaaataagccaccatttgaactgggaagggaaactagggatggtcttgggggaaaatgtcattctctctaagaaagggaccccggggatgtgggtcgttttgagggtcctagaagttgaccccaattctcacctctcctgctgcactgcaggattgcccagggtaggtctagtcccctaggttcttcagaccactccaggtcaggtttggttgggtggctgccagtggtcttccactactgttcctgtctagggtggagtaggagctttcaggggtacggcatagaggggatgttgttctcttactaaaaaaaaaaaaaaaaaaaaaaggtaggggtagggaggcaccctttcaatccctgcaattcaccagccatcactgcctcaaggccacaaatctttgcaaagctttgaattccgcctgatccaaccttaatgcccccatttattaaggacaatatttaaaactcggcaagccaggagaggcaaccgaccctcagtgcttgaagctttctttcgcctgggcgtccgccctcagctctttctgcgctcgcctgcagcagcctggcccgtggggagtgggcggtgggtgggggtaggggtggggtgggggtccggggatgctccctctatgagagaattgggtaaacatggcgaccgcggcgcccatttgcacacgctacacaaatgcatcgcattcccggttgtttgcagaaaatttacagctgagtaataaaagtttacgatcgactcacaagttggattggccacaagaagtcatgtggattccatccatgaacgtgaactttttattgtggtttgtccgttccgagcgctccgcagaacagtcctccctgtaagagcctaaccattgccagggaaacctgccctgggcgctcccttcattagcagtattttttttaaattaatctgattaataattatttttcccccatttaattttttttcctcccaggtggagttgccgaagctgggggcagctggggagggtggggatgggaggggagagacagaagttgagggcatctctctcttccttcccgaccctctggcccccaaggggcaggaggaatgcaggagcaggagttgagcttgggagctgcagatgcctccgcccctcctctctcccaggctcttcctcctgcccccttcttgcaactctccttaattttgtttggcttttggatgattataattatttttatttttgaatttatataaagtatatgtgtgtgtgtgtggagctgagacaggctcggcagcggcacagaatgagggaagacgagaaagagagtgggagagagagaggcagagagggagagagggagagtgacagcagcgctcggacgtcctccccaacgtcgccctcaattccaccgcctatgatccagtgaggcatttctcgacctatggagcggccgttgcccagaaccggatctactcgactcccttttattcgccacaggagaatgtcgtgttcagttccagccgggggccgtatgactatggatctaattccttttaccaggagaaagacatgctctcaaactgcagacaaaacaccttaggacataacacacagacctcaatcgctcaggattttagttctgagcagggcaggactgcgccccaggaccagaaagccagtatccagatttacccctggatgcagcgaatgaattcgcacagtggggtcggctacggagcggaccggaggcgcggccgccagatctactcgcggtaccagaccctggaactggagaaggaatttcacttcaatcgctacctaacgcggcgccggcgcatcgagatcgccaacgcgctttgcctgaccgagcgacagatcaaaatctggttccagaaccgccggatgaagtggaaaaaagaatctaatctcacatccactctctcggggggcggcggaggggccaccgccgacagcctgggcggaaaagaggaaaagcgggaagagacagaagaggagaagcagaaagagtgaccaggactgtccctgccacccctctctccctttctccctcgctccccaccaactctcccctaatcacacactctgtatttatcactggcacaattgatgtgttttgattccctaaaacaaaattagggagtcaaacgtggacctgaaagtcagctctggaccccctccctcaccgcacaactctctttcaccacgcgcctcctcctcctcgctcccttgctagctcgttctcggcttgtctacaggcccttttccccgtccaggccttgggggctcggaccctgaactcagactctacagattgccctccaagtgaggacttggctcccccactccttcgacgcccccacccccgccccccgtgcagagagccggctcctgggcctgctggggcctctgctccagggcctcagggcccggcctggcagccggggagggccggaggcccaaggagggcgcgccttggccccacaccaacccccagggcctccccgcagtccctgcctagcccctctgccccagcaaatgcccagcccaggcaaattgtatttaaagaatcctgggggtcattatggcattttacaaactgtgaccgtttctgtgtgaagatttttagctgtatttgtggtctctgtatttatatttatgtttagcaccgtcagtgttcctatccaatttcaaaaaaggaaaaaaaagagggaaaattacaaaaagagagaaaaaaagtgaatgacgtttgtttagccagtaggagaaaataaataaataaat

SEQ ID NO: 146923 - DNA, 538 bp, Artificial Sequence
  derived and/or modified sequence
cggatctgattgcctggggtgctgggctgggcgcaccccactgctgctgggggtcaccccaagagccccccacccatccaaggaaaggaataaacttaaccgctggaggggcatgaggagctcagcccccccaacctcgacagcagctaacagaaacgccaggagcagcaggaggaggaggcagcgacaaggacgtcctccccaacgtcgccctcaattccaccgcctatgatccagtgaggcatttctcgacctatggagcggccgttgcccagaaccggatctactcgactcccttttattcgccacaggagaatgtcgtgttcagttccagccgggggccgtatgactatggatctaattccttttaccaggagaaagacatgctctcaaactgcagacaaaacaccttaggacataacacacagacctcaatcgctcaggattttagttctgagcagggcaggactgcgccccaggaccagaaagccagtatccagatttacccctggatgcagcgaatgaattcgcacagtgg

SEQ ID NO: 146924 - DNA, 358 bp, Artificial Sequence
  derived and/or modified sequence
aagcgggattggaccaaaccagagggacagagtcttctgggtctctctgcctgaggccctggagggagagaaggagaatgtcgtgttcagttccagccgggggccgtatgactatggatctaattccttttaccaggagaaagacatgctctcaaactgcagacaaaacaccttaggacataacacacagacctcaatcgctcaggattttagttctgagcagggcaggactgcgccccaggaccagaaagccagtatccagatttacccctggatgcagcgaatgaattcgcacagtgtgtgttttgtgcccggatctttaggggtcggctacggagcggaccggaggcgcggccgc

SEQ ID NO: 146925 - DNA, 708 bp, Artificial Sequence
  derived and/or modified sequence
atgaacagctacttcaccaaccccagcctgagctgccacctggccggcggccaggatgtgctgcccaacgtggccctgaacagcacagcctatgaccctgtgcgccacttcagcacctacggggctgctgtggcccagaaccgcatctacagcacccccttctacagcccccaggagaatgtggtgttcagcagcagccggggcccctatgactatggcagcaacagcttctaccaggagaaggacatgctgagcaactgccggcagaacaccctgggccacaacacccagaccagcatcgcccaggacttcagcagcgagcagggccgcacagccccccaggaccagaaggccagcatccagatctacccctggatgcagaggatgaacagccacagcggcgtgggctatggagctgacagaagaagaggccggcagatctacagccgctaccagaccctggagctggagaaggagttccacttcaaccgctacctgaccaggagaagacgcatcgagatcgccaatgccctgtgcctgacagagcggcagatcaagatctggttccagaacagaaggatgaagtggaagaaggagagcaacctgaccagcaccctgagcggcggcggcggcggggccacagctgacagcctgggcggcaaggaggagaagcgggaggagacagaggaggagaagcagaaggagtag

SEQ ID NO: 146926 - DNA, 708 bp, Artificial Sequence
  derived and/or modified sequence
atgaacagctacttcaccaaccccagcctgagctgccacctggccggcggacaagacgtgttgccgaacgttgcactgaactcaactgcttacgatcccgtgagacacttcagcacctacggagccgctgtggctcaaaatcggatatatagcacaccattctacagtccccaggagaatgtcgttttcagtagcagcaggggcccttacgactacggcagcaactcattttaccaagagaaggacatgctctccaactgtcgacagaacaccttgggacacaacacacaaacaagcatcgctcaagacttttccagtgagcaagggcgtactgctccccaagaccagaaggcctccatacagatttacccttggatgcaacgtatgaactcccactcgggcgtaggctacggcgcagaccgcaggcggggacgccagatttactcgcggtatcagaccctggaactagaaaaggaattccactttaatagatatctcacacgcagacggcggatcgagatcgccaatgcactgtgcttgaccgaacgacagatcaaaatttggtttcagaacaggaggatgaaatggaagaaggaaagtaatctgacctcgacgctcagcgggggtggtggtggcgcgaccgccgactccctgggcggcaaagaggagaagagagaggaaacggaggaagagaagcaaaaggagtag

SEQ ID NO: 146927 - DNA, 708 bp, Artificial Sequence
  derived and/or modified sequence
atgaatagctacttcactaatccgagtctgagctgtcatttggccggtggccaggacgtactgccaaatgtcgcgctaaactctacagcctacgatccagtacggcatttcagcacttacggggcagcagttgcccagaatcgtatctattcaacacccttctatagcccccaagagaatgtggtgttttcatcttcaagaggtccatatgactatgggagcaactctttttaccaggaaaaggacatgctctccaactgtcgacaaaataccttgggccataacacacagaccagtatcgcccaggatttctcctccgaacaaggtaggacggcacctcaggaccagaaggcttctattcagatatacccatggatgcagcgcatgaatagccactccggcgtgggctatggcgcagatagaagacgtggccgtcagatctacagccgatatcagactctcgagcttgaaaaagaattccactttaatcgataccttactcgccgaaggaggatagagatcgccaacgcactctgtctgactgagcggcagataaagatctggtttcagaatcgccgaatgaagtggaaaaaggaatctaacctgacctctacactcagcggcggaggagggggagctactgcggattccctgggaggcaaggaggagaagcgcgaggagaccgaagaggagaagcaaaaggagtag

SEQ ID NO: 146928 - DNA, 708 bp, Artificial Sequence
  derived and/or modified sequence
atgaacagctacttcaccaaccccagcctgagctgccacctggccggcggccaggacgtgctgcccaacgtggccctgaacagcaccgcctacgaccccgtgagacacttcagcacctacggcgccgccgtggcccagaacagaatctacagcacccccttctacagcccccaggagaacgtggtgttcagcagcagcagaggcccctacgactacggcagcaacagcttctaccaggagaaggacatgctgagcaactgcagacagaacaccctgggccacaacacccagaccagcatcgcccaggacttcagcagcgagcagggcagaaccgccccccaggaccagaaggccagcatccagatctacccctggatgcagagaatgaacagccacagcggcgtgggctacggcgccgacagaagaagaggcagacagatctacagcagataccagaccctggagctggagaaggagttccacttcaacagatacctgaccagaagaagaagaatcgagatcgccaacgccctgtgcctgaccgagagacagatcaagatctggttccagaacagaagaatgaagtggaagaaggagagcaacctgaccagcaccctgagcggcggcggcggcggcgccaccgccgacagcctgggcggcaaggaggagaagagagaggagaccgaggaggagaagcagaaggagtag

SEQ ID NO: 146929 - protein, 562 aa, Artificial Sequence
  derived and/or modified sequence
MAASAKRKQEEKHLKMLRDMTGLPHNRKCFDCDQRGPTYVNMTVGSFVCTSCSGSLRGLNPPHRVKSISMTTFTQQEIEFLQKHGNEVCKQIWLGLFDDRSSAIPDFRDPQKVKEFLQEKYEKKRWYVPPEQAKVVASVHASISGSSASSTSSTPEVKPLKSLLGDSAPTLHLNKGTPSQSPVVGRSQGQQQEKKQFDLLSDLGSDIFAAPAPQSTATANFANFAHFNSHAAQNSANADFANFDAFGQSSGSSNFGGFPTASHSPFQPQTTGGSAASVNANFAHFDNFPKSSSADFGTFNTSQSHQTASAVSKVSTNKAGLQTADKYAALANLDNIFSAGQGGDQGSGFGTTGKAPVGSVVSVPSQSSASSDKYAALAELDSVFSSAATSSNAYTSTSNASSNVFGTVPVVASAQTQPASSSVPAPFGATPSTNPFVAAAGPSVASSTNPFQTNARGATAATFGTASMSMPTGFGTPAPYSLPTSFSGSFQQPAFPAQAAFPQQTAFSQQPNGAGFAAFGQTKPVVTPFGQVAAAGVSSNPFMTGAPTGQFPTGSSSTNPFL

SEQ ID NO: 146930 - DNA, 1689 bp, Artificial Sequence
  derived and/or modified sequence
atggctgcctcagctaagagaaagcaggaggaaaagcacctgaagatgctgcgggacatgaccggactgccccataatcgtaagtgctttgactgcgaccaacggggtcctacatacgtcaacatgacggtgggaagctttgtgtgtacttcttgttccgggtccctgagaggactgaatcccccacatcgtgtgaagagcatctctatgactactttcacacagcaagagatagagttcttacagaaacacgggaatgaagtgtgtaagcagatctggttgggcttattcgatgacagaagtagcgccattccagactttcgggatccccagaaggtcaaagagttcttgcaagagaagtatgagaaaaagaggtggtatgtgccccctgaacaggctaaggtcgttgcctcagtgcacgcatcgatcagcgggagtagcgcaagctcaacgtcatccacacccgaggttaagcctctgaaatccctactcggggacagtgcacccacactgcacctcaacaaaggaacaccttctcagtctccagttgtggggaggtcacaaggccaacagcaggaaaaaaagcaattcgaccttctctccgaccttggaagcgacatcttcgccgcccccgctccacagtccacagcgaccgcaaatttcgcgaatttcgcacatttcaatagtcacgccgcacagaactcagccaatgccgactttgcaaactttgatgccttcgggcagagcagtggttccagtaatttcggaggtttccccacagcctcccattccccttttcagccacaaactacaggaggaagcgccgcttccgtcaatgcaaattttgctcacttcgacaattttcctaagtctagctccgctgacttcgggacattcaacactagtcagtcccatcagactgctagtgctgtctctaaagtttctacgaataaagcgggtctccagacagccgataagtatgctgctctggcaaacctcgataatatcttctctgccggacaaggcggggaccagggcagtggatttgggactaccggtaaggcacctgtcggatctgtggtgagtgtgccaagtcagagcagcgcctcgtcggataaatacgcggcgctcgcagagcttgactccgtattctcctcagctgcaaccagcagcaatgcctatacaagcacttcaaacgcctcctcaaatgtgtttggaaccgtgcctgtcgttgcgtctgcacaaacccagcccgcaagcagctctgtccccgccccattcggtgctaccccctccaccaatccattcgttgccgccgccggccctagcgtcgcgagttctactaatcccttccagacaaatgcacgcggggcaacggctgccactttcgggacggcctctatgtccatgccaaccggcttcgggacccctgcgccatactctctcccaacatctttcagcggttccttccagcagcctgccttccccgctcaagcagctttcccgcagcagacagctttctcacagcagcccaatggagccggtttcgcggcctttggtcagacaaaaccagtggtcacgccctttgggcaggttgctgctgccggcgtcagctctaacccctttatgactggggcgccaacgggtcaatttccgacaggaagctcctctactaatccctttctgtag

SEQ ID NO: 146931 - DNA, 1689 bp, Artificial Sequence
  derived and/or modified sequence
atggccgccagcgccaagaggaagcaggaggagaagcacctgaagatgctgcgggacatgacaggcctgccccacaacaggaagtgctttgactgtgaccagaggggccccacctacgtgaacatgacagtgggcagctttgtgtgcaccagctgcagcggcagcctgcggggcctgaaccccccccaccgggtgaagagcatctccatgaccaccttcacccagcaggagattgagttcctgcagaagcacggcaatgaggtgtgcaagcagatctggctgggcctgtttgatgacaggagcagcgccatcccagacttccgggacccccagaaggtgaaggagttcctgcaggagaagtatgagaagaagcgctggtacgtgcccccagagcaggccaaggtggtggcctctgtgcacgccagcatcagcggcagcagcgccagcagcaccagcagcaccccagaggtgaagcccctgaagagcctgctgggggacagcgcccccaccctgcacctgaacaagggcacccccagccagagccctgtggtgggccgcagccagggccagcagcaggagaagaagcagtttgacctgctgagtgacctgggcagtgacatctttgctgccccagccccccagagcacagccacagccaactttgccaactttgcccacttcaacagccatgctgcccagaacagcgccaatgctgactttgccaactttgatgccttcggccagagcagcggcagcagcaactttggaggcttccccacagccagccacagccccttccagccccagaccactggaggcagcgctgcctctgtgaatgccaactttgcccactttgacaacttccccaagagcagcagcgctgactttggcaccttcaacaccagccagagccaccagacagccagcgctgtgtccaaggtgtccaccaacaaggccggcctgcagacagctgacaagtatgctgccctggccaacctggacaacatcttctctgctggccagggcggggaccagggcagcggcttcggcaccaccgggaaggcccctgtgggctctgtggtgtctgtgcccagccagagcagcgccagcagtgacaagtatgctgccctggccgagctggacagcgtcttcagcagcgctgccaccagcagcaatgcctacaccagcaccagcaatgccagcagcaatgtgtttggaacagtgcctgtggtggccagcgcccagacccagcctgccagcagctctgtgcctgccccctttggagccacccccagcaccaacccctttgtggccgccgccggccccagcgtggccagcagcaccaaccccttccagaccaatgcccggggggccacagctgccacctttggaacagcctccatgtccatgcccaccggcttcggcaccccagccccctacagcctgcccaccagcttcagcggcagcttccagcagcctgccttccctgcccaggccgccttcccccagcagacagccttcagccagcagcccaacggggccggctttgctgccttcggccagaccaagcctgtggtgaccccatttggccaggtggccgctgctggggtgagcagcaaccccttcatgaccggggcccccaccggccagttccccaccggcagcagcagcaccaaccccttcctgtag

SEQ ID NO: 146932 - DNA, 1689 bp, Artificial Sequence
  derived and/or modified sequence
atggccgccagcgccaagcggaagcaggaggagaagcacctgaagatgcttcgagatatgaccggcttgccccataaccggaagtgcttcgactgcgaccagagaggacccacatatgtgaacatgaccgtgggttcgttcgtctgcacctcttgcagcggttctctcagaggactcaaccccccacaccgggttaaaagcatttcaatgacaacattcacgcaacaggagatcgagttcctccagaagcacgggaatgaagtgtgtaaacaaatttggctcgggctttttgatgataggagctcagccattcccgactttcgcgacccccagaaggtgaaagaatttctgcaggaaaaatacgaaaaaaaaagatggtatgtaccccccgaacaggcaaaggtggtggccagcgtccatgcctccatcagcggttctagcgccagtagcacttcaagtaccccagaagtcaaacccttgaagtctttgttaggggattccgctcccacattgcacctgaacaaaggaacccccagccagtcccccgtagtcggcagatcccaaggtcaacagcaggagaaaaaacagttcgacctgctcagtgatctgggcagcgacatttttgccgcccctgccccgcaatcaactgcgaccgcaaacttcgctaacttcgcgcattttaacagccacgctgcccagaattcagcaaacgcagattttgcaaacttcgacgcttttggccagtcctctgggtccagcaacttcggaggatttcccaccgcaagccactctccgttccagcctcagacaactggcggctctgccgcttctgtcaacgctaatttcgcccattttgacaacttcccaaagtcatcctccgctgacttcggaaccttcaacaccagccagagccaccaaacggcgtccgccgtttctaaggtgtctaccaacaaagccggtctccagacagccgataagtacgctgcattagctaatctcgacaacatcttttctgcaggacagggtggggaccaggggtctggatttggcactacgggtaaggctcctgtgggcagtgtcgtttccgtgccaagccagtcctctgccagtagcgacaagtatgccgccctggccgagttagattctgtgttttcatctgctgccacctcgagcaatgcctatacgagtactagcaacgcctcctctaacgttttcggcacggttcccgtcgtggcaagcgcacagacccagcccgctagcagctcagtccccgcaccgtttggggccacgccctcaaccaatccttttgtagcagcagctgggccttccgttgccagttcaacaaaccccttccagaccaacgcgcgcggggccaccgccgcaacattcggtacggcttccatgagtatgcctaccgggttcggcaccccagccccatattctttgccaacttccttctctggcagtttccagcagcctgcttttcctgcacaggccgccttcccccagcagactgcattttctcagcagcctaatggcgctggatttgctgcatttggccaaaccaagcccgtggtgactccattcgggcaggttgcagcagcaggggtgtcaagcaaccctttcatgactggcgctccaacaggccagttccctacaggttccagttccacgaatccatttttatag

SEQ ID NO: 146933 - DNA, 1689 bp, Artificial Sequence
  derived and/or modified sequence
atggccgctagcgccaagagaaagcaggaagaaaagcatttaaagatgttacgcgacatgaccggtctcccacacaatcgcaaatgcttcgattgcgaccagagaggcccaacatatgtgaacatgacagtcggttcttttgtgtgcacaagctgttctggtagtttgagaggactgaaccctccccatagggtgaaatccatctccatgactacatttacacagcaggaaatagaattcctgcagaagcatggtaacgaggtgtgtaagcaaatatggctgggactgttcgacgaccggtcctcggccatccctgacttcagggatcctcaaaaagtgaaagaattcttgcaggagaagtatgaaaaaaaacgctggtatgtgcctccagagcaagccaaggtggtcgcctctgtacatgcgtcaatttctggtagttctgcctcctccacaagctccacccccgaggttaaacccctaaaaagtttattgggagattcggcaccgacattgcatctgaacaagggtactccttctcagagcccggtagtggggaggtcccaggggcagcagcaggaaaagaagcagtttgacctcttatcagacctggggtccgacatcttcgcggcacccgcaccacaatccactgcgacagctaactttgcaaacttcgcacacttcaattcccacgcagcccagaattctgcaaacgcagacttcgctaatttcgatgcctttggtcagagctctgggagtagtaacttcggaggctttcctactgcatcacactccccgttccagccccaaactacaggaggcagcgctgcttcagtgaatgcaaacttcgctcatttcgataattttcctaaaagttcatccgcagatttcgggacgtttaatacctcccagtcccaccagacggcctccgccgtgagcaaggtgagcacaaacaaagcagggctgcagaccgccgacaaatatgccgctttggccaacctggacaatattttctcagctggacaagggggtgaccaggggagcgggttcggtacaacaggcaaggcgcctgtgggctctgtcgtatctgttccctcacagtcaagcgcctcttccgataagtatgcggctcttgccgagctcgattctgtgttctcaagtgctgcgacatctagcaatgcatacacgtctacatccaacgccagctctaatgtgttcggcacggtgccagtggttgcttcagcacagacacagcccgcttcctcttcagttccggctccttttggagctacaccttccacgaatcccttcgtggccgctgccggtccgagtgtagcatctagtacaaacccgttccaaactaacgcgaggggggctaccgcagctacttttggtactgcttccatgagcatgcctacaggcttcgggacccccgcaccctacagtctgcctacatccttcagtggctcgtttcagcaacccgctttcccagcccaagctgcctttccccagcagacagcatttagtcagcaaccgaatggggcaggatttgcagcgttcggccagactaagcctgtcgtcactccattcgggcaggtggctgcggcaggagtgagcagtaatccctttatgacgggcgctcctacaggccagttccccaccggctcaagctctacaaatcctttcctctag

SEQ ID NO: 146934 - DNA, 4122 bp, Artificial Sequence
  derived and/or modified sequence
aggagaagtcgggaaggtggcggcggcggcggcggttgtcccggctgtgccggttggtgtggcccgtcagcccgcgtaccacagcgcccgggccgcgtcgagcccagtacagccaagccgctgcggccgggtccggcgcgggcggcgcgcgcagacggagggcggcggccgcggccagggcggcccgtgggaccgcgggcccccggcgcagcgctgcccggctcccggccctgccggcctcctcccttggcgccgcggccatggcggccagcgcgaagcggaagcaggaggagaagcacctgaagatgctgcgggacatgaccggcctcccgcacaaccgaaagtgcttcgactgcgaccagcgcggccccacctacgttaacatgacggtcggctccttcgtgtgtacctcctgctccggcagcctgcgaggattaaatccaccacacagggtgaaatctatctccatgacaacattcacacaacaggaaattgaattcttacaaaaacatggaaatgaagtctgtaaacagatttggctaggattatttgatgatagatcttcagcaattccagacttcagggatccacaaaaagtgaaagagtttctacaagaaaagtatgaaaagaaaagatggtatgtcccgccagaacaagccaaagtcgtggcatcagttcatgcatctatttcagggtcctctgccagtagcacaagcagcacacctgaggtcaaaccactgaaatctcttttaggggattctgcaccaacactgcacttaaataagggcacacctagtcagtccccagttgtaggtcgttctcaagggcagcagcaggagaagaagcaatttgaccttttaagtgatctcggctcagacatctttgctgctccagctcctcagtcaacagctacagccaattttgctaactttgcacatttcaacagtcatgcagctcagaattctgcaaatgcagattttgcaaactttgatgcatttggacagtctagtggttcgagtaattttggaggtttccccacagcaagtcactctccttttcagccccaaactacaggtggaagtgctgcatcagtaaatgctaattttgctcattttgataacttccccaaatcctccagtgctgattttggaaccttcaatacttcccagagtcatcaaacagcatcagctgttagtaaagtttcaacgaacaaagctggtttacagactgcagacaaatatgcagcacttgctaatttagacaatatcttcagtgccgggcaaggtggtgatcagggaagtggctttgggaccacaggtaaagctcctgttggttctgtggtttcagttcccagtcagtcaagtgcatcttcagacaagtatgcagctctggcagaactagacagcgttttcagttctgcagccacctccagtaatgcgtatacttccacaagtaatgctagcagcaatgtttttggaacagtgccagtggttgcttctgcacagacacagcctgcttcatcaagtgtgcctgctccatttggagctacgccttccacaaatccatttgttgctgctgctggtccttctgtggcatcttctacaaacccatttcagaccaatgccagaggagcaacagcggcaacctttggcactgcatccatgagcatgcccacaggattcggcactcctgctccctacagtcttcccaccagctttagtggcagctttcagcagcctgcctttccagcccaagcagctttccctcaacagacagctttttctcaacagcccaatggtgcaggttttgcagcatttggacaaacaaagccagtagtaaccccttttggtcaagttgcagctgctggagtatctagtaatccttttatgactggtgcaccaacaggacaatttccaacaggaagctcatcaaccaatcctttcttatagccttatatagacaatttactggaacgaacttttatgtggtcacattacatctctccacctcttgcactgttgtcttgtttcactgatcttagctttaaacacaagagaagtctttaaaaagcctgcattgtgtattaaacaccaggtaatatgtgcaaaaccgagggctccagtaacaccttctaacctgtgaattggcagaaaagggtagcggtatcatgtatattaaaattggctaatattaagttattgcagataccacattcattatgctgcagtactgtacatatttttcttagaaattagctatttgtgcatatcagtatttgtaactttaacacattgttatgtgagaaatgttactggggaaatagatcagccacttttaaggtgctgtcatatatcttggaatgaatgacctaaaatcattttaaccattgctactggaaagtaacagagtcaaaattggaaggttttattcattcttgaatttttcctttctaaagagctcttctatttatacatgcctaaattcttttaaaatgtagagggatacctgtctgcataataaagctgatcatgttttgctacagtttgcaggtgaaaaaaaataaatattataaaatatgctattgtttttgtgttcttgctgcaatgcctttaccaaagtggccttaaatatgagtagtgaattgagaacatcttgaattcttaaaagacttcttagtgactttttataaaaaggccatgtagaaaatttattaaaactactatgactgctacattcaggaatatgccagtggtaaagcatttaaatgtagcttgtcagatttaccataatcctactaatttctttgcagcttattaattttgtgaaatttgtatatatgaagaatttgcatgtatgtgtatttacaaatttttctaagtatcttgaattctcagactgcaaaaggcctattttaactattgattttttttaaaaaaaattgtctttgaatgtattggaagtagacatgcattaactgtgacattattgcacctcagtttttttctttctttttttgggcaaactgatattatctataggatatttgtttatgtttgttttttgggggaaagaaactggaactcagtgttaccttaaagttacggaatactttgttttaaaggaaaagataataagtttagttatatctttttgttaatattcaaatgaacttgtttaagtatctatgtacagtaatgcctcattcatctagaggtaatctggcagtcttgtgaaaaccgaacacaactcagaaacttggaatcgttttttttaaaaatgcctctgagcaacccatataagtcacaaagtctgtgtgttagagcttatgcatttgtttttatgagagattttaataaatttaattatttgcttgtccagactatagcatattagctgtttagaagggatggcttgaaaggaaggagactgaaaaacactctgagagcatacactgtccaaggccattagtgtaaggaccgctacccagcctagaggacatcactatactacatcatctgatgattattctttattatgcctctaggtaattaagtaaaggtgaaattgcatacacagatatgtagtacatattttaaaagttttatcttaaattgattaaaactttttaaaaagctttggtattaaaagaggtaaacatcagtttcctcaaacattttattcatgttgaatgcctttttgcaatgatgactgagttgttatcatagtattttaaaacctgtatagtgttttagacttgttaaaacattgctgtctagtgtacatctagctaaaagtgtggtttatctaaaccgttttaataagcaagatgactgggaaatctctgccccttttctgagcagtatgcctcttcttttagaattaaatgaatgctgcacaggtccagatgtgtgttgatgtagacttgaaatgtctccacattttggaggacttcctcagcccttttcattgagggaaaatatatttgaatttctgttttagattgtatcgggtcccagttgattcatgtgtacaaagttatgctacctaattacagaccattacccaaatatcctaccaggctttccatctgaatagtaaattaaacagttgttatcaaaatga

SEQ ID NO: 146935 - DNA, 1689 bp, Artificial Sequence
  derived and/or modified sequence
atggccgccagcgccaagagaaagcaggaggagaagcacctgaagatgctgagagacatgaccggcctgccccacaacagaaagtgcttcgactgcgaccagagaggccccacctacgtgaacatgaccgtgggcagcttcgtgtgcaccagctgcagcggcagcctgagaggcctgaaccccccccacagagtgaagagcatcagcatgaccaccttcacccagcaggagatcgagttcctgcagaagcacggcaacgaggtgtgcaagcagatctggctgggcctgttcgacgacagaagcagcgccatccccgacttcagagacccccagaaggtgaaggagttcctgcaggagaagtacgagaagaagagatggtacgtgccccccgagcaggccaaggtggtggccagcgtgcacgccagcatcagcggcagcagcgccagcagcaccagcagcacccccgaggtgaagcccctgaagagcctgctgggcgacagcgcccccaccctgcacctgaacaagggcacccccagccagagccccgtggtgggcagaagccagggccagcagcaggagaagaagcagttcgacctgctgagcgacctgggcagcgacatcttcgccgcccccgccccccagagcaccgccaccgccaacttcgccaacttcgcccacttcaacagccacgccgcccagaacagcgccaacgccgacttcgccaacttcgacgccttcggccagagcagcggcagcagcaacttcggcggcttccccaccgccagccacagccccttccagccccagaccaccggcggcagcgccgccagcgtgaacgccaacttcgcccacttcgacaacttccccaagagcagcagcgccgacttcggcaccttcaacaccagccagagccaccagaccgccagcgccgtgagcaaggtgagcaccaacaaggccggcctgcagaccgccgacaagtacgccgccctggccaacctggacaacatcttcagcgccggccagggcggcgaccagggcagcggcttcggcaccaccggcaaggcccccgtgggcagcgtggtgagcgtgcccagccagagcagcgccagcagcgacaagtacgccgccctggccgagctggacagcgtgttcagcagcgccgccaccagcagcaacgcctacaccagcaccagcaacgccagcagcaacgtgttcggcaccgtgcccgtggtggccagcgcccagacccagcccgccagcagcagcgtgcccgcccccttcggcgccacccccagcaccaaccccttcgtggccgccgccggccccagcgtggccagcagcaccaaccccttccagaccaacgccagaggcgccaccgccgccaccttcggcaccgccagcatgagcatgcccaccggcttcggcacccccgccccctacagcctgcccaccagcttcagcggcagcttccagcagcccgccttccccgcccaggccgccttcccccagcagaccgccttcagccagcagcccaacggcgccggcttcgccgccttcggccagaccaagcccgtggtgacccccttcggccaggtggccgccgccggcgtgagcagcaaccccttcatgaccggcgcccccaccggccagttccccaccggcagcagcagcaccaaccccttcctgtag

SEQ ID NO: 146936 - protein, 536 aa, Artificial Sequence
  derived and/or modified sequence
MKQSSNVPAFLSKLWTLVEETHTNEFITWSQNGQSFLVLDEQRFAKEILPKYFKHNNMASFVRQLNMYGFRKVVHIDSGIVKQERDGPVEFQHPYFKQGQDDLLENIKRKVSSSKPEENKIRQEDLTKIISSAQKVQIKQETIESRLSELKSENESLWKEVSELRAKHAQQQQVIRKIVQFIVTLVQNNQLVSLKRKRPLLLNTNGAQKKNLFQHIVKEPTDNHHHKVPHSRTEGLKPRERISDDIIIYDVTDDNADEENIPVIPETNEDVISDPSNCSQYPDIVIVEDDNEDEYAPVIQSGEQNEPARESLSSGSDGSSPLMSSAVQLNGSSSLTSEDPVTMMDSILNDNINLLGKVELLDYLDSIDCSLEDFQAMLSGRQFSIDPDLLVDLFTSSVQMNPTDYINNTKSENKGLETTKNNVVQPVSEEGRKSKSKPDKQLIQYTAFPLLAFLDGNPASSVEQASTTASSEVLSSVDKPIEVDELLDSSLDPEPTQSKLVRLEPLTEAEASEATLFYLCELAPAPLDSDMPLLDS

SEQ ID NO: 146937 - DNA, 2697 bp, Artificial Sequence
  derived and/or modified sequence
acttgtccgtcacgtgcggccgcccggcctctcggccttgccgcgcgcctggcggggttgggggggcggggaccaagatctgctgcgcctgcgttgtgggcgttctcggggagctgctgccgtagctgccgccgccgctaccaccgcgttcgggtgtagaatttggaatccctgcgccgcgttaacaatgaagcagagttcgaacgtgccggctttcctcagcaagctgtggacgcttgtggaggaaacccacactaacgagttcatcacctggagccagaatggccaaagttttctggtcttggatgagcaacgatttgcaaaagaaattcttcccaaatatttcaagcacaataatatggcaagctttgtgaggcaactgaatatgtatggtttccgtaaagtagtacatatcgactctggaattgtaaagcaagaaagagatggtcctgtagaatttcagcatccttacttcaaacaaggacaggatgacttgttggagaacattaaaaggaaggtttcatcttcaaaaccagaagaaaataaaattcgtcaggaagatttaacaaaaattataagtagtgctcagaaggttcagataaaacaggaaactattgagtccaggctttctgaattaaaaagtgagaatgagtccctttggaaggaggtgtcagaattacgagcaaagcatgcacaacagcaacaagttattcgaaagattgtccagtttattgttacattggttcaaaataaccaacttgtgagtttaaaacgtaaaaggcctctacttctaaacactaatggagcccaaaagaagaacctgtttcagcacatagtcaaagaaccaactgataatcatcatcataaagttccacacagtaggactgaaggtttaaagccaagggagaggatttcagatgacatcattatttatgatgttactgatgataatgcagatgaagaaaatatcccagttattccagaaactaatgaggatgttatatctgatccctccaactgtagccagtaccctgatattgtcatcgttgaagatgacaatgaagatgagtatgcacctgtcattcagagtggagagcagaatgaaccagccagagaatccctaagttcaggcagtgatggcagcagccctctcatgtctagtgctgtccagctaaatggctcatccagtctgacctcagaagatccagtgaccatgatggattccattttgaatgataacatcaatcttttgggaaaggttgagctgttggattatcttgacagtattgactgcagtttagaggacttccaggccatgctatcaggaagacaatttagcatagacccagatctcctggttgatcttttcactagttctgtgcagatgaatcccacagattacatcaataatacaaaatctgagaataaaggattagaaactaccaagaacaatgtagttcagccagtttcggaagagggaagaaaatctaaatccaaaccagataagcagcttatccagtataccgcctttccacttcttgcattcctcgatgggaaccctgcttcttctgttgaacaggcgagtacaacagcatcatcagaagttttgtcctctgtagataaacccatagaagttgatgagcttctggatagcagcctagacccagaaccaacccaaagtaagcttgttcgcctggagccattgactgaagctgaagctagtgaagctacactgttttatttatgtgaacttgctcctgcacctctggatagtgatatgccacttttagatagctaaatccccaggaagtggactttacatgtatatattcatcaaaatgatgaactatttattttaaagtatcatttggtactttttttgtaaattgctttgttttgtttaatcagatactgtggaataaaagcaccttttgcttttctcactaaccacacactcttgcagagctttcaggtgttactcagctgcatagttacgcagatgtaatgcacattattggcgtatctttaagttggattcaaatggccatttttctccaattttggtaaattggatatcttttttttacaaatacgaccattaacctcagttaaatttttgtttgttttcctgtttgatgctgtctatttgcattgagtgtaagtcatttgaactaatggtataactcctaaagctttctctgctccagttatttttattaaatatttttcacttggcttatttttaaaactgggaacataaagtgcctgtatcttgtaaaacttcatttgtttcttttggttcagagaagttcatttatgttcaaagacgtttattcatgttcaacaggaaagacaaagtgtacgtgaatgctcgctgtctgatagggttccagctccatatatatagaaagatcgggggtgggatgggatggagtgagccccatccagttagttggactagttttaaataaaggttttccggtttgtgtttttttgaaccatactgtttagtaaaataaatacaatgaatgttgagtactagtgtctgttatgtgtcttctttagaggtgacactcacatgaaacaattttttcttctcataggaagcagtagctttaaactgtctgtggttcattattctcaatatgaatcataccaagatatttgtgcctcatctcgaaaatatattgtatattg

SEQ ID NO: 146938 - DNA, 1611 bp, Artificial Sequence
  derived and/or modified sequence
atgaagcagagctccaacgttcccgccttcctgtctaaactgtggacacttgtggaagagactcacactaatgagtttatcacctggagccagaacggccagtccttcctcgtcctggacgagcagcgcttcgccaaagagattcttcccaagtactttaagcataataacatggccagttttgtacggcaactcaatatgtacggattccggaaggtggtccatattgattcgggcatagtgaagcaggagcgagacggccctgtggaattccagcatccctacttcaagcaaggacaagacgacctgctagagaacatcaaaagaaaggtctcttcttctaagcctgaagagaacaagatacgccaggaagatcttacaaagattattagctccgcccagaaagttcagatcaaacaagagaccattgagtctagattgagtgaattgaagagcgagaacgagtccctctggaaagaggtttccgaacttcgcgcaaaacatgcgcaacagcagcaggttatccggaagatcgttcagttcattgtcaccctcgtgcagaacaaccagttggtctcacttaaacggaaacgcccccttctcttaaacacaaacggagcccaaaagaagaacctctttcagcatatcgttaaggaacctacagacaaccaccaccacaaggtcccccacagcagaaccgagggactgaagcctcgcgagcgtatctctgatgatattatcatatacgatgtcactgacgacaacgcagatgaggagaacattccagtgatccctgaaacaaacgaggatgttatcagtgatcccagcaattgcagccagtacccggacattgtgatcgtggaagatgacaatgaggatgaatatgccccggtcattcagtctggcgagcaaaacgaacctgctcgggagagcctctcttcgggctcagatggcagcagccccctgatgtcaagcgctgtgcagctgaacggctcttcgagcctgacatctgaggaccccgtcactatgatggattccattctgaacgacaacatcaatcttctcgggaaggtggaactgctagactatttagattctatcgactgttccctggaggattttcaagccatgttgtctgggaggcaatttagtatcgatcctgacctgctcgtggacctgttcacttcctctgtgcagatgaaccccaccgactatataaacaacaccaaatctgagaacaaagggctggaaactaccaagaataacgtcgttcagccagtcagcgaggaaggtcggaaatccaagagtaagcccgacaaacaactcatccagtacacagctttccctttgcttgccttcttagacggtaatccagcgtcttcagtcgagcaggcgtcaacaacagcttcgtccgaagtgctgagtagcgtggacaagcccatcgaggtggacgagctgctggacagctctttggatcccgaacccactcaatccaaactggtgcggttagaacctttaacggaagcggaggcctctgaggcaactctattctatctatgcgagttggcgcccgcacctctcgactccgatatgccgcttctcgattcttag

SEQ ID NO: 146939 - DNA, 2549 bp, Artificial Sequence
  derived and/or modified sequence
cggagacttgtccgtcacgtgcggccgcccggcctctcggccttgccgcgcgcctggcggggttgggggggcggggaccaagatctgctgcgcctgcgttgtgggcgttctcggggagctgctgccgtagctgccgccgccgctaccaccgcgttcgggtgtagaatttggaatccctgcgccgcgttaacaatgaagcagagttcgaacgtgccggctttcctcagcaagctgtggacgcttgtggaggaaacccacactaacgagttcatcacctggagccagaatggccaaagttttctggtcttggatgagcaacgatttgcaaaagaaattcttcccaaatatttcaagcacaataatatggcaagctttgtgaggcaactgaatatgtatggtttccgtaaagtagtacatatcgactctggaattgtaaagcaagaaagagatggtcctgtagaatttcagcatccttacttcaaacaaggacaggatgacttgttggagaacattaaaaggaaggtttcatcttcaaaaccagaagaaaataaaattcgtcaggaagatttaacaaaaattataagtagtgctcagaaggttcagataaaacaggaaactattgagtccaggctttctgaattaaaaagtgagaatgagtccctttggaaggaggtgtcagaattacgagcaaagcatgcacaacagcaacaagttattcgaaagattgtccagtttattgttacattggttcaaaataaccaacttgtgagtttaaaacgtaaaaggcctctacttctaaacactaatggagcccaaaagaagaacctgtttcagcacatagtcaaagaaccaactgataatcatcatcataaagttccacacagtaggactgaaggtttaaagccaagggagaggatttcagatgacatcattatttatgatgttactgatgataatgcagatgaagaaaatatcccagttattccagaaactaatgaggatgttatatctgatccctccaactgtagccagtaccctgatattgtcatcgttgaagatgacaatgaagatgagtatgcacctgtcattcagagtggagagcagaatgaaccagccagagaatccctaagttcaggcagtgatggcagcagccctctcatgtctagtgctgtccagctaaatggctcatccagtctgacctcagaagatccagtgaccatgatggattccattttgaatgataacatcaatcttttgggaaaggttgagctgttggattatcttgacagtattgactgcagtttagaggacttccaggccatgctatcaggaagacaatttagcatagacccagatctcctggttgatcttttcactagttctgtgcagatgaatcccacagattacatcaataatacaaaatctgagaataaaggattagaaactaccaagaacaatgtagttcagccagtttcggaagagggaagaaaatctaaatccaaaccagataagcagcttatccagtataccgcctttccacttcttgcattcctcgatgggaaccctgcttcttctgttgaacaggcgagtacaacagcatcatcagaagttttgtcctctgtagataaacccatagaagttgatgagcttctggatagcagcctagacccagaaccaacccaaagtaagcttgttcgcctggagccattgactgaagctgaagctagtgaagctacactgttttatttatgtgaacttgctcctgcacctctggatagtgatatgccacttttagatagctaaatccccaggaagtggactttacatgtatatattcatcaaaatgatgaactatttattttaaagtatcatttggtactttttttgtaaattgctttgttttgtttaatcagatactgtggaataaaagcaccttttgcttttctcactaaccacacactcttgcagagctttcaggtgttactcagctgcatagttacgcagatgtaatgcacattattggcgtatctttaagttggattcaaatggccatttttctccaattttggtaaattggatatcttttttttacaaatacgaccattaacctcagttaaatttttgtttgttttcctgtttgatgctgtctatttgcattgagtgtaagtcatttgaactaatggtataactcctaaagctttctctgctccagttatttttattaaatatttttcacttggcttatttttaaaactgggaacataaagtgcctgtatcttgtaaaacttcatttgtttcttttggttcagagaagttcatttatgttcaaagacgtttattcatgttcaacaggaaagacaaagtgtacgtgaatgctcgctgtctgatagggttccagctccatatatatagaaagatcgggggtgggatgggatggagtgagccccatccagttagttggactagttttaaataaaggttttccggtttgtgtttttttgaaccatactgtttagtaaaataaatacaatgaatgttgagtactagtg

SEQ ID NO: 146940 - DNA, 1611 bp, Artificial Sequence
  derived and/or modified sequence
atgaagcagagcagcaatgtgcctgccttcctgagcaagctgtggaccctggtggaggagacccacaccaatgagttcatcacctggagccagaatggccagagcttcctggtgctggatgagcagagatttgccaaggagatcctgcccaagtacttcaagcacaacaacatggccagctttgtgcggcagctgaacatgtatggcttcaggaaggtggtgcacatcgacagcggcatcgtgaagcaggagagagatggccctgtggagttccagcacccctacttcaagcagggccaggatgacctgctggagaacatcaagaggaaggtgagcagcagcaagccagaggagaacaagatccggcaggaggacctgaccaagatcatcagcagcgcccagaaggtgcagatcaagcaggagaccatcgagagccggctgtctgagctgaagtcagaaaatgaaagcctgtggaaggaggtgtctgagctgcgggccaagcacgcccagcagcagcaggtgatcaggaagatcgtgcagttcatcgtgaccctggtgcagaacaaccagctggtgtccctgaagaggaagaggcccctgctgctgaacaccaatggagcccagaagaagaacctcttccagcacatcgtgaaggagcccacagacaaccaccaccacaaggtgccccacagcaggacagagggcctgaagccccgggagcgcatcagtgatgacatcatcatctatgatgtgacagatgacaatgctgatgaggagaacatccctgtgattcctgagaccaatgaagatgtgatcagtgaccccagcaactgcagccagtacccagacatcgtcatcgtggaggatgacaatgaagatgaatatgcccctgtgatccagagcggggagcagaatgaaccagcccgggagagcctgagcagcggcagtgatggcagcagccccctgatgagcagcgctgtgcagctgaatggcagcagcagcctgaccagcgaggaccctgtgaccatgatggacagcatcctgaatgacaacatcaacctgctgggcaaggtggagctgctggactacctggacagcattgactgcagcctggaggacttccaggccatgctgagcggccggcagttcagcattgatcctgacctgctggtggacctcttcaccagctctgtgcagatgaaccccacagactacatcaacaacaccaagtctgagaacaagggcctggagaccaccaagaacaacgtggtgcagcctgtgtctgaggagggcaggaagagcaagagcaagccagacaagcagctgatccagtacacagccttccccctgctggccttcctggatggcaacccagccagctctgtggagcaggccagcaccacagccagcagcgaggtgctgagctctgtggacaagcccatcgaggtggatgagctgctggacagcagcctggaccctgagcccacccagagcaagctggtgcggctggagcccctgacagaagctgaggccagcgaggccaccctcttctacctgtgtgagctggccccagcccccctggacagcgacatgcccctgctggacagctag

SEQ ID NO: 146941 - DNA, 1611 bp, Artificial Sequence
  derived and/or modified sequence
atgaagcagagcagcaacgtgcccgccttcctgagcaagctgtggacgcttgttgaggaaacccacacgaacgaatttatcacttggtcccaaaacgggcaatccttcttagtactggatgagcaacgcttcgccaaggagatcctgccaaaatacttcaaacacaacaatatggcttcttttgtccgtcagttaaatatgtacgggttcagaaaggtcgtgcacattgacagcggcattgtgaaacaggagcgggatgggcctgtggagttccagcacccttactttaagcaggggcaggacgacctcctggaaaacatcaaaaggaaggtttcgtctagtaagccagaggaaaacaaaattaggcaagaggacttaactaaaattatttcttccgctcaaaaggtccagatcaagcaagagacaattgaatccaggttgagcgaactgaaaagcgaaaacgagagtctgtggaaggaagtgtctgaactgagagcaaaacacgctcagcaacagcaggtcatccgaaagatagtccagttcatagtgactcttgtccaaaataaccagcttgtgagtctgaagcgtaagcgccctttgttactgaacaccaatggggcccaaaagaaaaatctgttccagcacattgtcaaggaacccaccgataaccatcatcacaaagtaccacacagccgcacggaagggctgaaaccgcgggaaagaatctcagatgatattataatctatgacgtgaccgacgacaacgctgacgaggaaaatattcctgtgatccctgaaactaacgaggatgtgatctctgaccccagtaattgcagtcagtatcctgacattgtcatcgtggaagatgacaatgaggacgaatacgccccggttatccagagcggcgagcaaaacgaaccggcgagggagagcctttcctctggcagcgatggctcatcaccactgatgtcatccgcagtccagctgaacggcagttcgtccctgactagcgaggaccccgttacaatgatggactccattctgaacgataacattaacctgctgggcaaagttgagctactcgattaccttgacagcatagactgcagcttggaggactttcaggctatgctcagtgggagacaattcagcatcgaccctgacctactcgtggacctctttacaagttcagtgcagatgaatcccacagattacatcaacaataccaagtccgagaataagggtttggaaactaccaaaaataatgtggtacagcctgtctcagaggaaggcaggaagagcaagtctaaacccgataagcagctgatacagtacacagcattccctcttctggccttcctcgatggaaaccccgcatcgagcgttgagcaggcatccaccacagcgtcaagcgaagtgctctcctctgttgacaagcctattgaagtggatgaactgctggatagttccctggatccagagcccacccagagtaagctggtaaggcttgagccactgaccgaggctgaggcatccgaagcaacacttttctacctgtgtgaactagcccctgcacccctggactctgatatgccactgctcgacagctag

SEQ ID NO: 146942 - DNA, 1611 bp, Artificial Sequence
  derived and/or modified sequence
atgaaacaaagcagcaatgtgcctgctttcctttctaaactttggactttggtggaggagacgcacacgaatgagtttatcacctggtctcagaatggacaaagcttcctcgtgctggatgagcaaaggttcgcaaaggaaatcctgcccaagtattttaaacataataatatggctagcttcgtgagacaactgaatatgtatggattccgcaaagtggtccacattgactcaggtatagtcaagcaggagagagacggccctgtggagttccagcacccctacttcaaacaaggacaggacgacctgctggaaaacatcaaacgaaaggtgagttcctcaaaacccgaagagaacaaaattcgacaggaagatctgactaagattatttcgtctgcccagaaggtacagatcaaacaagagaccatcgagagcaggttatctgagttgaaaagtgaaaatgaatctctgtggaaagaggtgagtgagctgcgtgcaaaacacgctcagcagcagcaggtgatcagaaaaatagtgcaattcatcgtcacactcgtacagaataaccagttggtgtctctgaaacggaagcgccctcttctactcaatacgaacggcgctcagaaaaaaaatcttttccaacacatcgtaaaagagcccactgataatcatcaccataaagtcccccacagccgcaccgaaggcctcaagccacgggaaaggatcagcgacgacatcattatttatgacgtaaccgacgacaacgccgacgaggagaatattcccgttattccagagaccaatgaggacgtgatatccgatcccagtaactgctctcagtatcctgacatcgttatagtggaagatgataatgaggatgagtatgccccagtcatacagtccggagaacagaacgagcccgctagggaatccctttcctccggaagtgacggtagctcgcccctaatgtctagcgctgtccagctaaatggctcatcaagtctcacctctgaggaccctgtgacaatgatggactccatcctgaatgacaatatcaatctcctcggcaaggttgaactgctggactaccttgatagcatagactgcagtctggaggactttcaagcgatgctgagcggccgacagttctctatcgacccggatctgctcgtcgacttgtttacaagcagcgtccaaatgaaccctaccgattacataaataatacgaaatccgagaacaaaggactggagacaacgaaaaacaacgtggtacagcctgtcagtgaagaagggcgtaagtcaaaatccaaacctgataagcagctgatccagtacactgcatttcctcttctggcctttctcgacgggaatcctgccagtagtgtggaacaggcatctaccactgcatcgagcgaggtcctgtccagtgtggataagcccattgaagttgatgagttgctcgatagttcccttgatcctgaaccaacacaaagtaagctggtacgcttggaaccactcaccgaagctgaagcaagtgaagccacgctgttctatctttgcgagctggcacccgcacccctggattccgacatgcctcttcttgacagctag

SEQ ID NO: 146943 - DNA, 1611 bp, Artificial Sequence
  derived and/or modified sequence
atgaagcagagcagcaacgtgcccgccttcctgagcaagctgtggaccctggtggaggagacccacaccaacgagttcatcacctggagccagaacggccagagcttcctggtgctggacgagcagagattcgccaaggagatcctgcccaagtacttcaagcacaacaacatggccagcttcgtgagacagctgaacatgtacggcttcagaaaggtggtgcacatcgacagcggcatcgtgaagcaggagagagacggccccgtggagttccagcacccctacttcaagcagggccaggacgacctgctggagaacatcaagagaaaggtgagcagcagcaagcccgaggagaacaagatcagacaggaggacctgaccaagatcatcagcagcgcccagaaggtgcagatcaagcaggagaccatcgagagcagactgagcgagctgaagagcgagaacgagagcctgtggaaggaggtgagcgagctgagagccaagcacgcccagcagcagcaggtgatcagaaagatcgtgcagttcatcgtgaccctggtgcagaacaaccagctggtgagcctgaagagaaagagacccctgctgctgaacaccaacggcgcccagaagaagaacctgttccagcacatcgtgaaggagcccaccgacaaccaccaccacaaggtgccccacagcagaaccgagggcctgaagcccagagagagaatcagcgacgacatcatcatctacgacgtgaccgacgacaacgccgacgaggagaacatccccgtgatccccgagaccaacgaggacgtgatcagcgaccccagcaactgcagccagtaccccgacatcgtgatcgtggaggacgacaacgaggacgagtacgcccccgtgatccagagcggcgagcagaacgagcccgccagagagagcctgagcagcggcagcgacggcagcagccccctgatgagcagcgccgtgcagctgaacggcagcagcagcctgaccagcgaggaccccgtgaccatgatggacagcatcctgaacgacaacatcaacctgctgggcaaggtggagctgctggactacctggacagcatcgactgcagcctggaggacttccaggccatgctgagcggcagacagttcagcatcgaccccgacctgctggtggacctgttcaccagcagcgtgcagatgaaccccaccgactacatcaacaacaccaagagcgagaacaagggcctggagaccaccaagaacaacgtggtgcagcccgtgagcgaggagggcagaaagagcaagagcaagcccgacaagcagctgatccagtacaccgccttccccctgctggccttcctggacggcaaccccgccagcagcgtggagcaggccagcaccaccgccagcagcgaggtgctgagcagcgtggacaagcccatcgaggtggacgagctgctggacagcagcctggaccccgagcccacccagagcaagctggtgagactggagcccctgaccgaggccgaggccagcgaggccaccctgttctacctgtgcgagctggcccccgcccccctggacagcgacatgcccctgctggacagctag

SEQ ID NO: 146944 - protein, 280 aa, Artificial Sequence
  derived and/or modified sequence
MKFRAKIVDGACLNHFTRISNMIAKLAKTCTLRISPDKLNFILCDKLANGGVSMWCELEQENFFNEFQMEGVSAENNEIYLELTSENLSRALKTAQNARALKIKLTNKHFPCLTVSVELLSMSSSSRIVTHDIPIKVIPRKLWKDLQEPVVPDPDVSIYLPVLKTMKSVVEKMKNISNHLVIEANLDGELNLKIETELVCVTTHFKDLGNPPLASESTHEDRNVEHMAEVHIDIRKLLQFLAGQQVNPTKALCNIVNNKMVHFDLLHEDVSLQYFIPALS

SEQ ID NO: 146945 - protein, 259 aa, Artificial Sequence
  derived and/or modified sequence
MIAKLAKTCTLRISPDKLNFILCDKLANGGVSMWCELEQENFFNEFQMEGVSAENNEIYLELTSENLSRALKTAQNARALKIKLTNKHFPCLTVSVELLSMSSSSRIVTHDIPIKVIPRKLWKDLQEPVVPDPDVSIYLPVLKTMKSVVEKMKNISNHLVIEANLDGELNLKIETELVCVTTHFKDLGNPPLASESTHEDRNVEHMAEVHIDIRKLLQFLAGQQVNPTKALCNIVNNKMVHFDLLHEDVSLQYFIPALS

SEQ ID NO: 146946 - DNA, 843 bp, Artificial Sequence
  derived and/or modified sequence
atgaagttcagagccaagatcgtggacggcgcctgcctgaaccacttcaccagaatcagcaacatgatcgccaagctggccaagacctgcaccctgagaatcagccccgacaagctgaacttcatcctgtgcgacaagctggccaacggcggcgtgagcatgtggtgcgagctggagcaggagaacttcttcaacgagttccagatggagggcgtgagcgccgagaacaacgagatctacctggagctgaccagcgagaacctgagcagagccctgaagaccgcccagaacgccagagccctgaagatcaagctgaccaacaagcacttcccctgcctgaccgtgagcgtggagctgctgagcatgagcagcagcagcagaatcgtgacccacgacatccccatcaaggtgatccccagaaagctgtggaaggacctgcaggagcccgtggtgcccgaccccgacgtgagcatctacctgcccgtgctgaagaccatgaagagcgtggtggagaagatgaagaacatcagcaaccacctggtgatcgaggccaacctggacggcgagctgaacctgaagatcgagaccgagctggtgtgcgtgaccacccacttcaaggacctgggcaacccccccctggccagcgagagcacccacgaggacagaaacgtggagcacatggccgaggtgcacatcgacatcagaaagctgctgcagttcctggccggccagcaggtgaaccccaccaaggccctgtgcaacatcgtgaacaacaagatggtgcacttcgacctgctgcacgaggacgtgagcctgcagtacttcatccccgccctgagctag

SEQ ID NO: 146947 - DNA, 780 bp, Artificial Sequence
  derived and/or modified sequence
atgatcgccaagctggccaagacctgcaccctgagaatcagccccgacaagctgaacttcatcctgtgcgacaagctggccaacggcggcgtgagcatgtggtgcgagctggagcaggagaacttcttcaacgagttccagatggagggcgtgagcgccgagaacaacgagatctacctggagctgaccagcgagaacctgagcagagccctgaagaccgcccagaacgccagagccctgaagatcaagctgaccaacaagcacttcccctgcctgaccgtgagcgtggagctgctgagcatgagcagcagcagcagaatcgtgacccacgacatccccatcaaggtgatccccagaaagctgtggaaggacctgcaggagcccgtggtgcccgaccccgacgtgagcatctacctgcccgtgctgaagaccatgaagagcgtggtggagaagatgaagaacatcagcaaccacctggtgatcgaggccaacctggacggcgagctgaacctgaagatcgagaccgagctggtgtgcgtgaccacccacttcaaggacctgggcaacccccccctggccagcgagagcacccacgaggacagaaacgtggagcacatggccgaggtgcacatcgacatcagaaagctgctgcagttcctggccggccagcaggtgaaccccaccaaggccctgtgcaacatcgtgaacaacaagatggtgcacttcgacctgctgcacgaggacgtgagcctgcagtacttcatccccgccctgagctag

SEQ ID NO: 146948 - DNA, 843 bp, Artificial Sequence
  derived and/or modified sequence
atgaaatttcgcgcgaagatcgtggatggggcgtgcctgaatcacttcactcgcatatctaacatgatcgccaagctggcaaagacgtgtacgctgcgtatatctccagataaactgaacttcattctgtgcgataagctggccaatggcggcgttagtatgtggtgtgagctagagcaggaaaatttcttcaatgaattccagatggagggcgtctcagcggagaacaacgagatctacttagagctcacctctgagaacctgtcaagagccttaaagactgcccagaatgcacgagctctaaagattaagctcactaacaagcattttccatgtcttaccgtgtccgtcgagctcctctcaatgtcctcatcctcccgcatcgtgacacatgacatacctattaaagtgattccacgcaagctctggaaggaccttcaggagccagttgtgccagaccccgatgtttctatatacctcccagtgttaaagactatgaagagtgtagttgaaaagatgaagaatatttctaaccatttagttatcgaagccaacctcgatggcgaactcaaccttaagatcgaaaccgaacttgtgtgcgtgaccacacactttaaggacctgggcaatccacccctcgcctccgaaagtacacacgaagaccggaacgtggagcacatggccgaggttcacatcgatatccgaaagctgctccagtttctcgcagggcagcaggttaatcccaccaaggccctgtgcaatatcgtgaacaataagatggtccacttcgaccttctgcacgaagatgtgtcccttcagtattttattcccgcattgtcctag

SEQ ID NO: 146949 - DNA, 780 bp, Artificial Sequence
  derived and/or modified sequence
atgatcgccaaactggccaagacatgtactttgcgaatatccccagataaactcaacttcatactgtgcgataaacttgccaatggaggcgtgagcatgtggtgtgaactggaacaggagaatttcttcaatgagttccaaatggaaggggtgagcgctgagaataatgagatttatctcgagcttacctcagaaaatctcagtcgggctttaaagaccgctcagaacgcgagggcgttgaagatcaagctgacgaacaaacattttccatgtttgaccgtgagcgtcgaactgctatcaatgagttcatccagtcgtatagtgacccatgacatccccataaaagtcattcccagaaaactttggaaagacctccaggaacctgtcgtgcctgacccggacgttagtatctacctgcctgtactcaaaacaatgaagagtgttgtggagaagatgaagaacataagtaatcacctggtgattgaggccaacctggacggagaattgaatcttaagattgaaacagagcttgtctgcgtgactactcacttcaaggaccttggtaatcctccactcgcatcagagtctacccatgaggatagaaatgtggagcacatggcagaggtccacattgacattcggaagcttctgcagttccttgctgggcaacaggtgaaccctactaaagcgctatgcaacatcgttaacaataaaatggtccatttcgacctacttcacgaagacgtatccctccagtatttcattcctgctctgagttag

SEQ ID NO: 146950 - DNA, 843 bp, Artificial Sequence
  derived and/or modified sequence
atgaaattccgcgccaaaatcgtggacggagcctgtctcaaccatttcacccgcataagcaatatgatcgcaaaactagctaagacctgtaccctccggatctcacccgacaaactgaactttattctgtgtgacaaactggcaaacgggggggtctcgatgtggtgtgagctggaacaggaaaactttttcaatgagttccaaatggagggggtgagcgctgaaaacaatgagatatatcttgagctgaccagtgaaaatttgtcacgggcattgaagaccgcccaaaacgctcgggcattgaagattaagctgacaaacaagcattttccttgccttaccgtcagtgtcgaactcttgtctatgtcgtcctcctctcgcatcgtcactcacgatatccctatcaaggtgattccccggaagctctggaaggacctccaagaaccggtcgtacctgaccccgacgtgtccatctacttacctgttcttaagactatgaagtcagtggtggagaaaatgaagaacatatccaaccaccttgtcatcgaagccaatttggacggcgagcttaacctgaagattgagacagagttagtctgtgtcacgacccatttcaaagacctgggaaaccctccacttgcctccgaatctactcatgaggatcgcaatgtggagcatatggcagaggttcacattgatatccggaaactcctccaatttctggccgggcaacaagtgaaccccactaaggcactgtgtaacatcgttaacaataagatggtgcacttcgatctcctccatgaagacgtcagtctccagtacttcatacccgcgctttcttag

SEQ ID NO: 146951 - DNA, 780 bp, Artificial Sequence
  derived and/or modified sequence
atgatcgcaaagttggccaaaacttgcacactccgcatctcacccgataagttgaatttcatcctgtgcgacaagctcgccaatggcggggtttccatgtggtgcgaacttgagcaggagaacttctttaatgaattccagatggagggcgttagtgcggagaataatgaaatctacctggagcttacttctgagaacctgtcacgcgccctcaagacagcgcaaaatgccagggcactcaagattaagctgacaaataaacacttcccatgcttgactgttagcgtggagctcttgtctatgagcagctcatccaggatcgtgacccacgacataccaatcaaggtaatcccgaggaaactgtggaaggacttgcaggaacccgtggtccccgatcctgacgtgagcatctacctgcctgttctaaagaccatgaagtctgtggtcgagaaaatgaagaacataagcaatcatctcgttattgaggcaaacctggacggggaactgaacctcaagatagaaactgaattggtctgtgttacaactcactttaaagacctgggtaatccgcccctggctagcgagtcgactcacgaagaccgcaacgtagaacatatggcagaagtccatatcgatataaggaaattactccagttccttgcggggcagcaggtaaatcccactaaggcactctgcaacatagtgaacaacaagatggtccacttcgacctgctacatgaagacgtgtctctgcagtactttatccccgcactgtcctag

SEQ ID NO: 146952 - DNA, 2935 bp, Artificial Sequence
  derived and/or modified sequence
gccgcggctgcgccatccgcggccatgaagtttcgggccaagatcgtggacggggcctgtctgaaccacttcacacgaatcagtaacatgatagccaagcttgccaaaacctgcaccctccgcatcagccctgataagcttaacttcatcctttgtgacaagctggctaatggaggagtgagcatgtggtgtgagctggaacaggagaacttcttcaacgaatttcaaatggagggtgtctctgcagaaaacaatgagatttatttagagctaacatcggaaaacttatctcgagccttgaagactgcccagaatgccagggctttgaaaatcaaactgactaataaacactttccctgcctcacggtctccgtggagctgttatctatgtcaagcagtagccgcattgtgacccatgacatccccataaaggtgattcctaggaaattgtggaaggacttacaagaaccggtggtcccagatcctgatgttagtatttatttaccagtcttgaagactatgaagagtgttgtggaaaaaatgaaaaacatcagcaatcaccttgttattgaagcaaacctagatggagaattgaatttgaaaatagaaactgaattagtatgtgttacaactcattttaaagatcttggaaatcctccattagcctctgaaagcacccatgaggacagaaacgtggaacacatggctgaagtgcacatagatattaggaagctcctacagtttcttgctggacaacaagtaaatcccacaaaggccttatgcaatattgtgaataacaagatggtgcattttgatctgcttcatgaagacgtgtcccttcagtatttcatccctgcgctgtcctagcaccctgtcgctggagttggcatgcagagactttgtcaggatgggagaggccgcaggtgttgtgttctgatcactggtctgtgccctcacagcaccgcacatcgacacactgtacttatttgtccctctctaacattttaactaaaagttgattcaacaacacacagttggataaacatatcacttcatgttgctcatgtctgttttgctttgtttttaagacactgaaaagaaaagctagaatttatttattcagactttaaagaacaatttctcattgatgttgtgaaaatcgtcatgtatttagacttggtgtagtagccagaattcgtaaagctgttgcctgggagcttggtactttccctccaggcagaggctctagctcagcacggcctgtagcgcacagtcagtcttgcatttcagtgtgttcaccccgctgctcctgccccttggagcccagtgacagaaagaacagcctctgtcaccccgccgccactgccttggttactcagagcactgtggggtgtcacagctgcagcatttggagtctctctcttgctgaggactcaagcccacctgagtccactcccctcttgatgcctagagagctggcccagccaacacagctcttagctgggagctccttctgccattccaactagtttcttcctggggccagttttgggtttaggttgtaattccttatatttctttcttccacagtgtatcggatctgtcgttctggaaagaagacccttctatttagagtagaaacaaacgaaacttctaaggtatcatctgtgttaagtgatgagaccatatttctttgatgtttctgaacatcaaagctgattcagtactggtagatgtgctcattctccctgaaacatacccatcatatttcctattataattacatctcattgtcctgtggaggtggacatgataaacattatcttttgttttcttgttttgttttgtttgagacggtctcattctgtcacccagactggagtgcagtgccacaatcatggctcaccgcattgacctccttggctcaaggcatcctcccacctcagcttcctgactagctgggactactggtgtgcaccaccacacccagctaattttcaatttttcatagagacagggtctcactgtgttgtccaggctggtcttgaactcctgggctcaagccacccgcccacctgggcctcccaaagtgctgggattacaggcatcagccatcacacccatccataaacattatattaatgtcacattacaaaactgagacctaagttgcttaggataaaatgaaattggaagactagctaacatgaaaatttatattttggctttttcatgttttttgataaaaccagtgtatttgaatgattcttttgatgtttagtaatggttttttgtttgttttttggtttttttttttgagacggagtctcactctgtcgccagtctggagtgctagtggcgcgatcttggcttactgcagcctccacttcccaagttcaagcgattctcctgcctcagcctcccgagtagctgggactacaggcgcatgccaccacgcccggctaatttttgtatttttagtagagacggagtttcactgtgttggccaggatggtctcgatctcgacctcgtgatcacccaccttggcctctcaaagtgctgggattacaggcgtgagccaccacgcctggcctatgtttaataatgttgaaataggatggaatattttgttaaattaacattttaaaattagaagacaccgttttaatttttaaacccttcctcctctcattgtaacgaaattaattccagctgcagtgagaaaacttaaaaatcatgatacaaaatgaaacaatatctgaaagtagttttataaaactgaaattgctgttaaagagaatgtgttagtgacttaaccatttgctctatgtgatgtttattatcaaatacatataattttgaagattttaatgaatggcttaagattttatctttgtgtagaatgtggctaaagaaaccttagttgagattcaa

SEQ ID NO: 146953 - DNA, 1125 bp, Artificial Sequence
  derived and/or modified sequence
acagaggcccgccgcggctgcgccatccgcggccatgaagtttcgggccaagatcgtggacggggcctgtctgaaccacttcacacgtgagcagggaggccggagaggagcgagggaggaacggaaggaagcagtgagcgcgcggaatcagtaacatgatagccaagcttgccaaaacctgcaccctccgcatcagccctgataagcttaacttcatcctttgtgacaagctggctaatggaggagtgagcatgtggtgtgagctggaacaggagaacttcttcaacgaatttcaaatggagggtgtctctgcagaaaacaatgagatttatttagagctaacatcggaaaacttatctcgagccttgaagactgcccagaatgccagggctttgaaaatcaaactgactaataaacactttccctgcctcacggtctccgtggagctgttatctatgtcaagcagtagccgcattgtgacccatgacatccccataaaggtgattcctaggaaattgtggaaggacttacaagaaccggtggtcccagatcctgatgttagtatttatttaccagtcttgaagactatgaagagtgttgtggaaaaaatgaaaaacatcagcaatcaccttgttattgaagcaaacctagatggagaattgaatttgaaaatagaaactgaattagtatgtgttacaactcattttaaagatcttggaaatcctccattagcctctgaaagcacccatgaggacagaaacgtggaacacatggctgaagtgcacatagatattaggaagctcctacagtttcttgctggacaacaagtaaatcccacaaaggccttatgcaatattgtgaataacaagatggtgcattttgatctgcttcatgaagacgtgtcccttcagtatttcatccctgcgctgtcctagcaccctgtcgctggagttggcatgcagagactttgtcaggatgggagaggccgcaggtgttgtgttctgatcactggtctgtgccctcacagcaccgcacatcgacacactgtacttatttgtccctctctaacattttaactaaaagttgattcaacaacacacagttggataaacatatcacttcatg

SEQ ID NO: 146954 - DNA, 2121 bp, Artificial Sequence
  derived and/or modified sequence
ctcagggcgcgacgcttttctgttacccacagaggcccgccgcggctgcgccatccgcggccatgaagtttcgggccaagatcgtggacggggcctgtctgaaccacttcacacgaatcagtaacatgatagccaagcttgccaaaacctgcaccctccgcatcagccctgataagcttaacttcatcctttgtgacaagctggctaatggaggagtgagcatgtggtgtgagctggaacaggagaacttcttcaacgaatttcaaatggagggtgtctctgcagaaaacaatgagatttatttagagctaacatcggaaaacttatctcgagccttgaagactgcccagaatgccagggctttgaaaatcaaactgactaataaacactttccctgcctcacggtctccgtggagctgttatctatgtcaagcagtagccgcattgtgacccatgacatccccataaaggtgattcctaggaaattgtggaaggacttacaagaaccggtggtcccagatcctgatgttagtatttatttaccagtcttgaagactatgaagagtgttgtggaaaaaatgaaaaacatcagcaatcaccttgttattgaagcaaacctagatggagaattgaatttgaaaatagaaactgaattagtatgtgttacaactcattttaaagatcttggaaatcctccattagcctctgaaagcacccatgaggacagaaacgtggaacacatggctgaagtgcacatagatattaggaagctcctacagtttcttgctggacaacaagtaaatcccacaaaggccttatgcaatattgtgaataacaagatggtgcattttgatctgcttcatgaagacgtgtcccttcagtatttcatccctgcgctgtcctagcaccctgtcgctggagttggcatgcagagactttgtcaggatgggagaggccgcaggtgttgtgttctgatcactggtctgtgccctcacagcaccgcacatcgacacactgtacttatttgtccctctctaacattttaactaaaagttgattcaacaacacacagttggataaacatatcacttcatgttgctcatgtctgttttgctttgtttttaagacactgaaaagaaaagctagaatttatttattcagactttaaagaacaatttctcattgatgttgtgaaaatcgtcatgtatttagacttggtgtagtagccagaattcgtaaagctgttgcctgggagcttggtactttccctccaggcagaggctctagctcagcacggcctgtagcgcacagtcagtcttgcatttcagtgtgttcaccccgctgctcctgccccttggagcccagtgacagaaagaacagcctctgtcaccccgccgccactgccttggttactcagagcactgtggggtgtcacagctgcagcatttggagtctctctcttgctgaggactcaagcccacctgagtccactcccctcttgatgcctagagagctggcccagccaacacagctcttagctgggagctccttctgccattccaactagtttcttcctggggccagttttgggtttaggttgtaattccttatatttctttcttccacagtgtatcggatctgtcgttctggaaagaagacccttctatttagagtagaaacaaacgaaacttctaaggtatcatctgtgttaagtgatgagaccatatttctttgatgtttctgaacatcaaagctgattcagtactggtagatgtgctcattctccctgaaacatacccatcatatttcctattataattacatctcattgtcctgtggaggtggacatgataaacattatcttttgttttcttgttttgttttgtttgagacggtctcattctgtcacccagactggagtgcagtgccacaatcatggctcaccgcattgacctccttggctcaaggcatcctcccacctcagcttcctgactagctgggactactggtgtgcaccaccacacccagctaattttcaatttttcatagagacagggtctcactgtgttgtccaggagttggagaccagcctggccaacatggtgaaaccacgtctctact

SEQ ID NO: 146955 - DNA, 1304 bp, Artificial Sequence
  derived and/or modified sequence
acagaggcccgccgcggctgcgccatccgcggccatgaagtttcgggccaagatcgtggacggggcctgtctgaaccacttcacacgtgagcagggaggccggagaggagcgagggaggaacggaaggaagcagtgagcgcgcggaatcagtaacatgatagccaagcttgccaaaacctgcaccctccgcatcagccctgataagcttaacttcatcctttgtgacaagctggctaatggaggagtgagcatgtggtgtgagctggaacaggagaacttcttcaacgaatttcaaatggagggtgtctctgcagaaaacaatgagatttatttagagctaacatcggaaaacttatctcgagccttgaagactgcccagaatgccagggctttgaaaatcaaactgactaataaacactttccctgcctcacggtctccgtggagctgttatctatgtcaagcagtagccgcattgtgacccatgacatccccataaaggtgattcctaggaaattgtggaaggacttacaagaaccggtggtcccagatcctgatgttagtatttatttaccagtcttgaagactatgaagagtgttgtggaaaaaatgaaaaacatcagcaatcaccttgttattgaagcaaacctagatggagaattgaatttgaaaatagaaactgaattagtatgtgttacaactcattttaaagatcttggaaatcctccattagcctctgaaagcacccatgaggacagaaacgtggaacacatggctgaagtgcacatagatattaggaagctcctacagtttcttgctggacaacaagtaaatcccacaaaggccttatgcaatattgtgaataacaagatggtgcattttgatctgcttcatgaagacgtgtcccttcagtatttcatccctgcgctgtcctagcaccctgtcgctggagttggcatgcagagactttgtcaggatgggagaggccgcagtgtatcggatctgtcgttctggaaagaagacccttctatttagagtagaaacaaacgaaacttctaaggtatcatctgtgttaagtgatgagaccatatttctttgatgtttctgaacatcaaagctgattcagtactggtagatgtgctcattctccctgaaacatacccatcatatttcctattataattacatctcattgtcctgtggaggtggacatgataaacattatcttttgttttcttgttttgttttgtttgagacggtctcattctgtcacccagactggagtgcagtgccacaatcatggct

SEQ ID NO: 146956 - DNA, 843 bp, Artificial Sequence
  derived and/or modified sequence
atgaagttccgggccaagatcgtggatggagcctgcctgaaccacttcacccgcatcagcaacatgattgccaagctggccaagacctgcaccctgcgcatcagcccagacaagctgaacttcatcctgtgtgacaagctggccaatggaggagtgtccatgtggtgtgagctggagcaggagaacttcttcaatgagttccagatggagggcgtgtctgcagaaaataatgagatctacctggagctgaccagcgagaacctgagccgggccctgaagacagcccagaatgcccgggccctgaagatcaagctgaccaacaagcacttcccctgcctgactgtgtctgtggagctgctgtccatgagcagcagcagccgcatcgtgacccatgacatccccatcaaggtgatccccaggaagctgtggaaggacctgcaggagcctgtggtgcctgaccctgatgtgtccatctacctgcctgtgctgaagaccatgaagtctgtggtggagaagatgaagaacatcagcaaccacctggtgattgaggccaacctggatggagagctgaacctgaagattgaaacagagctggtgtgtgtgaccacccacttcaaggacctgggcaacccccccctggccagcgagagcacccatgaggacagaaatgtggagcacatggccgaggtgcacatcgacatcaggaagctgctgcagttcctggccggccagcaggtgaaccccaccaaggccctgtgcaacatcgtgaacaacaagatggtgcactttgacctgctgcatgaagatgtgtccctgcagtacttcatcccagccctgtcctag

SEQ ID NO: 146957 - DNA, 780 bp, Artificial Sequence
  derived and/or modified sequence
atgattgccaagctggccaagacctgcaccctgcgcatcagcccagacaagctgaacttcatcctgtgtgacaagctggccaacggcggcgtgtccatgtggtgtgagctggagcaggagaacttcttcaatgagttccagatggagggcgtgtctgctgagaacaatgagatctacctggagctgaccagcgagaacctgagccgggccctgaagacagcccagaatgcccgggccctgaagatcaagctgaccaacaagcacttcccctgcctgactgtgtctgtggagctgctgtccatgagcagcagcagcagaattgtgacccatgacatccccatcaaggtgatccccaggaagctgtggaaggacctgcaggagcctgtggtgcctgaccctgatgtgtccatctacctgcctgtgctgaagaccatgaagtctgtggtggagaagatgaagaacatcagcaaccacctggtgattgaggccaacctggatggagagctgaacctgaagattgaaacagagctggtgtgtgtgaccacccacttcaaggacctgggcaacccccccctggccagcgagagcacccatgaagatagaaatgtggagcacatggccgaggtgcacatcgacatcaggaagctgctgcagttcctggccggccagcaggtgaaccccaccaaggccctgtgcaacatcgtgaacaacaagatggtgcactttgacctgctgcatgaagatgtgtccctgcagtacttcatcccagccctgtcctag

SEQ ID NO: 146958 - DNA, 843 bp, Artificial Sequence
  derived and/or modified sequence
atgaagttccgggccaagatcgtggacggcgcctgcctgaaccacttcactagaatcagcaatatgattgccaagctggccaagacatgtactcttagaatcagccctgataagcttaactttattctgtgtgataaacttgccaatggcggggtaagtatgtggtgcgaattggagcaggaaaacttctttaatgagttccagatggagggtgtgtcagccgaaaataacgagatctatctggaactgacatccgaaaacttatctagagctctgaagacagcacaaaatgccagagccctgaagataaaactgacgaacaaacactttccttgcctgacagtcagcgtcgaactcctttccatgtctagttccagccgaatagtgacgcacgacataccaatcaaggtgatcccacggaaactatggaaggatctacaagagcccgtagtgccagaccccgatgtctctatttatctaccggttctcaagacgatgaagagcgtggttgagaaaatgaaaaacatctccaatcacttagtgattgaagccaatttggacggtgagctaaatctgaaaattgaaaccgagcttgtgtgtgtgactactcattttaaggatttaggtaacccacctctagcgagcgagtccacacacgaagatagaaacgtagagcatatggctgaagtacacatagatatcaggaagttgctccaattccttgcaggccaacaggtgaatcctaccaaggctctgtgcaacattgtcaacaataaaatggtccatttcgacctcctacacgaggacgtatctttacagtattttattcctgcgttgagctag

SEQ ID NO: 146959 - DNA, 780 bp, Artificial Sequence
  derived and/or modified sequence
atgatcgccaagctggccaagacctgcaccctgcggatcagccccgataaactcaatttcatcctttgtgataaactagccaatgggggtgtgtccatgtggtgcgaattggagcaagaaaatttctttaacgagtttcagatggagggcgtgtccgccgaaaacaacgaaatttatctggaactgacctctgagaatttaagccgagcgctgaagacagctcagaatgcaagggctctgaagatcaagctcacaaacaaacatttcccatgcttgactgttagcgtcgagctgcttagtatgagctcctctagtaggatcgtaacacatgatatcccaatcaaggtaattcctcgcaaattatggaaggacctgcaggagccagttgtgcctgatcccgacgtgtccatttatctacctgtgctaaaaaccatgaagtcagtggtagagaagatgaagaatatttcgaaccacctggtgattgaagcaaacctcgacggcgagctcaacttgaagatcgaaactgagttggtatgtgtgaccacgcactttaaggatctcggtaatcctccattagcctcagagtctacacacgaagaccggaatgtagagcacatggccgaggtgcacattgacattcgcaaactcctgcagtttttagctgggcagcaggtgaaccctaccaaggctctatgcaacattgttaataacaagatggtgcacttcgacttactccacgaagacgttagcttacagtacttcattcccgcactaagctag

SEQ ID NO: 146960 - DNA, 843 bp, Artificial Sequence
  derived and/or modified sequence
atgaagttccgggccaagatcgtggacggcgcctgcctgaaccactttactaggatctctaatatgatcgccaagcttgcaaagacctgtaccctaagaatcagcccagacaagctcaattttattctgtgcgataagctagctaacgggggggtcagtatgtggtgtgaacttgagcaggagaactttttcaatgaatttcagatggagggagtgtctgctgaaaacaacgagatctacttggagctgacgtcagaaaacctgtccagggccctgaaaactgcacagaacgcgcgcgctttgaaaatcaagttaacaaataaacactttccctgtctgacagtatcagtggaacttcttagtatgagctcaagttctcggatcgtaactcacgatattccgatcaaggtgattccccggaagctgtggaaggatctacaggagcccgtcgtccccgacccagatgtttctatctacctgccagtcttgaaaacaatgaaatcagttgttgagaagatgaaaaacattagtaaccacttagttatcgaggcaaacctggacggcgaattaaatctgaagatcgagacagaactggtgtgtgttactactcactttaaggacctcgggaatccaccactggcctctgagtccacacacgaggaccgaaatgtagagcatatggctgaggttcatatcgacattcgcaaactcctgcagttcctggctggacagcaggtaaatcctaccaaggccctctgcaatatcgttaataataagatggtgcacttcgacctcctgcatgaggatgtaagcctgcagtatttcattcctgcactgagctag

SEQ ID NO: 146961 - DNA, 780 bp, Artificial Sequence
  derived and/or modified sequence
atgatcgccaagctggccaagacctgcaccctgcggatcagccccgacaaactcaactttatcctgtgcgacaagctcgctaatggcggggtgtcaatgtggtgtgaactggaacaggagaactttttcaacgaattccagatggagggcgtttcggccgagaataatgagatttatctggagctaacttccgagaacctgtctagagcacttaagactgcgcagaacgcccgtgctcttaagattaaactgacaaacaagcacttcccatgtctgacagtctctgtggaactcttgagtatgtccagctcctcgcgcatcgtgacccacgacatcccaattaaagtaatacctcggaagctgtggaaagatttgcaggaaccagtagtcccggaccctgacgtgtccatttatctccccgtgctgaagaccatgaaaagcgtggtggaaaagatgaagaatatatcaaaccatctcgtaattgaagccaatctggatggagaattaaacctcaagatcgaaacggaactcgtgtgcgtgaccacccactttaaagaccttggtaatcccccactggcctccgagtcgacccacgaagataggaatgtggaacacatggcagaagtccacatcgacatccgcaagctgcttcaattcctggccggtcaacaagtaaatcccacaaaggctttgtgtaatattgtaaataataaaatggtgcacttcgacttactccatgaggatgtgtctctgcagtactttatcccagctctgagctag

SEQ ID NO: 146962 - DNA, 843 bp, Artificial Sequence
  derived and/or modified sequence
atgaagttccgcgctaagattgtggacggcgcttgccttaaccacttcacccggatctctaatatgatcgccaagctggccaaaacctgcactctccgtatcagcccagataaactgaattttatcttatgcgacaagctcgccaacggcggagtttccatgtggtgcgagttggagcaggaaaactttttcaacgagttccagatggaaggggttagcgccgagaataatgagatttaccttgagttaaccagtgagaatctgagcagagcattaaaaacagcacagaacgcgagggcactcaagattaagctaactaataagcattttccatgtctgaccgtgagcgtggagctactcagcatgtcctccagctccagaatcgtaacgcacgacattccaattaaagttataccacgcaaactctggaaggatctacaggaacctgtggtgccagatccagatgtctcaatctacctgccagtactgaaaaccatgaaatccgtcgttgagaagatgaagaatatttccaatcacttggttatcgaagcaaacctcgacggggagctgaacctgaagattgagacggaactggtgtgtgtgacaacccactttaaggacctcggcaatccaccgcttgcctcagaaagtacacatgaggaccgaaacgtggagcacatggccgaagttcacatcgatattcgcaaactgctccagttcctggcagggcaacaagttaatcccacgaaggctctgtgcaatatagttaataataagatggtccattttgacctccttcacgaagacgttagtttacagtattttatcccagccctttcatag

SEQ ID NO: 146963 - DNA, 780 bp, Artificial Sequence
  derived and/or modified sequence
atgatcgctaagttggcaaaaacctgcaccttgcgcatctcaccggacaagctgaattttatcctctgtgacaaactcgcgaatggaggagtgtctatgtggtgtgagcttgagcaggagaactttttcaatgaatttcagatggaaggcgttagcgcagagaataatgagatctaccttgaattaaccagcgagaatctgtctagagctctgaaaacagcccagaacgctagggctttgaagattaaactcacgaacaaacacttcccgtgtttaactgtgtcagtggaactgctgtctatgagtagctcgagccgcattgtcacccacgacatccctattaaagttatccctcgaaaactctggaaagatcttcaagagccagtagtccctgatccagacgttagcatttacctgcctgtgctgaagactatgaagagcgtcgtggaaaagatgaagaacatctccaatcacttggtcattgaagcaaatttggatggcgagctgaacctgaagatcgagactgagctcgtgtgcgtaaccacacatttcaaggatctcggtaatccaccactggctagcgagtcaacacatgaagatcggaacgtagagcacatggccgaggtgcacatagatattcgcaaattgttgcagttcttagccggacagcaggttaatcccacaaaagcactctgtaatattgtcaataacaaaatggttcatttcgacttactgcacgaagatgtatcccttcaatactttatccctgccctctcgtag

SEQ ID NO: 146964 - DNA, 843 bp, Artificial Sequence
  derived and/or modified sequence
atgaaatttcgggcaaagatcgttgatggggcatgcctgaatcactttacacgcataagtaatatgattgccaagctggccaagacatgcaccctaaggatctctccagataaactcaatttcattttgtgcgataagctggctaatggaggggtgagcatgtggtgtgaattagaacaggagaatttttttaacgagttccagatggagggcgtgtcagccgagaacaacgagatctacttggagctcacctccgaaaatctgagcagggccctgaagaccgcccagaatgcacgggctctcaagatcaaactaacaaataaacattttccgtgtctgacagtgagcgtcgaattgctgagcatgtcctcgagttcacggatagtgacgcacgatattcctatcaaggtgattccgagaaaactgtggaaagatttgcaggagcctgtggtgcctgatcccgacgtgtcaatttacttgccggtgttaaaaaccatgaagtcggttgtagagaagatgaaaaatatctccaatcaccttgtgattgaagcaaacctggacggagagctcaacttaaagattgaaacggagctggtttgcgtgacgacacactttaaggatctcgggaacccaccacttgccagtgaatccacccatgaggaccgaaacgtagaacacatggccgaggtgcatattgatatacggaaattacttcaattcctggccggtcagcaggtaaatcctacgaaggctttgtgtaatatcgtaaacaacaaaatggtccattttgatttacttcatgaagacgtgagcctacagtatttcatacccgcactgagctag

SEQ ID NO: 146965 - DNA, 780 bp, Artificial Sequence
  derived and/or modified sequence
atgatcgctaagctggctaaaacatgtacactgcggattagccctgacaagctgaacttcatcttgtgtgacaaactggcaaatgggggtgtcagtatgtggtgcgaattggagcaggagaatttctttaacgaatttcagatggaaggtgtctctgctgaaaataatgagatatacctcgagctgactagcgaaaacctgtcccgagccctgaagaccgctcaaaatgcacgggctttgaaaatcaaattgactaacaagcattttccctgccttaccgttagtgtggagctgctttcgatgtcctcatcctcaaggatcgtaacgcacgatattcctattaaggtaataccccgaaagctctggaaagatctccaggagccagtcgtaccggaccccgacgtctccatctacctgcctgtgcttaagaccatgaaatccgtcgtcgagaaaatgaagaacatctctaaccacctcgtgatcgaggccaacctcgatggcgaactgaatctgaaaattgagacggaactggtatgcgttacgacccatttcaaagaccttggcaatccccctctggccagcgagagtacgcacgaggacagaaacgtcgagcacatggcggaggtccacattgatattcgcaagctcctccaattcctggcaggccagcaagtgaatccaactaaagctctctgcaatatagtgaacaacaagatggtgcactttgacctcctacacgaggacgtgtccctacaatattttatccctgctctgtcctag

SEQ ID NO: 146966 - DNA, 756 bp, Artificial Sequence
  derived and/or modified sequence
atgcccgagatcagagacaacagccccgagcccaacgaccccgaggagccccaggaggtgagcagcacccccagcgacaagaagggcaagaagagaaagagatgcatctggagcacccccaagagaagacacaagaagaagagcctgcccggcgagatcatcgacggcaccagcgagatgaacgagggcaagagaagccagaagacccccagcacccccagaagagtgacccagggcgccgccagccccggccacggcatccaggagaagctgcaggtggtggacaaggtgacccagagaaaggacgacagcacctggaacagcgaggtgatgatgagagtgcagaaggccagaaccaagtgcgccagaaagagcagactgaaggagaagaagaaggagaaggacatctgcagcagcagcaagagaagattccagaagaacatccacagaagaggcaagcccaagagcgacaccgtggacttccactgcagcaagctgcccgtgacctgcggcgaggccaagggcatcctgtacaagaagaagatgaagcacggcagcagcgtgaagtgcatcagaaacgaggacggcacctggctgacccccaacgagttcgaggtggagggcaagggcagaaacgccaagaactggaagagaaacatcagatgcgagggcatgaccctgggcgagctgctgaagagcggcctgctgctgtgcccccccagaatcaacctgaagagagagctgaacagcaagtag

SEQ ID NO: 146967 - DNA, 306 bp, Artificial Sequence
  derived and/or modified sequence
atgttcaccatgaccagagccatggaggaggccctgttccagcacttcatgcaccagaagctgggcatcgcctacgccatccacaagcccttccccttcttcgagggcctgctggacaacagcatcatcaccaagagaatgtacatggagagcctggaggcctgcagaaacctgatccccgtgagcagagtggtgcacaacatcctgacccagctggagagaaccttcaacctgagcctgctggtgaccctgttcagccagatcaacctgagagagtaccccaacctggtgaccatctacagatag

SEQ ID NO: 146968 - DNA, 756 bp, Artificial Sequence
  derived and/or modified sequence
atgcccgagataagggacaactctcccgagccgaacgatcccgaagaaccacaggaggtctcctcaacgccctcggacaagaaaggcaagaagcgaaaaagatgcatttggtctacccctaaacggcgccataagaaaaagtccctacctggagaaataatcgacggaactagcgagatgaatgagggaaagcggtcacagaaaacccccagtactccacgcagggtgacgcagggtgcagcatctcctggtcacggaatccaggaaaagttgcaggtcgtggacaaggttactcagagaaaggacgactctacctggaactccgaggtaatgatgcgcgtgcagaaagccagaaccaaatgtgccaggaagtcaagactcaaggaaaaaaaaaaagagaaggatatttgctcatcttctaagcggcggttccaaaagaacatccaccggcgcggtaaacctaagtccgatactgttgacttccattgctccaagctgcccgttacgtgtggtgaggctaagggcatcctctacaaaaagaagatgaagcatgggagctcagtgaaatgcattagaaatgaagacggcacctggctgaccccgaacgagtttgaagtggaaggtaagggacggaacgcaaagaactggaagcgcaatattaggtgtgaagggatgacattgggagagttgctcaagagcggcctgctgctatgtcccccccggatcaaccttaaacgggaactgaattcgaagtag

SEQ ID NO: 146969 - DNA, 306 bp, Artificial Sequence
  derived and/or modified sequence
atgtttacaatgactcgtgcgatggaggaagctctctttcaacatttcatgcatcagaagttaggtatcgcctacgctatccataagcccttcccattctttgagggacttctcgataacagtatcatcaccaaaaggatgtacatggagagccttgaagcttgtcggaacctgataccggtgtctcgggtggttcataacattctgactcagcttgaacggacctttaaccttagtctactggtgaccctgttctcccagataaatttacgagaataccctaatttggtaactatttataggtag

SEQ ID NO: 146970 - DNA, 756 bp, Artificial Sequence
  derived and/or modified sequence
atgcctgagatccgggacaacagccctgagcccaatgaccctgaggagccccaggaggtgagcagcacccccagcgacaagaagggcaagaagaggaagcgctgcatctggagcacccccaagaggaggcacaagaagaagagcctgcccggggagatcattgatggcaccagcgagatgaatgaaggcaagaggagccagaagacccccagcaccccccggcgggtgacccagggcgccgccagccctggccacggcatccaggagaagctgcaggtggtggacaaggtgacccagaggaaggatgacagcacctggaacagcgaggtgatgatgagggtgcagaaggcccggaccaagtgtgccaggaagagccggctgaaggagaagaagaaggagaaggacatctgcagcagcagcaagaggcgcttccagaagaacatccaccggcggggcaagcccaagagtgacacagtggacttccactgcagcaagctgcctgtgacctgtggggaggccaagggcatcctgtacaagaagaagatgaagcacggcagctctgtgaagtgcatcagaaatgaagatggcacctggctgaccccaaatgaatttgaggtggagggcaaaggaagaaatgccaagaactggaagaggaacatccgctgtgagggcatgaccctgggggagctgctgaagagcggcctgctgctgtgccccccacgcatcaacctgaagcgggagctgaacagcaagtag

SEQ ID NO: 146971 - DNA, 306 bp, Artificial Sequence
  derived and/or modified sequence
atgttcaccatgacccgggccatggaggaggccctcttccagcacttcatgcaccagaagctgggcatcgcctatgccatccacaagcccttccccttctttgagggcctgctggacaacagcatcatcaccaagaggatgtacatggagagcctggaggcctgcaggaacctgatccctgtgtcccgggtggtgcacaacatcctgacccagctggagaggaccttcaacctgagcctgctggtgaccctcttcagccagatcaacctgcgggagtaccccaacctggtgaccatctacagatag

SEQ ID NO: 146972 - DNA, 756 bp, Artificial Sequence
  derived and/or modified sequence
atgcccgagatccgggacaacagccccgagcccaacgaccccgaggagccacaggaggtgtcctcaacgccaagtgataaaaaaggcaagaaaagaaaaaggtgcatatggtcgacgccgaagcggaggcacaagaaaaaatcgctgccaggcgaaattatcgatggtaccagtgagatgaacgaaggaaaaaggagtcagaaaacacccagcacaccaagaagagtaacgcagggcgctgcctcgccgggacatggcatccaggaaaagctgcaagtcgtggacaaagtgactcagcgaaaggacgacagcacttggaacagtgaagtaatgatgcgagtgcagaaagcacgcaccaaatgtgcacggaagagcagattgaaagagaagaaaaaggaaaaagatatttgctctagctccaaacggcggttccaaaaaaatatccatcggcgtggaaaaccaaaatctgacaccgttgattttcattgcagcaagctaccggtcacctgcggagaagcgaagggtattttatataagaagaagatgaaacatggctcctctgtgaagtgcatcaggaacgaagacggcacctggttaaccccaaacgagttcgaagtggaggggaaagggcgcaacgctaagaactggaaaaggaacatcagatgtgagggcatgacactgggagaactgctcaaaagtggcctgctgctctgtccacccagaatcaaccttaagagagagctgaactccaaatag

SEQ ID NO: 146973 - DNA, 306 bp, Artificial Sequence
  derived and/or modified sequence
atgttcaccatgacccgggccatggaggaggccctgttccagcactttatgcaccaaaaactggggatcgcctacgccattcataaacccttcccttttttcgaggggctgctggacaactcaattattaccaagcgaatgtacatggaatctctggaggcttgccgcaatctcattcccgtttctcgtgtggtccataacattttgacccaactcgagaggacatttaatctgagtttactggtgactctattcagtcagatcaacctccgagaatatcccaatctcgtcactatatacagatag

SEQ ID NO: 146974 - DNA, 756 bp, Artificial Sequence
  derived and/or modified sequence
atgccagagatccgcgacaatagcccggagccgaacgacccagaggagcctcaggaagtcagctccaccccttctgataaaaaaggaaagaaacgaaagaggtgcatatggtccacacccaaacggcgacataaaaaaaagtctctgcctggagagataatcgacgggacatcagagatgaatgagggaaaacgtagccaaaagaccccaagcactcccagacgcgtgacacagggggctgcatcacccggacacgggatacaggaaaaactccaagtcgtggacaaagtaacacaacgtaaagatgacagcacctggaattcagaagtgatgatgcgagtgcaaaaggccagaaccaaatgcgcaagaaagagcaggctgaaggagaagaagaaagagaaggatatttgctcctcttctaaacgaaggtttcagaagaatattcatcggcgagggaagcctaagtctgatacggtggacttccactgcagcaaactgccagtgacctgtggggaagccaaggggatcctctataagaaaaagatgaaacatggcagcagtgttaaatgcatcaggaacgaagacggcacctggctgacccccaatgagtttgaggtggagggtaaagggagaaacgccaagaactggaagcgcaacatccgctgcgagggcatgactcttggagaacttctgaagagcggtttactcttgtgtccaccgcgtatcaaccttaaaagggagctgaattccaaatag

SEQ ID NO: 146975 - DNA, 306 bp, Artificial Sequence
  derived and/or modified sequence
atgttcaccatgactagggctatggaagaggccctgttccaacactttatgcaccagaagctaggaatcgcttacgccatccataagccctttcctttttttgagggcttgctcgataactctatcatcactaagcgcatgtacatggaaagcctagaggcttgcaggaacctcatcccagtgagcagggtggtgcataatatactgacacagcttgaacgtaccttcaatttgagcttgcttgtgactctgttctctcagattaacctcagagaatatccaaatctcgtgaccatttatagatag

SEQ ID NO: 146976 - protein, 328 aa, Artificial Sequence
  derived and/or modified sequence
MAAAAAALSGAGTPPAGGGAGGGGAGGGGSPPGGWAVARLEGREFEYLMKKRSVTIGRNSSQGSVDVSMGHSSFISRRHLEIFTPPGGGGHGGAAPELPPAQPRPDAGGDFYLRCLGKNGVFVDGVFQRRGAPPLQLPRVCTFRFPSTNIKITFTALSSEKREKQEASESPVKAVQPHISPLTINIPDTMAHLISPLPSPTGTISAANSCPSSPRGAGSSGYKVGRVMPSDLNLMADNSQPENEKEASGGDSPKDDSKPPYSYAQLIVQAITMAPDKQLTLNGIYTHITKNYPYYRTADKGWQRGESFAHVGNTRIRIGLPAHKAPQR

SEQ ID NO: 146977 - protein, 660 aa, Artificial Sequence
  derived and/or modified sequence
MAAAAAALSGAGTPPAGGGAGGGGAGGGGSPPGGWAVARLEGREFEYLMKKRSVTIGRNSSQGSVDVSMGHSSFISRRHLEIFTPPGGGGHGGAAPELPPAQPRPDAGGDFYLRCLGKNGVFVDGVFQRRGAPPLQLPRVCTFRFPSTNIKITFTALSSEKREKQEASESPVKAVQPHISPLTINIPDTMAHLISPLPSPTGTISAANSCPSSPRGAGSSGYKVGRVMPSDLNLMADNSQPENEKEASGGDSPKDDSKPPYSYAQLIVQAITMAPDKQLTLNGIYTHITKNYPYYRTADKGWQNSIRHNLSLNRYFIKVPRSQEEPGKGSFWRIDPASESKLIEQAFRKRRPRGVPCFRTPLGPLSSRSAPASPNHAGVLSAHSSGAQTPESLSREGSPAPLEPEPGAAQPKLAVIQEARFAQSAPGSPLSSQPVLITVQRQLPQAIKPVTYTVATPVTTSTSQPPVVQTVHVVHQIPAVSVTSVAGLAPANTYTVSGQAVVTPAAVLAPPKAEAQENGDHREVKVKVEPIPAIGHATLGTASRIIQTAQTTPVQTVTIVQQAPLGQHQLPIKTVTQNGTHVASVPTAVHGQVNNAAASPLHMLATHASASASLPTKRHNGDQPEQPELKRIKTEDGEGIVIALSVDTPPAAVREKGVQN

SEQ ID NO: 146978 - protein, 610 aa, Artificial Sequence
  derived and/or modified sequence
MAAARRALGAGTPRARGRGRGAGGGGSRRALGRGAPGGPRVRVSDEEALGDHRPQLVAGLGGREHGPLELHLPAPPRDLHAPGRRGHGGAAPELPPAQPRPDAGGDFYLRCLGKNGVFVDGVFQRRGAPPLQLPRVCTFRFPSTNIKITFTALSSEKREKQEASESPVKAVQPHISPLTINIPDTMAHLISPLPSPTGTISAANSCPSSPRGAGSSGYKVGRVMPSDLNLMADNSQPENEKEASGGDSPKDDSKPPYSYAQLIVQAITMAPDKQLTLNGIYTHITKNYPYYRTADKGWQNSIRHNLSLNRYFIKVPRSQEEPGKGSFWRIDPASESKLIEQAFRKRRPRGVPCFRTPLGPLSSRSAPASPNHAGVLSAHSSGAQTPESLSREGSPAPLEPEPGAAQPKLAVIQEARFAQSAPGSPLSSQPVLITVQRQLPQAIKPVTYTVATPVTTSTSQPPVVQTVHVVHQIPAVSVTSVAGLAPANTYTVSGQAVVTPAAVLAPPKAEAQENGDHREVKVKVEPIPAIGHATLGTASRIIQTAQTTPVQTVTIVQQAPLGQHQLPIKTVTQNGTHVASVPTAVHGQVNNGPLGLRRPPCASSDWSCLS

SEQ ID NO: 146979 - DNA, 5262 bp, Artificial Sequence
  derived and/or modified sequence
ccgcgcgtgctcccgcccctcgccgccgctcgctcgctcgccggccggcggcctccgctcggccccctccctcagctccggtgcgcggcggccgacgacccgcgcggcctgggcctcggcccgcgccaccggcgcccgcgcggagcggcccgggggccctcacgcaggcccatggcggcggccgcggcggcgctctcgggcgcgggcacgccacccgcgggcggcggggccgggggcggcggggccgggggcggcgggtccccgccgggcggctgggccgtggcgcgcctggagggccgcgagttcgagtatctgatgaagaagcgctcggtgaccatcggccgcaactcgtcgcagggctcggtggacgtgagcatgggccactcgagcttcatctcccggcgccacctcgagatcttcacgcccccgggcggcggcggccatggcggggccgctccggagctgccgcccgcgcagcccaggcccgacgccggcggcgacttctacctgcgctgcttgggcaagaacggggtattcgtggacggcgtgttccagaggcgcggggcgccgccgctgcagctgccgcgcgtgtgcacattcaggttcccgagcacaaacatcaagataacgttcactgccctgtccagcgagaagagagagaagcaggaggcgtctgagtctccagtgaaggccgtacagccacacatctcgcccctgaccatcaacattccagacaccatggcccacctcatcagccctctgccctcccccacgggaaccatcagcgctgcaaactcctgcccctccagcccccggggagcggggtcttcagggtacaaggtgggccgagtgatgccatctgacctcaatttaatggctgacaactcacagcctgaaaatgaaaaggaagcttcaggtggagacagcccgaaggatgattcaaagccgccttactcctacgcgcagctgatagttcaggcgattacgatggctcccgacaaacagctcaccctgaacgggatttatacacacatcactaaaaattatccctactacaggactgcggacaagggctggcagaattcaattcgccacaatctctctctgaatcgttatttcatcaaagtgccgcgttcccaggaagaaccaggcaaaggctcgttctggaggatagacccagcctctgaaagcaaattaatagaacaggcttttaggaaacgacggcctaggggcgtgccctgctttagaacccctctgggaccgctctcttctaggagtgccccagcctctcccaatcacgcgggagtgctgtctgctcactctagtggcgcccagacccctgagagcctgtcgagggaaggttcgccggcccccctggagcctgagcctggcgctgcacagcccaaactcgctgtcatccaggaagcccggtttgcccagagcgccccagggtcacctctgtccagtcagccagtcttaatcaccgtccagcggcagctaccacaggccatcaagcctgtcacctacactgtggccaccccagtgaccacctcgacctcccagccacccgtcgtgcagacggttcacgtcgtccaccagatcccagcggtgtcggtcaccagtgtggccggactggccccagcgaacacgtacactgtctctggacaagctgtggtcaccccggcagccgtgctggcccctcctaaggcagaggcccaggagaatggagaccacagggaagtcaaagtgaaagtagagcctattcccgccattggccacgccacgctcggcactgccagccggatcattcagacggcacagaccaccccggtccagacggtgaccatagtacaacaggcacctctaggtcaacaccagctaccaataaaaactgtaacacaaaacggcactcacgtggcatcagtccccactgcggtccacggccaggtgaacaatgccgcggcgagtcctttgcacatgttggcaacacacgcatccgcatcggcctccctgcccacaaagcgccacaacggtgaccagccggagcagccggagctgaagcggatcaagacagaagacggcgagggcatcgtcattgccctgagcgtggacacgccaccggcagccgtaagggaaaagggtgtccagaactagcgaccgggagagcttttctttaacgatatcaactctgtggtgccaaaaggagacgcggcctcccgccagcactcgggggtgcagggccctgtggttggacttcacctctcagcactgaaaacccaaaacccagctggccttaacactccttaaagacagaagtcacacttgaacaaaacccacacacaacaaaacctgatttgggagacggtgtctccactgagcacctgctgggctgagcttctacctacgagtgaaactctgtcctcccgcgaggaccaggcatcgctgtgtgaggacggcacggccagcgcctgctgtgagtgggtctcccaagactaggcctcaggacgcggggggagccatccccgccgccctcacaggacccaccaggcagcggagacatgtggaattagagtattttgaggtgtcctttctttacaaaataatggggtcttgggcatttcacatcactccatttctactgagactttcagaatcacacaggccctttccgtggatttcatttggggcaaagaaacaacgtagttttgtttttgttttcagcctatggaatgatttccttttgtctgtcttgttcaagttcagacgaagctactctggcatctgcacatttccgtgttacagcagctgcctgatgaattttatccacctccatttcagcatgtggctcgcgtggacaggtggacggacgctgtggccgcatggaaccttgagaacccagggacgagccagtgccgggaaggaactgccgggactcaccgagctgcacttaactgttctctttctggctattttttgttgtttgtttctttgtgttgactttgtccctggcaaaattttccactctgagtaaaacaagtctcctaagtattgtgtatgtttaaaacgacagaaccatttctacttcatttggaaaaagattcagtcttttatcacaggcccttttgaaactcagatcccaggtctctccgtggtatgtttgtatttggggtgtccctccggctctaggcggcctctgacctgctgtctactccccaccttcggtgagcggccgccatggtggagcagggtccgagccacgtcctgcagggcacgtctggggcatttcctgttttgtggtaggaaatgtccctgacctttcagaaccgaacccaatcctgaggctgactcctctacggaaaatgaggacaggacgggggtgagggaatgagagtgggaggtccctgcacctcctcgcccggctcctcaggaagaaaaccgctggcccttcccgagtgtgccggccgagggccgagggccgtgcacatggggagagggcgtcagcctgatggctgagcttttaaatgtcatcatcataacattatttatttaaatgtagttattttggtatttaatttttttttagagaggaaaaaacctgtattttcctggtgggatgaaatagggatgaaatggctcagaatggtatatttaggcaattttaaaacatttattatttacataaagaccaaatatgatgaatctgttccgtgaattgtgtcggccctcagcatggggctggggcagcgtcactgcggtgacgcccattgaaaggtatgaaatgactgcacactagctggattatcactcagccgtttaagaaataaaagcaaaaccatcacgtgactgagaccgtgtgtgtgaccgcagcaaagcgcagcgtgtggatggatcagagcccctcggtgcagctgtctgcatcttccaagcactttacagataccttggaatgtatatttttgtcttcttactcagaaggtttgcagtttgtaaaataatcaggattctgctctgtcctgtgtgtggggtcagctccctccacagagggctccagctctgttggtcacagctgatggggttctctgattgataggagacgagctcttgagctctaaggaacagtgaggtcgccggtggggagcttggctgggacaccaagcaaatgcatcgtatgtccccttggagacgtttttatgcagctgtgtatgttactatccagaaggagtcgggggtagactttcccgtgtaagctcagtccataaactggttacttctgatcctggaacgtggacttcacatgataggtctggatctgtttctgttgggatcacaggtaaggaaaatgtccattcaaatggtaaagaagggaggagggtgttttttttttttttttttgccgtaggcaccattctgcatcttgaacccagactgaagtgtgcctctcacagatggaaggtgcacacgctcctgtctcctcctcactctgccacgttcacttggctttttcattggtacctaggaatttaagaatatcgaagcgagagcagtaacaaaccatagatgagcagactcccacaccgggttttcttgcccgtctttaaggcactgtttctaaattttgaacttagctctgaatccccaagaacttgagcacagcaagggttgctgagctgctgtcgccgcagccctggcccctggtgctggagctgcagcacctttgggagaggtcctgcgtcgtcctcagctgcgtcgctgtgaactcccgctctccactgtgttcctcagtgtctgcttttcaggaagtctgctgtgacctttgcccaacttctgagctcctcagggactaggaacaatttcagtagctttgccctgaaccaaacgagaaaacaaaagggaactcccgtatgacccacgtcacgtggtgcactcagagtgtgtgcggcatgatcctcggttgctcctcctctcactttagtagagtacgcggtggacagctgatctccttcagtcgtctacccacttccgtcattgtcctccgctagaataacagagtagttggtagtcatggccagaaggggggtgggggcagtgtgaggacttggggtttctgtgctgtgtgacacaaggagataagtgacaatcttgaagtcctaacttccactattctagaaagtatagtggtgatttgtgtgcaaagatttgaagttttaaaaaagtaccaagttcctgaaattcaataaaatatttttattaattttaatggaa

SEQ ID NO: 146980 - DNA, 5265 bp, Artificial Sequence
  derived and/or modified sequence
cggccgcgcgtgctcccgcccctcgccgccgctcgctcgctcgccggccggcggcctccgctcggccccctccctcagctccggtgcgcggcggccgacgacccgcgcggcctgggcctcggcccgcgccaccggcgcccgcgcggagcggcccgggggccctcacgcaggcccatggcggcggccgcggcggcgctctcgggcgcgggcacgccacccgcgggcggcggggccgggggcggcggggccgggggcggcgggtccccgccgggcggctgggccgtggcgcgcctggagggccgcgagttcgagtatctgatgaagaagcgctcggtgaccatcggccgcaactcgtcgcagggctcggtggacgtgagcatgggccactcgagcttcatctcccggcgccacctcgagatcttcacgcccccgggcggcggcggccatggcggggccgctccggagctgccgcccgcgcagcccaggcccgacgccggcggcgacttctacctgcgctgcttgggcaagaacggggtattcgtggacggcgtgttccagaggcgcggggcgccgccgctgcagctgccgcgcgtgtgcacattcaggttcccgagcacaaacatcaagataacgttcactgccctgtccagcgagaagagagagaagcaggaggcgtctgagtctccagtgaaggccgtacagccacacatctcgcccctgaccatcaacattccagacaccatggcccacctcatcagccctctgccctcccccacgggaaccatcagcgctgcaaactcctgcccctccagcccccggggagcggggtcttcagggtacaaggtgggccgagtgatgccatctgacctcaatttaatggctgacaactcacagcctgaaaatgaaaaggaagcttcaggtggagacagcccgaaggatgattcaaagccgccttactcctacgcgcagctgatagttcaggcgattacgatggctcccgacaaacagctcaccctgaacgggatttatacacacatcactaaaaattatccctactacaggactgcggacaagggctggcagaattcaattcgccacaatctctctctgaatcgttatttcatcaaagtgccgcgttcccaggaagaaccaggcaaaggctcgttctggaggatagacccagcctctgaaagcaaattaatagaacaggcttttaggaaacgacggcctaggggcgtgccctgctttagaacccctctgggaccgctctcttctaggagtgccccagcctctcccaatcacgcgggagtgctgtctgctcactctagtggcgcccagacccctgagagcctgtcgagggaaggttcgccggcccccctggagcctgagcctggcgctgcacagcccaaactcgctgtcatccaggaagcccggtttgcccagagcgccccagggtcacctctgtccagtcagccagtcttaatcaccgtccagcggcagctaccacaggccatcaagcctgtcacctacactgtggccaccccagtgaccacctcgacctcccagccacccgtcgtgcagacggttcacgtcgtccaccagatcccagcggtgtcggtcaccagtgtggccggactggccccagcgaacacgtacactgtctctggacaagctgtggtcaccccggcagccgtgctggcccctcctaaggcagaggcccaggagaatggagaccacagggaagtcaaagtgaaagtagagcctattcccgccattggccacgccacgctcggcactgccagccggatcattcagacggcacagaccaccccggtccagacggtgaccatagtacaacaggcacctctaggtcaacaccagctaccaataaaaactgtaacacaaaacggcactcacgtggcatcagtccccactgcggtccacggccaggtgaacaatgccgcggcgagtcctttgcacatgttggcaacacacgcatccgcatcggcctccctgcccacaaagcgccacaacggtgaccagccggagcagccggagctgaagcggatcaagacagaagacggcgagggcatcgtcattgccctgagcgtggacacgccaccggcagccgtaagggaaaagggtgtccagaactagcgaccgggagagcttttctttaacgatatcaactctgtggtgccaaaaggagacgcggcctcccgccagcactcgggggtgcagggccctgtggttggacttcacctctcagcactgaaaacccaaaacccagctggccttaacactccttaaagacagaagtcacacttgaacaaaacccacacacaacaaaacctgatttgggagacggtgtctccactgagcacctgctgggctgagcttctacctacgagtgaaactctgtcctcccgcgaggaccaggcatcgctgtgtgaggacggcacggccagcgcctgctgtgagtgggtctcccaagactaggcctcaggacgcggggggagccatccccgccgccctcacaggacccaccaggcagcggagacatgtggaattagagtattttgaggtgtcctttctttacaaaataatggggtcttgggcatttcacatcactccatttctactgagactttcagaatcacacaggccctttccgtggatttcatttggggcaaagaaacaacgtagttttgtttttgttttcagcctatggaatgatttccttttgtctgtcttgttcaagttcagacgaagctactctggcatctgcacatttccgtgttacagcagctgcctgatgaattttatccacctccatttcagcatgtggctcgcgtggacaggtggacggacgctgtggccgcatggaaccttgagaacccagggacgagccagtgccgggaaggaactgccgggactcaccgagctgcacttaactgttctctttctggctattttttgttgtttgtttctttgtgttgactttgtccctggcaaaattttccactctgagtaaaacaagtctcctaagtattgtgtatgtttaaaacgacagaaccatttctacttcatttggaaaaagattcagtcttttatcacaggcccttttgaaactcagatcccaggtctctccgtggtatgtttgtatttggggtgtccctccggctctaggcggcctctgacctgctgtctactccccaccttcggtgagcggccgccatggtggagcagggtccgagccacgtcctgcagggcacgtctggggcatttcctgttttgtggtaggaaatgtccctgacctttcagaaccgaacccaatcctgaggctgactcctctacggaaaatgaggacaggacgggggtgagggaatgagagtgggaggtccctgcacctcctcgcccggctcctcaggaagaaaaccgctggcccttcccgagtgtgccggccgagggccgagggccgtgcacatggggagagggcgtcagcctgatggctgagcttttaaatgtcatcatcataacattatttatttaaatgtagttattttggtatttaatttttttttagagaggaaaaaacctgtattttcctggtgggatgaaatagggatgaaatggctcagaatggtatatttaggcaattttaaaacatttattatttacataaagaccaaatatgatgaatctgttccgtgaattgtgtcggccctcagcatggggctggggcagcgtcactgcggtgacgcccattgaaaggtatgaaatgactgcacactagctggattatcactcagccgtttaagaaataaaagcaaaaccatcacgtgactgagaccgtgtgtgtgaccgcagcaaagcgcagcgtgtggatggatcagagcccctcggtgcagctgtctgcatcttccaagcactttacagataccttggaatgtatatttttgtcttcttactcagaaggtttgcagtttgtaaaataatcaggattctgctctgtcctgtgtgtggggtcagctccctccacagagggctccagctctgttggtcacagctgatggggttctctgattgataggagacgagctcttgagctctaaggaacagtgaggtcgccggtggggagcttggctgggacaccaagcaaatgcatcgtatgtccccttggagacgtttttatgcagctgtgtatgttactatccagaaggagtcgggggtagactttcccgtgtaagctcagtccataaactggttacttctgatcctggaacgtggacttcacatgataggtctggatctgtttctgttgggatcacaggtaaggaaaatgtccattcaaatggtaaagaagggaggagggtgttttttttttttttttttgccgtaggcaccattctgcatcttgaacccagactgaagtgtgcctctcacagatggaaggtgcacacgctcctgtctcctcctcactctgccacgttcacttggctttttcattggtacctaggaatttaagaatatcgaagcgagagcagtaacaaaccatagatgagcagactcccacaccgggttttcttgcccgtctttaaggcactgtttctaaattttgaacttagctctgaatccccaagaacttgagcacagcaagggttgctgagctgctgtcgccgcagccctggcccctggtgctggagctgcagcacctttgggagaggtcctgcgtcgtcctcagctgcgtcgctgtgaactcccgctctccactgtgttcctcagtgtctgcttttcaggaagtctgctgtgacctttgcccaacttctgagctcctcagggactaggaacaatttcagtagctttgccctgaaccaaacgagaaaacaaaagggaactcccgtatgacccacgtcacgtggtgcactcagagtgtgtgcggcatgatcctcggttgctcctcctctcactttagtagagtacgcggtggacagctgatctccttcagtcgtctacccacttccgtcattgtcctccgctagaataacagagtagttggtagtcatggccagaaggggggtgggggcagtgtgaggacttggggtttctgtgctgtgtgacacaaggagataagtgacaatcttgaagtcctaacttccactattctagaaagtatagtggtgatttgtgtgcaaagatttgaagttttaaaaaagtaccaagttcctgaaattcaataaaatatttttattaattttaatggaa

SEQ ID NO: 146981 - DNA, 3450 bp, Artificial Sequence
  derived and/or modified sequence
cgcggccgcgcgtgctcccgcccctcgccgccgctcgctcgctcgccggccggcggcctccgctcggccccctccctcagctccggtgcgcggcggccgacgacccgcgcggcctgggcctcggcccgcgccaccggcgcccgcgcggagcggcccgggggccctcacgcaggcccatggcggcggcccggcgggctctcggggcgggcacgccgcgggcgcggggccgggggcggggggccgggggcggcgggtcccgccgggcgctgggccgtggcgcgcctggagggccgcgagttcgagtatctgatgaagaagcgctcggtgaccatcggccgcaactcgtcgcagggctcggtggacgtgagcatgggccactcgagcttcatctcccggcgccacctcgagatcttcacgcccccgggcggcggggccatggcggggccgctccggagctgccgcccgcgcagcccaggcccgacgccggcggcgacttctacctgcgctgcttgggcaagaacggggtattcgtggacggcgtgttccagaggcgcggggcgccgccgctgcagctgccgcgcgtgtgcacattcaggttcccgagcacaaacatcaagataacgttcactgccctgtccagcgagaagagagagaagcaggaggcgtctgagtctccagtgaaggccgtacagccacacatctcgcccctgaccatcaacattccagacaccatggcccacctcatcagccctctgccctcccccacgggaaccatcagcgctgcaaactcctgcccctccagcccccggggagcggggtcttcagggtacaaggtgggccgagtgatgccatctgacctcaatttaatggctgacaactcacagcctgaaaatgaaaaggaagcttcaggtggagacagcccgaaggatgattcaaagccgccttactcctacgcgcagctgatagttcaggcgattacgatggctcccgacaaacagctcaccctgaacgggatttatacacacatcactaaaaattatccctactacaggactgcggacaagggctggcagaattcaattcgccacaatctctctctgaatcgttatttcatcaaagtgccgcgttcccaggaagaaccaggcaaaggctcgttctggaggatagacccagcctctgaaagcaaattaatagaacaggcttttaggaaacgacggcctaggggcgtgccctgctttagaacccctctgggaccgctctcttctaggagtgccccagcctctcccaatcacgcgggagtgctgtctgctcactctagtggcgcccagacccctgagagcctgtcgagggaaggttcgccggcccccctggagcctgagcctggcgctgcacagcccaaactcgctgtcatccaggaagcccggtttgcccagagcgccccagggtcacctctgtccagtcagccagtcttaatcaccgtccagcggcagctaccacaggccatcaagcctgtcacctacactgtggccaccccagtgaccacctcgacctcccagccacccgtcgtgcagacggttcacgtcgtccaccagatcccagcggtgtcggtcaccagtgtggccggactggccccagcgaacacgtacactgtctctggacaagctgtggtcaccccggcagccgtgctggcccctcctaaggcagaggcccaggagaatggagaccacagggaagtcaaagtgaaagtagagcctattcccgccattggccacgccacgctcggcactgccagccggatcattcagacggcacagaccaccccggtccagacggtgaccatagtacaacaggcacctctaggtcaacaccagctaccaataaaaactgtaacacaaaacggcactcacgtggcatcagtccccactgcggtccacggccaggtgaacaatgggccccttggcctcagaaggcccccatgtgccagctcagactggagttgcctcagttgacacagcaggccccatccagacagaccagcaggtgcttctggagacaagagcaaagccttttccggcagcccggaacctgggatgagaaacgacaggtggaaggttgtccagagacacctacagcgtggatgctgttccgagtcagcgtaggagaaaggccactggaaaccagagtcacactgcgcgtctgtgcatctctggcctaccgcagtggccccggctgtctgcacattttttgtagacacattagagtcggttgaggccacacctgcggccacagactgcgaccgcgattgcagggaggagcatctgaggtggtcacggggtttgcccagctcacaccaactgcagccgcggcgagtcctttgcacatgttggcaacacacgcatccgcatcggcctccctgcccacaaagcgccacaacggtgaccagccggagcagccggagctgaagcggatcaagacagaagacggcgagggcatcgtcattgccctgagcgtggacacgccaccggcagccgtaagggaaaagggtgtccagaactagcgaccgggagagcttttctttaacgatatcaactctgtggtgccaaaaggagacgcggcctcccgccagcactcgggggtgcagggccctgtggttggacttcacctctcagcactgaaaacccaaaacccagctggccttaacactccttaaagacagaagtcacacttgaacaaaacccacacacaacaaaacctgatttgggagacggtgtctccactgagcacctgctgggctgagcttctacctacgagtgaaactctgtcctcccgcgaggaccaggcatcgctgtgtgaggacggcacggccagcgcctgctgtgagtgggtctcccaagactaggcctcaggacgcggggggagccatccccgccgccctcacaggacccaccaggcagcggagacatgtggaattagagtattttgaggtgtcctttctttacaaaataatggggtcttgggcatttcacatcactccatttctactgagactttcagaatcacacaggccctttccgtggatttcatttggggcaaagaaacaacgtagttttgtttttgttttcagcctatggaatgatttccttttgtctgtcttgttcaagttcagacgaagctactctggcatctgcacatttccgtgttacagcagctgcctgatgaattttatccacctccatttcagcatgtggctcgcgtggacaggtggacggacgctgtggccgcatggaaccttgagaacccagggacgagccagtgccgggaaggaactgccgggactcaccgagctgcacttaactgttctctttctggctattttttgttgtttgtttctttgtgttgactttgtccctggcaaaattttccactctgagtaaaacaagtctcctaagt

SEQ ID NO: 146982 - DNA, 1983 bp, Artificial Sequence
  derived and/or modified sequence
atggccgcagctgcggctgctctctcaggggcgggcacacctcccgccggcggcggtgctggaggaggcggtgcgggcggcggcggttccccacccggtggttgggccgtagctagactggaaggaagagaattcgaatatctgatgaagaaacgaagtgtaacaataggcagaaacagcagtcagggcagtgtggacgtgagcatgggacattcaagttttatatctaggagacatcttgaaatttttacaccccctggaggaggcggtcatggtggagccgctccagaactgccaccagcgcagcctcgccccgacgctggtggcgatttctaccttcgttgtctcgggaaaaacggggtgtttgtcgatggcgtatttcagcggcgtggagctccacccttacagctgccaagagtatgtacattcaggttcccatctactaatatcaagataacttttaccgcgttgtcttccgaaaagcgagagaagcaggaggctagtgaatctcctgttaaagcagtgcagccccatatctcaccgctgaccataaacatccccgatacaatggcccacctcatttctccacttccttcccctaccgggactatttcggcagcaaactcctgccccagcagccctcgcggggccggctccagtggatataaggtagggcgggtcatgcccagcgacctgaatctcatggctgataattcccagcctgaaaacgaaaaggaagctagcggtggagacagccctaaggacgactcaaagccaccttactcttacgctcagttgatcgtgcaggccatcaccatggcccctgacaaacagctgactttaaatgggatatatactcatattactaaaaattacccatactaccggacggctgacaagggctggcagaactccatcaggcacaatttaagtttaaatcgatatttcattaaagttcctcggtctcaggaagaacccggcaaggggtcattctggcgcattgaccccgcgagcgaaagcaagctcatcgaacaagcctttcggaagcggcggcccaggggcgtgccctgcttccgaactcccctaggtcccctctcatccagatctgcacctgcgagcccaaaccacgcaggggtgctctccgcccatagcagcggagcacagacgccagaatctctttccagggagggtagccctgcaccgttggaaccagagcccggggccgctcagcctaaactggcagtgatccaggaggctcgattcgctcagtccgctcccggaagcccgttgagcagccagcctgttttgataacggttcagcgacagcttccgcaggccatcaagcccgttacatacaccgtcgccacccccgtgaccactagtaccagccagccccccgttgtgcaaacagtgcatgtggttcatcagattcctgctgtttcggttacatccgtggccggattggccccagcaaacacatacacagtaagtgggcaagccgtggtgacccctgcggccgtcctcgctcctcctaaagcagaagcacaggaaaatggagatcaccgcgaggtgaaggtgaaagtggagcccattcctgccattggtcatgcaaccctcggcacggcatctaggatcattcaaactgcccagacgacccccgtgcagactgtcaccatcgtccagcaggcccccctggggcagcaccagctgcctatcaaaaccgtgacacagaacggtacacacgtcgcatctgtgcctaccgccgttcacggccaggtaaataacgcggctgcctcccccctgcatatgcttgccactcatgcctcggcaagcgcctccctgcccaccaaacggcacaacggcgatcagccagagcagccagagctgaagcgcattaagactgaggatggggagggcattgtcattgctctgtcagttgatactcctccagccgctgtgcgcgaaaagggcgtccagaactag

SEQ ID NO: 146983 - DNA, 1833 bp, Artificial Sequence
  derived and/or modified sequence
atggctgccgcccgtcgcgcgctcggcgcaggaacgccccgtgcaaggggtcgaggtagaggcgctggcggtggcggatcccgtcgcgccctcgggcgcggggcacccggaggcccgcgcgtacgtgtttctgatgaggaggcgcttggcgaccatagacctcagctggtggcaggactgggcggacgagagcacggcccgctcgagctgcatttgcccgcccctccccgtgacctgcacgcccccggcagaaggggccacggcggggcggctcccgagttgccacctgcccagcccaggcctgatgccggcggcgatttctacttgagatgcctcggcaaaaatggagtgtttgtggatggggtttttcagcgtaggggtgccccgccgctgcaacttccccgcgtgtgtacgttccgctttccaagcactaacatcaagatcaccttcacagccctttcttctgaaaagcgggaaaaacaggaggctagcgaaagtcccgtgaaggccgtccagcctcacatctcgcctctgacaatcaacatcccggatacaatggcccacctaatctccccattacccagcccaacggggaccatcagcgctgctaattcatgcccttcatcaccaaggggcgctggttcttccggatacaaggtcggccgtgtcatgccttcggatctgaatctcatggccgataattcccagcccgagaatgaaaaagaggctagtggtggtgatagccctaaagacgacagtaaacccccctacagctacgcccaactgattgttcaggcgattacaatggccccagacaagcaacttaccctgaacggtatctatacacacattacaaaaaattatccttactacagaacagccgacaagggttggcaaaactcaattcgacataatctcagcttgaataggtacttcattaaggttccgaggagccaagaagagcccggtaaaggcagcttctggcgaatcgatcccgccagcgaaagtaagcttatcgaacaggcttttagaaagaggaggcctcgaggcgtcccttgcttccgcacccctctcgggccactgtcctcccgaagcgctcccgcctccccgaaccacgcgggcgtgctgtctgcgcattcgagtggggcacagacaccagaaagcttgagccgggaaggctctccggccccactggaacccgaaccaggtgcggcccaacctaaactggcagttatacaggaggctaggtttgcacaatcagcccctgggtcaccgctgtcctctcaaccagtgctaattaccgtgcagaggcagctgccgcaggctataaagcccgtgacctacactgtagctaccccggtaactacttcaacgagtcagccaccagtggttcaaactgtgcatgtcgtacaccaaatccctgcggtgagcgtaacttctgtagctggcctggcccccgcaaatacatataccgtgagcggccaggctgtggtaacccctgcagctgtgttagcccctcctaaggccgaggcacaggagaacggtgatcatcgcgaagttaaagtaaaggtggaacctatccccgcaatcggccacgcgactctcggtaccgctagcaggattattcagaccgctcagacaactcccgtgcagacagtgaccatcgttcagcaagccccactaggtcagcaccagctcccgatcaagaccgtcacccagaacggtacacacgttgctagcgtgccgaccgccgtgcacggccaggtgaataacggaccgctgggtctccgtcgtcccccatgcgcatcctcagattggtcttgcctgagctag

SEQ ID NO: 146984 - DNA, 1983 bp, Artificial Sequence
  derived and/or modified sequence
atggctgctgctgctgctgccctgtctggagctggcaccccacctgctgggggcggggccggcggcggcggggccggcggcggcggcagccccccaggcggctgggccgtggcccggctggagggccgggagtttgagtacctgatgaagaagaggtctgtgaccatcggcaggaacagcagccagggctctgtggatgtgtccatgggccacagcagcttcatcagcagaagacacctggagatcttcaccccacctgggggcggcggccatggaggagctgcccctgagctgcccccagcccagcccaggccagatgctggaggagacttctacctgcgctgcctgggcaagaatggagtgtttgtggatggagtcttccagaggagaggagccccacccctgcagctgccccgggtgtgcaccttccgcttccccagcaccaacatcaagatcaccttcaccgccctgagcagcgagaagcgggagaagcaggaggccagcgagagccctgtgaaggctgtgcagccccacatcagccccctgaccatcaacatcccagacaccatggcccacctgatcagccccctgcccagccccaccggcaccatctctgctgccaacagctgccccagcagccccagaggagctggcagcagcggctacaaggtgggccgggtgatgcccagcgacctgaacctgatggctgacaacagccagccagaaaatgagaaggaggccagcggcggggacagccccaaggatgacagcaagccaccctacagctatgcccagctgattgtgcaggccatcaccatggccccagacaagcagctgaccctgaatggcatctacacccacatcaccaagaactacccctactacagaacagctgacaagggctggcagaacagcatccgccacaacctgagcctgaaccgctacttcatcaaggtgcccaggagccaggaggagcccgggaagggcagcttctggagaattgatcctgccagcgagagcaagctgattgagcaggccttcaggaagaggcggccccggggcgtgccctgcttccgcacccccctgggccccctgagcagccgcagcgccccagccagccccaaccacgccggcgtgctgagcgcccacagcagcggggcccagaccccagagagcctgagccgggagggcagccctgcccccctggagcctgagcccggggccgcccagcccaagctggccgtcatccaggaggccaggtttgcccagagcgcccctggcagccccctgagcagccagcctgtgctgatcaccgtgcagaggcagctgccccaggccatcaagcctgtgacctacacagtggccacccctgtgaccaccagcaccagccagccccctgtggtgcagacagtgcacgtggtgcaccagatcccagctgtgtctgtgacctctgtggccggcctggccccagccaacacctacacagtgtctggccaggccgtggtgaccccagctgctgtgctggccccacccaaggccgaggcccaggagaatggagaccaccgggaggtgaaggtgaaggtggagcccatcccagccatcggccacgccaccctgggcacagccagccgcatcatccagacagcccagaccacccctgtgcagacagtgaccatcgtgcagcaggcccccctgggccagcaccagctgcccatcaagacagtgacccagaatggcacccacgtggcctctgtgcccacagctgtgcacggccaggtgaacaatgctgctgccagccccctgcacatgctggccacccacgccagcgccagcgccagcctgcccaccaagaggcacaacggggaccagcctgagcagcctgagctgaagaggatcaagacagaagatggagagggcatcgtcatcgccctgtctgtggacaccccacctgctgctgtgcgggagaagggcgtgcagaactag

SEQ ID NO: 146985 - DNA, 1833 bp, Artificial Sequence
  derived and/or modified sequence
atggctgctgcccggcgggccctgggcgccggcaccccccgggcccggggccggggccgcggggccggcggcggcggcagccggcgggccctgggccgcggggcccctgggggcccccgggtgcgggtgtctgatgaggaggccctgggggaccaccggccccagctggtggccggcctgggcggccgggagcacggccccctggagctgcacctgcctgccccaccccgggacctgcacgcccctggccggcggggccatggaggagctgcccctgagctgcccccagcccagcccaggccagatgctggaggagacttctacctgcgctgcctgggcaagaatggagtgtttgtggatggagtcttccagaggagaggagccccacccctgcagctgccccgggtgtgcaccttccgcttccccagcaccaacatcaagatcaccttcaccgccctgagcagcgagaagcgggagaagcaggaggccagcgagagccctgtgaaggctgtgcagccccacatcagccccctgaccatcaacatcccagacaccatggcccacctgatcagccccctgcccagccccaccggcaccatctctgctgccaacagctgccccagcagccccagaggagctggcagcagcggctacaaggtgggccgggtgatgcccagcgacctgaacctgatggctgacaacagccagccagaaaatgagaaggaggccagcggcggggacagccccaaggatgacagcaagccaccctacagctatgcccagctgattgtgcaggccatcaccatggccccagacaagcagctgaccctgaatggcatctacacccacatcaccaagaactacccctactacagaacagctgacaagggctggcagaacagcatccgccacaacctgagcctgaaccgctacttcatcaaggtgcccaggagccaggaggagcccgggaagggcagcttctggagaattgatcctgccagcgagagcaagctgattgagcaggccttcaggaagaggcggccccggggcgtgccctgcttccgcacccccctgggccccctgagcagccgcagcgccccagccagccccaaccacgccggcgtgctgagcgcccacagcagcggggcccagaccccagagagcctgagccgggagggcagccctgcccccctggagcctgagcccggggccgcccagcccaagctggccgtcatccaggaggccaggtttgcccagagcgcccctggcagccccctgagcagccagcctgtgctgatcaccgtgcagaggcagctgccccaggccatcaagcctgtgacctacacagtggccacccctgtgaccaccagcaccagccagccccctgtggtgcagacagtgcacgtggtgcaccagatcccagctgtgtctgtgacctctgtggccggcctggccccagccaacacctacacagtgtctggccaggccgtggtgaccccagctgctgtgctggccccacccaaggccgaggcccaggagaatggagaccaccgggaggtgaaggtgaaggtggagcccatcccagccatcggccacgccaccctgggcacagccagccgcatcatccagacagcccagaccacccctgtgcagacagtgaccatcgtgcagcaggcccccctgggccagcaccagctgcccatcaagacagtgacccagaatggcacccacgtggcctctgtgcccacagctgtgcacggccaggtgaacaacggccccctgggcctgcggcggcccccctgtgccagcagtgactggagctgcctgtcctag

SEQ ID NO: 146986 - DNA, 1983 bp, Artificial Sequence
  derived and/or modified sequence
atggccgccgccgccgccgccctgagcggcgccggcaccccccccgccggcggtggagcaggaggagggggtgccgggggcggcggttcgcctcctggaggctgggcagttgcgaggctggaaggcagagaattcgaatacctgatgaaaaaacggagtgtgactataggcagaaattcttcccagggaagcgtggatgtgtccatgggtcactcctctttcatcagcagaaggcatcttgagatctttaccccccctggtggagggggacatgggggtgctgccccagaactgccacccgcgcagcctcgtccagatgctgggggagacttttatctcaggtgcttaggaaaaaatggcgttttcgtcgatggcgtgtttcagagaaggggcgcccccccccttcagttgccacgggtatgtaccttcagattccccagcacgaatattaagatcaccttcactgccctgtcatcagaaaagagagagaagcaggaggcatcggagagccctgttaaggccgtgcagccgcatattagccctctcacaatcaacatccccgacacaatggcgcacctgattagcccccttccctctcctactggtaccatcagcgcagccaacagctgcccatcatcgcctaggggtgccggcagcagcggatacaaagtaggccgggtgatgccctctgaccttaacctcatggcagataacagccagcctgaaaacgagaaagaggcttccgggggcgactcccccaaagatgactccaagccaccgtactcttatgctcagctcattgtgcaagccattacaatggcacctgacaagcaattgaccttaaatggaatctatacccacatcacgaaaaactatccatactataggacagccgacaagggctggcagaacagtatcaggcacaatctgtctctgaatcggtattttatcaaggtcccccgaagtcaggaggagccaggcaaaggcagtttttggcggatcgacccagcatctgagtccaaactgattgagcaggcatttcgtaagcggaggccccggggtgtgccttgttttagaacccccctgggccctctcagttctaggtcagcccccgcatcacccaatcatgcgggcgttctctcagcccatagttccggggcccagacaccagagtctctgagccgggaggggtcgccagcccctcttgagcccgagcctggagctgctcagcctaagttggcagtaattcaggaagcacgcttcgcccagagcgctcctggcagcccactgtctagccaacccgtgcttatcactgtacagaggcaactgccacaagccattaaacctgtcacctacaccgtggccactcctgttaccacttccacatctcagcctcctgtggtccagaccgttcacgtggtccatcagatccccgcggttagtgtaacatccgtagccggactcgcgcctgcaaacacctacaccgtcagcggccaggctgttgttacacccgccgcagtccttgcccctcctaaagccgaagctcaggagaacggtgatcacagggaggtgaaagtgaaagtagagcccatccctgccatcgggcacgcaactctcggtactgcttcccggattatacagaccgcccagactacccctgtccagactgtgactattgtccagcaagccccactcgggcagcaccagttacccattaagacagtgactcaaaatggaactcacgtggctagcgtccctacagctgtgcacggacaggtcaacaacgccgccgcctcccctctgcacatgctggcgacacacgccagtgcaagtgcctccctacctaccaagcgccacaatggggaccagcctgaacaacctgaactgaagcggattaaaaccgaggatggcgaaggcattgtgatcgcactgtctgttgacactcccccagcagccgtgcgagagaagggcgtgcagaactag

SEQ ID NO: 146987 - DNA, 1833 bp, Artificial Sequence
  derived and/or modified sequence
atggccgccgcccggcgggccctgggcgccggcaccccccgggccagaggccgcggcagaggggcaggcggtggaggttctcgcagagccctgggtaggggggccccaggtggaccccgggtgagggtgagcgatgaggaggccctgggagaccaccgtccgcaattagtggctgggctggggggaagagagcatggtcccctggagctccacctgcctgcccctcctcgggatctgcatgcaccaggccgtaggggacacggcggagccgctcccgagctgcctccggcccaaccccggcctgacgctggtggcgatttctacctaaggtgcctcggcaagaatggggtgttcgtggacggcgttttccagagaagaggtgccccaccattacagctgccacgcgtatgcaccttcaggttccccagtaccaacattaagattacatttacggcattgtccagcgagaagcgcgaaaagcaggaggcgtccgagagtcctgtcaaagccgtccagccacacataagtccactcactatcaatattccggatactatggcacacctcatatcaccacttccaagcccaactgggaccatttcagctgctaatagctgcccaagttcccctcgcggagctggctcctcaggctacaaagtgggccgagtcatgcctagcgacctgaatctgatggcagataactcacagcctgagaacgagaaagaggcgagtggcggcgactctcctaaagatgattctaagcctccatatagctacgctcagcttattgtccaggctatcaccatggctcccgacaagcaacttacacttaatgggatctatacacatatcaccaagaactatccctattacaggaccgcagacaaggggtggcagaatagcatcaggcataatctgagcctgaacagatatttcattaaagttccaagatctcaggaggagccaggcaaagggagcttctggcggattgatccggcctctgagtcgaagctgatcgaacaagctttcagaaagaggcggcctcggggcgtgccttgcttcaggacacccctgggcccgctgagctcccgtagtgcacctgcttcacctaatcatgcgggcgtgctcagtgcgcatagttccggcgctcagactcccgaaagtctttctagagaaggaagccccgcacctcttgagccagaaccgggcgcagcccagcctaaactcgccgtgattcaggaggccagattcgctcagagcgcacctggttcaccattgtcctcccaacccgttcttatcactgtgcagaggcagttaccacaggccatcaaacctgtgacctataccgtggccactccagtcacaacatccacttcccagcccccggtcgttcaaacagttcacgtggtacaccagattccagctgtatccgtgacctctgtggccgggctcgcacctgccaacacttacacagtttcaggccaggccgtggtcacacccgccgccgtgctcgcacctccgaaggctgaggctcaggagaacggggaccaccgagaggtcaaagttaaagtggaacccataccggcaattggacacgcaaccctgggaaccgcatcgagaatcatccagactgcgcaaaccacgcccgtgcaaacggtcaccatcgtccagcaagctccactggggcaacatcaactccccataaagacagtgacacagaatggcacacatgtcgcttcagtcccaactgccgtgcacggtcaggtgaacaatgggcctctagggctccgcagacccccctgcgccagctcagattggtcttgtctcagctag

SEQ ID NO: 146988 - DNA, 1983 bp, Artificial Sequence
  derived and/or modified sequence
atggccgcagccgcagccgctcttagtggggcaggcacccctcccgcaggtgggggagccggaggaggtggggcaggcggtggcggtagtccccctggcggatgggccgtcgcccgtcttgaaggtcgagaattcgaatacctcatgaagaagcggtctgtcacaattggtaggaatagctcacagggatctgtcgatgttagtatgggacacagctccttcatctcaaggcgacacttagaaatattcacgccaccaggtggaggaggacacgggggtgcagctccagagctccccccagcacaaccccgtcccgacgcaggaggagatttctatctgcggtgcttggggaaaaacggcgtgtttgtcgacggcgtcttccaacggaggggcgcacccccactgcagctccccagagtttgcactttcagatttccaagcactaatataaagattactttcaccgccctgtcctcagaaaaaagagaaaaacaagaggcatctgagtctccagttaaggctgtgcaaccacatatctcccccttaacaatcaatataccagacacaatggcacacctgatctctccattgccatctcccaccggcaccatttccgcagctaacagttgtccctcctccccgagaggggcaggttctagcgggtataaggtgggccgtgtgatgccatcggatctaaatttgatggcagacaattcgcagccagaaaacgaaaaggaggcatccggaggggattcgcctaaagacgactcaaaacctccctatagctacgcccagctgattgtgcaggccataacaatggcgccagataaacagctgacgcttaacggcatctacacacacatcacaaagaactacccctattacagaaccgcggataagggttggcagaactccattcgtcataatctgtccctcaacagatattttatcaaagtccctcgctcacaggaggaaccaggaaaaggttctttctggcggatagatcccgctagtgaaagtaagctgatcgagcaggctttccgtaagcgacggccaagaggcgttccctgtttcaggacacctctgggccctctatcatcaagaagcgctcctgccagccccaaccacgccggagtgctgtccgcccattcatccggagcccagacaccggagtccctgagccgggagggatcccccgctccactggagccagaacccggtgccgcacagccaaaacttgccgtaatccaggaggctcggtttgcccagtcagcccctgggtcgccactgagctctcagccagtgctcattacagtgcaaagacaactgccacaggccataaaacccgtcacatatacagtcgcaacgcccgtgacaacttccacaagtcagcctcccgtggtccaaactgtgcatgtggtccaccagatcccagcagtatccgttacttccgtggccggtcttgctcccgcaaacacttacaccgtgagcgggcaggcagttgtcactcccgcagcagtgctcgctccaccgaaagcggaggcacaggagaatggtgaccatagggaagtgaaggtgaaggtcgagcccatacccgctatcgggcacgccacgctcggtacagccagccgaattatccagaccgcgcaaaccacccctgtgcagactgttaccatcgttcagcaggcacccttagggcagcatcagctccccatcaagaccgtgacacagaatggcactcatgtcgcatcagtgcctaccgccgtgcacggacaggtcaataacgcagccgcatccccactgcatatgttggccacccacgcctcggcttcagcctcgcttcccacaaaaaggcataacggcgatcaaccagagcagccagagttaaaacggatcaagaccgaggacggcgaagggatagtcattgcactgtccgtggatacacctcctgccgcagtaagagagaagggcgtgcagaactag

SEQ ID NO: 146989 - DNA, 1833 bp, Artificial Sequence
  derived and/or modified sequence
atggccgctgccaggcgtgcattaggcgcaggcacaccccgagctagaggtaggggtcggggagcgggtggtggaggaagtcgtcgagcccttggaaggggagccccaggaggtccccgagtcagggtgagcgacgaggaagctctgggtgaccaccggccacagctggtcgcgggtctaggcggtcgcgaacacgggccactcgagctccatttgcctgcaccacccagggaccttcacgcaccgggaaggagggggcacggaggagcggcacctgagcttcccccagcccagcccagaccggatgctgggggagacttttatctcagatgtttgggtaaaaatggcgtgttcgtggatggcgtattccaaaggaggggcgcacctcccctgcaactgcccagagtatgcaccttccgttttcccagcaccaacataaaaatcacatttactgccctctcttccgagaagagggaaaaacaggaagccagtgagtccccagtcaaggctgtgcagccccacatttcccccctgaccataaacatccctgacacaatggctcaccttatttctcccttacccagcccaacggggactatctccgcggctaattcctgtccaagttcccctcgaggcgcaggcagcagtggttataaggtcggcagggtgatgcccagtgacctaaatctgatggctgacaattctcagccagagaatgagaaagaggcctctggaggcgactctcctaaggacgattctaagcctccctactcttacgcacaactcatcgttcaggccattacaatggctccggataagcaattgactctgaacggcatctacacacatatcactaaaaactatccttactatcggactgctgataagggttggcaaaattctatccggcacaacctgagtctgaaccggtactttattaaggtgccgaggtctcaggaagagcccggaaaggggagcttttggcgcatcgatccggcatccgagtcaaaactcattgagcaggcctttaggaaaaggcggcctaggggcgtcccttgttttagaacacccctcgggccactttcctcccgcagtgcccctgcctcacctaatcatgctggcgttctgagcgcgcattcaagtggcgctcagactccagaatctctttccagagagggaagtccggctccactcgagcccgagcctggggctgcacaacctaaactcgccgttattcaggaggcgagattcgcccagtctgctcccggatctccattgtcatctcagcccgtcctgataacagtgcaaagacaactgcctcaagctataaagcccgtgacatacacggtggcaacccctgtgacaacaagcacctcccagccccctgttgtacaaactgtgcatgtggtccatcagatccccgcagtgtcagtgactagtgtggcaggattggcacccgctaatacatacaccgtcagcgggcaggccgttgtaacacccgcagctgtgctcgcgccaccaaaggcagaggcccaagagaacggcgaccatagggaagtgaaggtgaaggtcgaaccaattcccgctattggtcacgctacactcggcacggccagccgtatcatccagacagcgcagaccactcctgtgcagactgttactatcgtccagcaggcaccacttggacagcaccaactacctatcaagacggttacacagaatggaacacacgtggcctctgtgcccacagctgtacatggccaggtgaacaatggacccctgggactgcgccgaccaccttgcgcatcatcagactggagttgtcttagctag

SEQ ID NO: 146990 - DNA, 1983 bp, Artificial Sequence
  derived and/or modified sequence
atggccgccgccgccgccgccctgagcggcgccggcaccccccccgccggcggcggcgccggcggcggcggcgccggcggcggcggcagcccccccggcggctgggccgtggccagactggagggcagagagttcgagtacctgatgaagaagagaagcgtgaccatcggcagaaacagcagccagggcagcgtggacgtgagcatgggccacagcagcttcatcagcagaagacacctggagatcttcaccccccccggcggcggcggccacggcggcgccgcccccgagctgccccccgcccagcccagacccgacgccggcggcgacttctacctgagatgcctgggcaagaacggcgtgttcgtggacggcgtgttccagagaagaggcgccccccccctgcagctgcccagagtgtgcaccttcagattccccagcaccaacatcaagatcaccttcaccgccctgagcagcgagaagagagagaagcaggaggccagcgagagccccgtgaaggccgtgcagccccacatcagccccctgaccatcaacatccccgacaccatggcccacctgatcagccccctgcccagccccaccggcaccatcagcgccgccaacagctgccccagcagccccagaggcgccggcagcagcggctacaaggtgggcagagtgatgcccagcgacctgaacctgatggccgacaacagccagcccgagaacgagaaggaggccagcggcggcgacagccccaaggacgacagcaagcccccctacagctacgcccagctgatcgtgcaggccatcaccatggcccccgacaagcagctgaccctgaacggcatctacacccacatcaccaagaactacccctactacagaaccgccgacaagggctggcagaacagcatcagacacaacctgagcctgaacagatacttcatcaaggtgcccagaagccaggaggagcccggcaagggcagcttctggagaatcgaccccgccagcgagagcaagctgatcgagcaggccttcagaaagagaagacccagaggcgtgccctgcttcagaacccccctgggccccctgagcagcagaagcgcccccgccagccccaaccacgccggcgtgctgagcgcccacagcagcggcgcccagacccccgagagcctgagcagagagggcagccccgcccccctggagcccgagcccggcgccgcccagcccaagctggccgtgatccaggaggccagattcgcccagagcgcccccggcagccccctgagcagccagcccgtgctgatcaccgtgcagagacagctgccccaggccatcaagcccgtgacctacaccgtggccacccccgtgaccaccagcaccagccagccccccgtggtgcagaccgtgcacgtggtgcaccagatccccgccgtgagcgtgaccagcgtggccggcctggcccccgccaacacctacaccgtgagcggccaggccgtggtgacccccgccgccgtgctggccccccccaaggccgaggcccaggagaacggcgaccacagagaggtgaaggtgaaggtggagcccatccccgccatcggccacgccaccctgggcaccgccagcagaatcatccagaccgcccagaccacccccgtgcagaccgtgaccatcgtgcagcaggcccccctgggccagcaccagctgcccatcaagaccgtgacccagaacggcacccacgtggccagcgtgcccaccgccgtgcacggccaggtgaacaacgccgccgccagccccctgcacatgctggccacccacgccagcgccagcgccagcctgcccaccaagagacacaacggcgaccagcccgagcagcccgagctgaagagaatcaagaccgaggacggcgagggcatcgtgatcgccctgagcgtggacaccccccccgccgccgtgagagagaagggcgtgcagaactag

SEQ ID NO: 146991 - DNA, 1833 bp, Artificial Sequence
  derived and/or modified sequence
atggccgccgccagaagagccctgggcgccggcacccccagagccagaggcagaggcagaggcgccggcggcggcggcagcagaagagccctgggcagaggcgcccccggcggccccagagtgagagtgagcgacgaggaggccctgggcgaccacagaccccagctggtggccggcctgggcggcagagagcacggccccctggagctgcacctgcccgccccccccagagacctgcacgcccccggcagaagaggccacggcggcgccgcccccgagctgccccccgcccagcccagacccgacgccggcggcgacttctacctgagatgcctgggcaagaacggcgtgttcgtggacggcgtgttccagagaagaggcgccccccccctgcagctgcccagagtgtgcaccttcagattccccagcaccaacatcaagatcaccttcaccgccctgagcagcgagaagagagagaagcaggaggccagcgagagccccgtgaaggccgtgcagccccacatcagccccctgaccatcaacatccccgacaccatggcccacctgatcagccccctgcccagccccaccggcaccatcagcgccgccaacagctgccccagcagccccagaggcgccggcagcagcggctacaaggtgggcagagtgatgcccagcgacctgaacctgatggccgacaacagccagcccgagaacgagaaggaggccagcggcggcgacagccccaaggacgacagcaagcccccctacagctacgcccagctgatcgtgcaggccatcaccatggcccccgacaagcagctgaccctgaacggcatctacacccacatcaccaagaactacccctactacagaaccgccgacaagggctggcagaacagcatcagacacaacctgagcctgaacagatacttcatcaaggtgcccagaagccaggaggagcccggcaagggcagcttctggagaatcgaccccgccagcgagagcaagctgatcgagcaggccttcagaaagagaagacccagaggcgtgccctgcttcagaacccccctgggccccctgagcagcagaagcgcccccgccagccccaaccacgccggcgtgctgagcgcccacagcagcggcgcccagacccccgagagcctgagcagagagggcagccccgcccccctggagcccgagcccggcgccgcccagcccaagctggccgtgatccaggaggccagattcgcccagagcgcccccggcagccccctgagcagccagcccgtgctgatcaccgtgcagagacagctgccccaggccatcaagcccgtgacctacaccgtggccacccccgtgaccaccagcaccagccagccccccgtggtgcagaccgtgcacgtggtgcaccagatccccgccgtgagcgtgaccagcgtggccggcctggcccccgccaacacctacaccgtgagcggccaggccgtggtgacccccgccgccgtgctggccccccccaaggccgaggcccaggagaacggcgaccacagagaggtgaaggtgaaggtggagcccatccccgccatcggccacgccaccctgggcaccgccagcagaatcatccagaccgcccagaccacccccgtgcagaccgtgaccatcgtgcagcaggcccccctgggccagcaccagctgcccatcaagaccgtgacccagaacggcacccacgtggccagcgtgcccaccgccgtgcacggccaggtgaacaacggccccctgggcctgagaagacccccctgcgccagcagcgactggagctgcctgagctag

SEQ ID NO: 146992 - protein, 390 aa, Artificial Sequence
  derived and/or modified sequence
MRGDRGRGRGGRFGSRGGPGGGFRPFVPHIPFDFYLCEMAFPRVKPAPDETSFSEALLKRNQDLAPNSAEQASILSLVTKINNVIDNLIVAPGTFEVQIEEVRQVGSYKKGTMTTGHNVADLVVILKILPTLEAVAALGNKVVESLRAQDPSEVLTMLTNETGFEISSSDATVKILITTVPPNLRKLDPELHLDIKVLQSALAAIRHARWFEENASQSTVKVLIRLLKDLRIRFPGFEPLTPWILDLLGHYAVMNNPTRQPLALNVAYRRCLQILAAGLFLPGSVGITDPCESGNFRVHTVMTLEQQDMVCYTAQTLVRILSHGGFRKILGQEGDASYLASEISTWDGVIVTPSEKAYEKPPEKKEGEEEEENTEEPPQGEEEESMETQE

SEQ ID NO: 146993 - protein, 150 aa, Artificial Sequence
  derived and/or modified sequence
MRGDRGRGRGGRFGSRGGPGGGFRPFVPHIPFDFYLCEMAFPRVKPAPDETSFSEALLKRNQDLAPNSAEQASILSLVTKINNVIDNLIVAPGTFEVQIEEVRQVGSYKKGTMTTGHNVADLVVILKILPTCECACFWSWEQNIALGLGV

SEQ ID NO: 146994 - DNA, 1637 bp, Artificial Sequence
  derived and/or modified sequence
ggcaagacgcctcttcagttgtctgctactcagaggaaggggcggttggtgcggcctccattgttcgtgttttaaggcgccatgaggggtgacagaggccgtggtcgtggtgggcgctttggttccagaggaggcccaggaggagggttcaggccctttgtaccacatatcccatttgacttctatttgtgtgaaatggcctttccccgggtcaagccagcacctgatgaaacttccttcagtgaggccttgctgaagaggaatcaggacctggctcccaattctgctgaacaggcatctatcctttctctggtgacaaaaataaacaatgtgattgataatctgattgtggctccagggacatttgaagtgcaaattgaagaagttcgacaggtgggatcctataaaaaggggacaatgactacaggacacaatgtggctgacctggtggtgatactcaagattctgccaacgttggaagctgttgctgccctggggaacaaagtcgtggaaagcctaagagcacaggatccttctgaagttttaaccatgctgaccaacgaaactggctttgaaatcagttcttctgatgctacagtgaagattctcattacaacagtgccacccaatcttcgaaaactggatccagaactccatttggatatcaaagtattgcagagtgccttagcagccatccgacatgcccgctggttcgaggaaaatgcttctcagtccacagttaaagttctcatcagactactgaaggacttgaggattcgttttcctggctttgagcccctcacaccctggatccttgacctactaggccattatgctgtgatgaacaaccccaccagacagcctttggccctaaacgttgcatacaggcgctgcttgcagattctggctgcaggactgttcctgccaggttcagtgggtatcactgacccctgtgagagtggcaactttagagtacacacagtcatgaccctagaacagcaggacatggtctgctatacagctcagactctcgtccgaatcctctcacatggtggctttaggaagatccttggccaggagggtgatgccagctatcttgcttctgaaatatctacctgggatggagtgatagtaacaccttcagaaaaggcttatgagaagccaccagagaagaaggaaggagaggaagaagaggagaatacagaagaaccacctcaaggagaggaagaagaaagcatggaaactcaggagtgacattcccttcactccttttcctacccaagggggaagactggagcctaagctgcctgctactgggctttacatggtgacagacatttccgtgggatagggaagatagcaggaagaaaagtaaactccatagaagtgtcattccactgggttttgatattggcttagctgccagtctcccatttgtgacctatgccatccatctataatggaggataccaacatttcttcctaatattctataatctccaactcctgaaaacccctctctcaactaatactttgctgttgaaatgttgtgaaatgttaagtgtctggaaatttttttttctaagaaaaactattaaagtacttcctagtaaaaaaaaaaaaaaaaaaaaaaaaaa

SEQ ID NO: 146995 - DNA, 1173 bp, Artificial Sequence
  derived and/or modified sequence
atgagaggcgacagaggcagaggcagaggcggcagattcggcagcagaggcggccccggcggcggcttcagacccttcgtgccccacatccccttcgacttctacctgtgcgagatggccttccccagagtgaagcccgcccccgacgagaccagcttcagcgaggccctgctgaagagaaaccaggacctggcccccaacagcgccgagcaggccagcatcctgagcctggtgaccaagatcaacaacgtgatcgacaacctgatcgtggcccccggcaccttcgaggtgcagatcgaggaggtgagacaggtgggcagctacaagaagggcaccatgaccaccggccacaacgtggccgacctggtggtgatcctgaagatcctgcccaccctggaggccgtggccgccctgggcaacaaggtggtggagagcctgagagcccaggaccccagcgaggtgctgaccatgctgaccaacgagaccggcttcgagatcagcagcagcgacgccaccgtgaagatcctgatcaccaccgtgccccccaacctgagaaagctggaccccgagctgcacctggacatcaaggtgctgcagagcgccctggccgccatcagacacgccagatggttcgaggagaacgccagccagagcaccgtgaaggtgctgatcagactgctgaaggacctgagaatcagattccccggcttcgagcccctgaccccctggatcctggacctgctgggccactacgccgtgatgaacaaccccaccagacagcccctggccctgaacgtggcctacagaagatgcctgcagatcctggccgccggcctgttcctgcccggcagcgtgggcatcaccgacccctgcgagagcggcaacttcagagtgcacaccgtgatgaccctggagcagcaggacatggtgtgctacaccgcccagaccctggtgagaatcctgagccacggcggcttcagaaagatcctgggccaggagggcgacgccagctacctggccagcgagatcagcacctgggacggcgtgatcgtgacccccagcgagaaggcctacgagaagccccccgagaagaaggagggcgaggaggaggaggagaacaccgaggagcccccccagggcgaggaggaggagagcatggagacccaggagtag

SEQ ID NO: 146996 - DNA, 453 bp, Artificial Sequence
  derived and/or modified sequence
atgagaggcgacagaggcagaggcagaggcggcagattcggcagcagaggcggccccggcggcggcttcagacccttcgtgccccacatccccttcgacttctacctgtgcgagatggccttccccagagtgaagcccgcccccgacgagaccagcttcagcgaggccctgctgaagagaaaccaggacctggcccccaacagcgccgagcaggccagcatcctgagcctggtgaccaagatcaacaacgtgatcgacaacctgatcgtggcccccggcaccttcgaggtgcagatcgaggaggtgagacaggtgggcagctacaagaagggcaccatgaccaccggccacaacgtggccgacctggtggtgatcctgaagatcctgcccacctgcgagtgcgcctgcttctggagctgggagcagaacatcgccctgggcctgggcgtgtag

SEQ ID NO: 146997 - DNA, 1173 bp, Artificial Sequence
  derived and/or modified sequence
atgagaggcgacagagggcgcggaagaggcgggcgttttgggagccgcggggggcctgggggcggatttcgtcccttcgtcccacatattccattcgacttttacctctgcgagatggcattccctagggtcaaaccggctcccgacgaaacctctttcagcgaagccctcctgaaaaggaaccaggacctcgcccccaattctgctgaacaagcaagtattctgagtcttgtgactaagatcaataatgtcatcgataatctcatagtagcaccagggacattcgaagtgcaaatcgaagaagtcaggcaggtgggctcatataagaaggggaccatgacaacaggacacaacgttgcggacctggttgtcatcctgaagattcttccgactctggaggctgtcgcagcactcggcaataaagttgtggaatccctgcgggctcaggacccttctgaggtcctgacaatgttaaccaacgagactggattcgagattagctcatcggacgcgacagtcaagatcttgattacaactgtgccacctaatctgcggaagctcgaccctgagctacacctggacatcaaagtgctgcagagcgcgctggctgccattagacacgctcgatggtttgaagaaaacgcaagtcagagcacagtgaaagtgcttattaggctccttaaggacctcaggataaggttcccggggttcgaacctctcacaccttggatattggatctgttaggtcactatgcagttatgaataatcccacacggcagccactggcactaaacgtggcatacagacggtgcctgcagattctcgctgccggcctctttctccccggctccgtgggaattacagatccttgcgagtctggcaatttccgagtccacacagtgatgacccttgaacagcaggatatggtgtgttacacagctcagacattggtgagaattttgtcccatggtgggttccggaagatattgggacaggagggcgatgccagttacctagcgtcagaaatttctacatgggacggcgtgatcgtgaccccttctgaaaaagcttacgagaaaccaccggaaaaaaaggagggcgaagaagaggaggagaataccgaggaaccgccccaaggggaagaggaggaatcaatggagacacaagagtag

SEQ ID NO: 146998 - DNA, 453 bp, Artificial Sequence
  derived and/or modified sequence
atgagaggcgaccgcggcagagggagggggggtcgattcggttcacgaggcggacctggcgggggctttcggccttttgtgccccatatcccatttgatttttacctatgtgagatggcattccctcgcgttaagcccgctcccgacgaaacgtcatttagcgaggccctccttaaacggaatcaggacctggcccctaacagtgcagagcaggcatccatcctctccctcgtgaccaagattaacaatgtcatcgataacctcatcgtagcccctgggaccttcgaagtccagatcgaagaggttcggcaggtcggttcatacaagaaaggcaccatgaccactggtcataacgtagcggacctggttgtgatcctgaagatcttgccaacttgtgagtgtgcctgcttttggtcatgggaacagaatatcgcactgggcctgggggtgtag

SEQ ID NO: 146999 - DNA, 1659 bp, Artificial Sequence
  derived and/or modified sequence
gggtaaggcgggagccaatcgcaccgggttttattgggacacgccggcaagacgcctcttcagttgtctgctactcagaggaaggggcggttggtgcggcctccattgttcgtgttttaaggcgccatgaggggtgacagaggccgtggtcgtggtgggcgctttggttccagaggaggcccaggaggagggttcaggccctttgtaccacatatcccatttgacttctatttgtgtgaaatggcctttccccgggtcaagccagcacctgatgaaacttccttcagtgaggccttgctgaagaggaatcaggacctggctcccaattctgctgaacaggcatctatcctttctctggtgacaaaaataaacaatgtgattgataatctgattgtggctccagggacatttgaagtgcaaattgaagaagttcgacaggtgggatcctataaaaaggggacaatgactacaggacacaatgtggctgacctggtggtgatactcaagattctgccaacgttggaagctgttgctgccctggggaacaaagtcgtggaaagcctaagagcacaggatccttctgaagttttaaccatgctgaccaacgaaactggctttgaaatcagttcttctgatgctacagtgaagattctcattacaacagtgccacccaatcttcgaaaactggatccagaactccatttggatatcaaagtattgcagagtgccttagcagccatccgacatgcccgctggttcgaggaaaatgcttctcagtccacagttaaagttctcatcagactactgaaggacttgaggattcgttttcctggctttgagcccctcacaccctggatccttgacctactaggccattatgctgtgatgaacaaccccaccagacagcctttggccctaaacgttgcatacaggcgctgcttgcagattctggctgcaggactgttcctgccaggttcagtgggtatcactgacccctgtgagagtggcaactttagagtacacacagtcatgaccctagaacagcaggacatggtctgctatacagctcagactctcgtccgaatcctctcacatggtggctttaggaagatccttggccaggagggtgatgccagctatcttgcttctgaaatatctacctgggatggagtgatagtaacaccttcagaaaaggcttatgagaagccaccagagaagaaggaaggagaggaagaagaggagaatacagaagaaccacctcaaggagaggaagaagaaagcatggaaactcaggagtgacattcccttcactccttttcctacccaagggggaagactggagcctaagctgcctgctactgggctttacatggtgacagacatttccgtgggatagggaagatagcaggaagaaaagtaaactccatagaagtgtcattccactgggttttgatattggcttagctgccagtctcccatttgtgacctatgccatccatctataatggaggataccaacatttcttcctaatattctataatctccaactcctgaaaacccctctctcaactaatactttgctgttgaaatgttgtgaaatgttaagtgtctggaaatttttttttctaagaaaaactattaaagtacttcctagtagg

SEQ ID NO: 147000 - DNA, 726 bp, Artificial Sequence
  derived and/or modified sequence
tctgctactcagaggaaggggcggttggtgcggcctccattgttcgtgttttaaggcgccatgaggggtgacagaggccgtggtcgtggtgggcgctttggttccagaggaggcccaggaggagggttcaggccctttgtaccacatatcccatttgacttctatttgtgtgaaatggcctttccccgggtcaagccagcacctgatgaaacttccttcagtgaggccttgctgaagaggaatcaggacctggctcccaattctgctgaacaggcatctatcctttctctggtgacaaaaataaacaatgtgattgataatctgattgtggctccagggacatttgaagtgcaaattgaagaagttcgacaggtgggatcctataaaaaggggacaatgactacaggacacaatgtggctgacctggtggtgatactcaagattctgccaacgtgtgagtgtgcctgtttctggtcatgggaacagaacatagcacttggattaggggtttaggtatctttttttgttttgagacaaattctccctccgttggccaggctggagtgcagtggtaccattgtagctcactgcagccttgacctccactacagcaagtgatcttcccgccttagcctcccgagtagctgggactacagatgtgtgctaccacacccagctaatttttgtattttttgtagatacagggtttcaccgtgttgctcgggc

SEQ ID NO: 147001 - DNA, 476 bp, Artificial Sequence
  derived and/or modified sequence
aggggtgacagaggccgtggtcgtggtgggcgctttggttccagaggaggcccaggaggagggttcaggccctttgtaccacatatcccatttgacttctatttgttgtttacttctggtttagtgtgaaatggcctttccccgggtcaagccagcacctgatgaaacttccttcagtgaggccttgctgaagaggaatcaggacctggctcccaattctgctgaacaggcatctatcctttctctggtgacaaaaataaacaatgtgattgataatctgattgtggctccagggacatttgaagtgcaaattgaagaagttcgacaggtgggatcctataaaaaggggacaatgactacaggacacaatgtggctgacctggtggtgatactcaagattctgccaacgttggaagctgttgctgccctggggaacaaagtcgtggaaagcctaagagcacaggatccttctgaag

SEQ ID NO: 147002 - DNA, 1173 bp, Artificial Sequence
  derived and/or modified sequence
atgagaggagaccggggccggggccggggcggccgcttcggcagcagaggaggccctgggggcggcttccggccctttgtgccccacatcccctttgacttctacctgtgtgagatggccttcccccgggtgaagccagccccagatgagaccagcttcagcgaggccctgctgaagaggaaccaggacctggcccccaacagcgctgagcaggccagcatcctgagcctggtgaccaagatcaacaacgtgattgacaacctgattgtggcccctggcacctttgaggtgcagatcgaggaggtgcggcaggtgggcagctacaagaagggcaccatgaccaccggccacaacgtggccgacctggtggtgatcctgaagatcctgcccaccctggaggccgtggccgccctgggcaacaaggtggtggagagcctgcgggcccaggaccccagcgaggtgctgaccatgctgaccaatgagaccggctttgagatcagcagcagtgatgccaccgtgaagatcctgatcaccaccgtgccccccaacctgaggaagctggaccctgagctgcacctggacatcaaggtgctgcagagcgccctggccgccatcagacatgcccgctggtttgaagaaaatgccagccagagcacagtgaaggtgctgatccggctgctgaaggacctgcgcatccgcttccctggctttgagcccctgaccccctggatcctggacctgctgggccactatgctgtgatgaacaaccccacccggcagcccctggccctgaatgtggcctaccgccgctgcctgcagatcctggccgccggcctcttcctgcccggctctgtgggcatcacagacccctgtgagagcggcaacttccgggtgcacacagtgatgaccctggagcagcaggacatggtgtgctacacagcccagaccctggtgcgcatcctgagccatggaggcttcaggaagatcctgggccaggagggagatgccagctacctggccagcgagatcagcacctgggatggagtcatcgtgacccccagcgagaaggcctatgagaagcccccagagaagaaggagggggaggaggaggaggagaacacagaggagcccccccagggcgaggaggaggagagcatggagacccaggagtag

SEQ ID NO: 147003 - DNA, 453 bp, Artificial Sequence
  derived and/or modified sequence
atgagaggagaccggggccggggccggggcggccgcttcggcagcagaggaggccctgggggcggcttccggccctttgtgccccacatcccctttgacttctacctgtgtgagatggccttcccccgggtgaagccagccccagatgagaccagcttcagcgaggccctgctgaagaggaaccaggacctggcccccaacagcgctgagcaggccagcatcctgagcctggtgaccaagatcaacaacgtgattgacaacctgattgtggcccctggcacctttgaggtgcagatcgaggaggtgcggcaggtgggcagctacaagaagggcaccatgaccaccggccacaacgtggccgacctggtggtgatcctgaagatcctgcccacctgtgaatgtgcctgcttctggagctgggagcagaacatcgccctgggcctgggcgtgtag

SEQ ID NO: 147004 - DNA, 1173 bp, Artificial Sequence
  derived and/or modified sequence
atgcggggcgaccggggccggggccggggcggccggttcggcagcaggggaggacccgggggcggctttcgccccttcgtgccgcatattccatttgatttttatttgtgtgaaatggcctttccccgcgtgaagcctgcacccgatgaaaccagcttctctgaggcgctgctaaaaaggaatcaggatctggcccctaactccgccgagcaggctagcattcttagtcttgtgacaaagatcaacaacgtgatcgataacttgattgttgcgccaggcacttttgaggtgcagatcgaagaggtgaggcaggtgggaagttataagaaagggaccatgactaccgggcacaacgttgctgatctcgtcgttatcctgaagatcctccccacgctcgaggcagttgccgccttgggaaacaaagtagtcgaaagccttcgggcacaggatcccagtgaagtgctcacaatgctgacaaacgaaacaggatttgagatcagctcctcagatgcgacagtgaagattctgatcacaaccgttcctccaaatctgcgaaagctggaccctgagttacatctggatattaaggtgctccagtccgccctagctgccattcgacacgcgcgctggtttgaagagaacgcttcccagtcgaccgtaaaggtgctgatacgcctgctgaaggacctgcgtatccggttcccgggattcgagcctcttacgccttggatcctcgatctcctcggccactatgctgtcatgaacaatcccactcgccaacccctcgcactcaacgtagcttacaggaggtgcctccaaattctggccgccggtttatttttgcccggttctgtggggataaccgatccctgtgaatcgggaaactttagagtgcacacagtgatgacacttgaacagcaggacatggtctgttatacagcgcagaccttggtgcgcattctcagccatgggggattcaggaaaatccttggacaggagggcgacgcaagttacctggcaagcgagatttctacttgggatggagtgatcgtcactcctagcgaaaaagcctatgagaagccacctgagaagaaggagggcgaggaagaagaggaaaacactgaagagcctccccagggggaagaggaagagtcaatggaaacgcaggaatag

SEQ ID NO: 147005 - DNA, 453 bp, Artificial Sequence
  derived and/or modified sequence
atgcggggcgaccggggccggggccggggcggccggttcggcagcagaggaggccccgggggtggctttcggccatttgtccctcacatcccatttgatttctatctgtgtgagatggccttcccccgggtgaaacctgcacctgacgaaacctccttcagcgaagctcttcttaagagaaaccaggaccttgctcccaattctgcagaacaagcgagcatattgagtttagtgaccaaaatcaacaatgtgattgacaatctgatcgtggcccccggtacgttcgaggttcagatcgaggaagtgcgacaagttgggagctacaagaagggcacaatgacgactggtcacaatgtggccgacctggtggttattcttaaaatcctgccgacctgcgagtgtgcctgcttctggagctgggaacagaacatcgcgctgggcctgggagtgtag

SEQ ID NO: 147006 - DNA, 1173 bp, Artificial Sequence
  derived and/or modified sequence
atgagaggagacagggggagagggaggggagggaggttcggctcgaggggtggtcctggcggagggtttcgtccatttgttccacatatcccgttcgatttctatctgtgtgagatggcgtttcctagagtaaagcccgcaccggatgaaaccagcttctctgaagcactgctgaaacgcaaccaggatctcgcccctaattccgccgagcaggcatccatactgagcctggtgactaaaattaacaacgtcattgataatcttatagtggctccaggcaccttcgaggtacagatcgaggaagtccgacaagtgggctcttacaaaaaggggaccatgacgacagggcacaatgtcgccgatctcgttgtgatcctgaagattctgccaaccctcgaagcggtcgcagctttgggcaacaaagtggtcgagagcttacgggcacaggatccaagcgaggtattgacaatgctaaccaatgagaccggctttgaaatttctagcagcgacgccaccgtcaagatcctcatcacaactgttcctcccaacctgcgcaaactggaccccgagctgcatttggacatcaaggtgctacagtccgcactggccgcaatccgacatgccaggtggtttgaggagaatgccagccagagcacggttaaggttctgatccgactccttaaggatcttaggatacggttccccggattcgaaccgctcacaccatggattttggacctgttggggcactatgctgtgatgaacaacccaacgcgccagcccctcgcccttaacgttgcctatcggcgatgcctgcagatccttgccgcaggtctgtttctgcccggttctgttggaatcactgatccatgtgaatccggtaacttcagagtacatactgtaatgacactcgaacagcaagatatggtatgctatacagcgcagaccctagtgcgcatcctgagccacggtggttttaggaagatactcggtcaggaaggcgatgcatcttacctcgcctctgagattagtacctgggacggtgtcatcgtgacgccttcagaaaaggcgtatgagaaacccccagagaaaaaagagggcgaggaggaggaagagaacaccgaggaaccaccacagggtgaggaggaggagagcatggagactcaggaatag

SEQ ID NO: 147007 - DNA, 453 bp, Artificial Sequence
  derived and/or modified sequence
atgcgtggagaccggggacggggaagagggggacgtttcggcagtagaggaggtcctggcggtgggttccgcccttttgtacctcacattcccttcgatttctatctctgtgaaatggcctttcccagagtcaagcccgctcccgacgaaacctcattcagcgaagccctgcttaaaagaaatcaggatctcgctcctaactccgctgaacaagcctcaatcctgtcactggtgacaaaaatcaacaatgtgatcgataacttgattgtagctcctggaacatttgaagtccagattgaggaagttaggcaagtaggcagctacaagaaaggtaccatgacaaccggacacaacgtcgcggaccttgtcgttatcttgaagattctcccgacttgtgagtgcgcttgcttctggtcttgggagcagaacattgcactcggcctgggggtttag

SEQ ID NO: 147008 - protein, 702 aa, Artificial Sequence
  derived and/or modified sequence
MRPMRIFVNDDRHVMAKHSSVYPTQEELEAVQNMVSHTERALKAVSDWIDEQEKGSSEQAESDNMDVPPEDDSKEGAGEQKTEHMTRTLRGVMRVGLVAKGLLLKGDLDLELVLLCKEKPTTALLDKVADNLAIQLAAVTEDKYEILQSVDDAAIVIKNTKEPPLSLTIHLTSPVVREEMEKVLAGETLSVNDPPDVLDRQKCLAALASLRHAKWFQARANGLKSCVIVIRVLRDLCTRVPTWGPLRGWPLELLCEKSIGTANRPMGAGEALRRVLECLASGIVMPDGSGIYDPCEKEATDAIGHLDRQQREDITQSAQHALRLAAFGQLHKVLGMDPLPSKMPKKPKNENPVDYTVQIPPSTTYAITPMKRPMEEDGEEKSPSKKKKKIQKKEEKAEPPQAMNALMRLNQLKPGLQYKLVSQTGPVHAPIFTMSVEVDGNSFEASGPSKKTAKLHVAVKVLQDMGLPTGAEGRDSSKGEDSAEETEAKPAVVAPAPVVEAVSTPSAAFPSDATAEQGPILTKHGKNPVMELNEKRRGLKYELISETGGSHDKRFVMEVEVDGQKFQGAGSNKKVAKAYAALAALEKLFPDTPLALDANKKKRAPVPVRGGPKFAAKPHNPGFGMGGPMHNEVPPPPNLRGRGRGGSIRGRGRGRGFGGANHGGYMNAGAGYGSYGYGGNSATAGYSDFFTDCYGYHDFGSS

SEQ ID NO: 147009 - DNA, 2109 bp, Artificial Sequence
  derived and/or modified sequence
atgagacccatgagaatcttcgtgaacgacgacagacacgtgatggccaagcacagcagcgtgtaccccacccaggaggagctggaggccgtgcagaacatggtgagccacaccgagagagccctgaaggccgtgagcgactggatcgacgagcaggagaagggcagcagcgagcaggccgagagcgacaacatggacgtgccccccgaggacgacagcaaggagggcgccggcgagcagaagaccgagcacatgaccagaaccctgagaggcgtgatgagagtgggcctggtggccaagggcctgctgctgaagggcgacctggacctggagctggtgctgctgtgcaaggagaagcccaccaccgccctgctggacaaggtggccgacaacctggccatccagctggccgccgtgaccgaggacaagtacgagatcctgcagagcgtggacgacgccgccatcgtgatcaagaacaccaaggagccccccctgagcctgaccatccacctgaccagccccgtggtgagagaggagatggagaaggtgctggccggcgagaccctgagcgtgaacgacccccccgacgtgctggacagacagaagtgcctggccgccctggccagcctgagacacgccaagtggttccaggccagagccaacggcctgaagagctgcgtgatcgtgatcagagtgctgagagacctgtgcaccagagtgcccacctggggccccctgagaggctggcccctggagctgctgtgcgagaagagcatcggcaccgccaacagacccatgggcgccggcgaggccctgagaagagtgctggagtgcctggccagcggcatcgtgatgcccgacggcagcggcatctacgacccctgcgagaaggaggccaccgacgccatcggccacctggacagacagcagagagaggacatcacccagagcgcccagcacgccctgagactggccgccttcggccagctgcacaaggtgctgggcatggaccccctgcccagcaagatgcccaagaagcccaagaacgagaaccccgtggactacaccgtgcagatcccccccagcaccacctacgccatcacccccatgaagagacccatggaggaggacggcgaggagaagagccccagcaagaagaagaagaagatccagaagaaggaggagaaggccgagcccccccaggccatgaacgccctgatgagactgaaccagctgaagcccggcctgcagtacaagctggtgagccagaccggccccgtgcacgcccccatcttcaccatgagcgtggaggtggacggcaacagcttcgaggccagcggccccagcaagaagaccgccaagctgcacgtggccgtgaaggtgctgcaggacatgggcctgcccaccggcgccgagggcagagacagcagcaagggcgaggacagcgccgaggagaccgaggccaagcccgccgtggtggcccccgcccccgtggtggaggccgtgagcacccccagcgccgccttccccagcgacgccaccgccgagcagggccccatcctgaccaagcacggcaagaaccccgtgatggagctgaacgagaagagaagaggcctgaagtacgagctgatcagcgagaccggcggcagccacgacaagagattcgtgatggaggtggaggtggacggccagaagttccagggcgccggcagcaacaagaaggtggccaaggcctacgccgccctggccgccctggagaagctgttccccgacacccccctggccctggacgccaacaagaagaagagagcccccgtgcccgtgagaggcggccccaagttcgccgccaagccccacaaccccggcttcggcatgggcggccccatgcacaacgaggtgccccccccccccaacctgagaggcagaggcagaggcggcagcatcagaggcagaggcagaggcagaggcttcggcggcgccaaccacggcggctacatgaacgccggcgccggctacggcagctacggctacggcggcaacagcgccaccgccggctacagcgacttcttcaccgactgctacggctaccacgacttcggcagcagctag

SEQ ID NO: 147010 - DNA, 2109 bp, Artificial Sequence
  derived and/or modified sequence
atgaggccaatgcgaatatttgttaacgacgataggcatgtgatggcaaagcactcctccgtctatccaacacaggaggagctggaggcggtccaaaatatggtatcacacacagagagggctctgaaagccgtctccgactggattgacgagcaagaaaagggcagttcagagcaggctgagtccgacaacatggatgttccaccggaagatgatagtaaggagggagccggtgaacagaagacagagcatatgacccggactttgcgcggcgtgatgcgtgtgggcctcgtggctaaaggactgctcctcaaaggggacctggaccttgagctggtgctgctttgcaaggaaaagcctaccactgcccttctggacaaagtcgccgacaacctggctatccagctcgccgctgtgacggaagataaatacgaaatcctgcagtcagtggacgatgcagcaatcgtcatcaagaataccaaggagccaccactgtcattgactattcacctgaccagcccagtggtccgcgaagaaatggaaaaggtactggccggtgaaactctgtctgttaatgatccaccggacgtattggacaggcagaagtgtctggccgctcttgcaagccttcgccatgctaaatggttccaggcccgggccaatggcttgaagtcctgtgtgattgtgatccgagttttgcgggatctgtgtacaagagtccctacatggggcccgctgagggggtggccactagaactgctctgtgaaaaaagtatcggtacagcgaacaggcctatgggtgctggcgaggccttaagaagggttctcgaatgtctggcatcgggaatcgtaatgcccgacgggagcgggatttacgatccctgcgaaaaagaggccacggacgccatcggccaccttgacaggcagcagagggaggatatcacccagtccgcccagcatgccctccgcctggctgctttcggacagctccacaaagtactcgggatggacccattgcccagcaaaatgccgaaaaagcctaagaatgaaaatccagtcgattatactgtgcagattcctccaagtacgacctacgccattactccgatgaaaaggcctatggaggaagacggagaagaaaaatctccctccaagaaaaaaaagaagatccagaaaaaagaggaaaaggcggagcctccccaagccatgaacgcattgatgcggcttaaccagctcaagccagggctccaatacaaattagtctcccagacgggacctgtgcatgcccccatttttacaatgtccgtggaagtggacgggaactcctttgaggcctccggaccctctaaaaaaaccgcgaagcttcatgtggctgtgaaggtgctgcaggacatgggtctgcctaccggggctgaagggcgggattcgagtaagggggaagacagcgccgaagagactgaggctaaaccagccgttgtagcccctgctccggtggtggaagcggtcagcacacccagtgcagcttttccctcggatgcgacggcagaacagggaccaatacttactaagcatggaaaaaacccagtcatggaactaaacgagaaaagacggggtctgaagtatgagttgataagcgaaaccggcggttcacatgataaacggttcgtgatggaggtcgaagtggatggccagaagtttcagggggctgggtctaacaagaaagtagctaaagcttacgcagcactcgctgctctagagaaactttttcctgatacccctctcgccctggacgccaataagaagaaacgagccccagtgcctgtaaggggcggtccaaagttcgcagccaagccacacaatccgggctttggaatgggcgggccaatgcacaatgaagtgccccctcctcccaatttaaggggaaggggacgagggggatccattagagggcgtggacggggacggggcttcggcggggccaaccatggcggctacatgaatgcaggagccggatacggcagctatggatatgggggaaacagcgccaccgccggatacagtgatttctttactgactgctatggatatcacgattttgggagttcgtag

SEQ ID NO: 147011 - DNA, 2109 bp, Artificial Sequence
  derived and/or modified sequence
atgcgcccaatgcggatttttgtaaatgacgataggcacgtcatggcaaaacattcctccgtgtacccaacacaggaggaactggaggccgtccagaacatggtgtcccacacagaacgcgctctgaaggctgtttcggattggatcgacgaacaagaaaaaggaagctctgaacaggccgaatcagacaacatggatgtgcctccggaagacgacagtaaagagggggccggagagcagaagaccgagcacatgactcggacgctgagaggagtgatgagggttggtctggtggccaaaggcctgcttttaaagggagacctcgacttggaactggtacttctgtgcaaggaaaagcccacaacagccctgttagacaaagttgccgacaaccttgcaattcagctcgcagcagttactgaggataaatacgagatactacagtctgtggatgatgccgctatcgttatcaaaaacactaaagagcctcctctctctctgacaattcatcttacaagcccagtggtccgcgaggagatggaaaaggttctggccggcgaaaccctcagcgttaatgacccgccagacgtcctagatcgccagaagtgtctcgcggcactggctagcctcaggcatgctaagtggttccaggcgagagccaacggactcaaatcctgtgttatcgtaataagggtgctgagggatctttgcactcgcgtgcctacctggggccccctaagaggttggccactagaactgttatgcgaaaagagcataggcactgctaatcgccccatgggtgccggagaagccttaagacgcgttttagagtgcctcgcttctggtatcgtgatgcccgacggaagcgggatatacgatccatgcgagaaagaggcaactgatgcaatcggtcacctcgaccggcagcagagggaggacattacccagtctgctcagcacgcactgcgtttggctgccttcggccagttgcataaggtgctcggcatggatccgttgccctcaaagatgcccaagaagcctaaaaatgagaaccctgtggattacaccgtccagatcccaccctctacaacctacgctataactccaatgaaaaggcctatggaggaggatggggaagaaaagtcacccagcaagaagaaaaagaaaatccaaaagaaggaagagaaggccgaaccccctcaggcaatgaacgcgcttatgaggttgaatcagttgaaaccaggacttcaatataagctcgtctctcagacgggtcccgtgcacgcccccatattcacaatgtccgttgaggttgacggcaactcgttcgaagccagtggtccctctaagaaaaccgcaaagctgcatgtggccgtaaaagtcctgcaggacatgggcctgcctactggagccgaaggacgggacagttcgaagggcgaggactcggccgaagagacagaggccaaaccggccgtcgtggcccccgcccccgtggtggaggcggtttcaactccatctgccgcgttcccctcggacgctactgctgagcaggggcccattcttacaaagcatggaaagaaccccgtcatggagctgaatgagaagagacgtggtcttaagtacgagctcatttcagagactggaggcagccacgataagcggttcgtaatggaggtcgaagtggatggacagaaatttcagggggcagggtcaaacaagaaggtggccaaagcctacgctgcccttgcagccctggaaaagctgttccctgacacaccactggcccttgatgctaacaaaaagaaacgcgcaccagtcccagtgcgcggcggaccaaagtttgcagccaaacctcacaatcctggttttggaatgggcgggccaatgcacaatgaagtccctccaccgcccaaccttcgcggtagaggcagagggggctcaatacggggaaggggaagagggagaggcttcggcggcgcaaaccacggcggttatatgaacgccggtgccggctatggcagctatgggtacggcggaaatagcgcaacagccggctactccgattttttcacagattgttacggttaccacgatttcggttcttcctag

SEQ ID NO: 147012 - DNA, 2109 bp, Artificial Sequence
  derived and/or modified sequence
atgaggcccatgaggatctttgtgaatgatgacagacatgtgatggccaagcacagctctgtgtaccccacccaggaggagctggaggccgtgcagaacatggtgagccacacagagcgggccctgaaggctgtgtctgactggattgatgagcaggagaagggcagcagcgagcaggccgagagtgacaacatggatgtgcccccagaagatgacagcaaggagggcgctggggagcagaagacagagcacatgaccaggaccctgcggggcgtgatgagggtgggcctggtggccaagggcctgctgctgaagggggacctggacctggagctggtgctgctgtgcaaggagaagcccaccacagccctgctggacaaggtggccgacaacctggccatccagctggccgctgtgacagaggacaagtatgagatcctgcagagcgtggatgatgctgccatcgtcatcaagaacaccaaggagccccccctgagcctgaccatccacctgaccagccctgtggtgcgggaggagatggagaaggtgctggccggggagaccctgtctgtgaatgaccccccagatgtgctggaccggcagaagtgcctggccgccctggccagcctgcggcatgccaagtggttccaggcccgggccaacggcctgaagagctgtgtgattgtcatccgggtgctgcgggacctgtgcaccagggtgcccacctggggccccctgcggggctggcccctggagctgctgtgtgagaagagcattggaacagccaaccggcccatgggcgctggggaggccctgcggcgggtgctggagtgcctggccagcggcatcgtgatgccagatggcagcggcatctatgacccctgtgagaaggaggccacagatgccatcggccacctggaccggcagcagcgggaggacatcacccagagcgcccagcacgccctgcggctggccgccttcggccagctgcacaaggtgctgggcatggaccccctgcccagcaagatgcccaagaagcccaagaatgaaaatcctgtggactacacagtgcagatcccccccagcaccacctacgccatcacccccatgaagaggcccatggaggaggatggagaggagaagagccccagcaagaagaagaagaagatccagaagaaggaggagaaggccgagcccccccaggccatgaatgccctgatgaggctgaaccagctgaagccaggcctgcagtacaagctggtgtcccagacaggccctgtgcacgcccccatcttcaccatgtctgtggaggtggatggcaacagctttgaggccagcggccccagcaagaagacagccaagctgcacgtggccgtgaaggtgctgcaggacatgggcctgcccactggagctgagggccgggacagcagcaagggggaggacagcgctgaggagacagaggccaagccagctgtggtggccccagcccctgtggtggaggccgtgtccacccccagcgctgccttccccagtgatgccacagctgagcagggccccatcctgaccaagcacggcaagaaccctgtgatggagctgaatgagaagaggcggggcctgaagtatgagctgatcagcgagactggaggcagccatgacaagagatttgtgatggaggtggaggtggatggccagaagttccagggcgccggcagcaacaagaaggtggccaaggcctatgctgccctggccgccctggagaagctgttcccagacacccccctggccctggatgccaacaagaagaagagggcccctgtgcctgtgcggggcggccccaagtttgctgccaagccccacaaccctggcttcggcatgggcggccccatgcacaatgaggtgcccccaccacccaacctgcggggccggggccggggcggcagcatccggggccggggccggggccggggctttggaggagccaaccacggcggctacatgaatgctggggccggctacggcagctatggctatggaggcaacagcgccacagctggctacagcgacttcttcacagactgctacggctaccatgactttggcagcagctag

SEQ ID NO: 147013 - DNA, 2109 bp, Artificial Sequence
  derived and/or modified sequence
atgcggcccatgcggatcttcgtgaacgacgaccggcacgtgatggccaagcactcctctgtttacccgacccaggaggagctggaagccgtgcagaacatggtatcacatacagaaagagccttaaaagccgttagcgactggatcgacgaacaggagaagggttccagcgaacaggcagaatctgataatatggatgtacccccggaggatgatagtaaggaaggagccggcgaacagaagaccgaacacatgacgcgcaccctgagaggcgtcatgcgagtcggactggtggctaagggccttctgctgaaaggggatctggacctggagctggtactgctgtgtaaagagaagccaaccacagcactcctggataaggtggctgataacctcgcaatccagcttgctgctgtaacagaggacaagtatgagatattgcagtctgtagacgacgccgctattgtgattaagaacacaaaggaacctccgctgtcccttacaattcaccttacctcccctgtggtgagagaagagatggagaaggttctggctggggagacccttagtgtcaacgatccaccagatgtgctggacagacagaagtgcctcgccgccttggcctcattaaggcacgctaaatggtttcaagctcgagccaacgggttgaagagctgtgtaattgttattcgcgtcttgcgcgacctatgtactagggtgcctacttggggcccgctcaggggctggcccttggagttgctgtgtgagaagtccatcggaactgctaatagaccaatgggcgccggcgaggctttgcggcgggtcctagagtgtcttgcgtccggcatcgtgatgccagatgggagtggaatatatgatccctgtgagaaagaggcaactgatgcgatagggcacctggacagacaacagcgcgaagacataacgcaatctgcccaacatgctttaagactggccgctttcggccaactgcacaaggtgctagggatggacccccttccttcaaaaatgccaaaaaagccgaagaatgagaatccagtggattatacggttcagatccccccctccaccacctatgccatcactccgatgaagagaccgatggaggaggacggagaagaaaaaagcccatccaagaagaagaaaaagattcaaaagaaggaggagaaagccgaacctccccaggccatgaatgccctgatgaggctcaaccaactgaaacccggactgcagtataaactcgtatcccagaccggacctgtgcatgcccccattttcactatgagcgttgaggtggacggcaatagttttgaggcatccggaccatctaagaagactgctaaactgcatgttgccgtgaaggtattgcaagacatggggctgcctacaggcgccgagggcagagacagctctaaaggtgaggactcagctgaagaaacagaagcaaaaccggccgttgtggcacccgctcctgtcgtggaagctgtcagtactccatcggcagcctttccttccgatgcaaccgccgaacaaggtcccatcctcactaagcatggcaaaaaccccgtcatggagctgaacgagaaacggcgggggcttaagtacgagctcatatctgagacaggcggttcacacgataagcgttttgtaatggaggtggaggtggacggtcagaagtttcagggggccgggtcaaataaaaaggtcgctaaggcatatgcagccctcgcagcacttgagaaactcttccctgatacaccgctggcactcgatgctaacaagaaaaagcgtgctccagtgccggtgaggggcggccctaagttcgcggcaaaaccccacaatcctggttttggcatgggtggccccatgcataacgaggtgccaccccctccaaacctgagagggcgaggccggggcggcagcattagagggaggggcagaggccggggttttggcggggctaatcacggaggatacatgaacgccggcgccggatacggttcatatggttacggaggcaattcagcaactgccggatattctgacttttttactgattgctatggctatcacgacttcggctcgagttag

SEQ ID NO: 147014 - DNA, 2109 bp, Artificial Sequence
  derived and/or modified sequence
atgcggcccatgcggatcttcgtgaacgacgaccggcacgtgatggccaaacactcttccgtatatccaacacaagaggaactggaggccgtacagaacatggtgagccacacagagcgtgctcttaaagcagtgtcagattggatcgatgaacaggagaaagggtcctcagagcaagctgaatcagataatatggatgtcccgcctgaggacgactctaaagagggagcaggagagcaaaagaccgaacacatgactcgcaccctgagaggcgtcatgcgcgtgggactcgtggccaagggtctactgcttaaaggcgacctagacctggaacttgtattattatgtaaggagaagcctaccacagctctgctggacaaggtggcagacaacctggcaattcagctggcagcagtgactgaggacaaatatgagatccttcagtcagtcgatgacgccgccattgtgataaagaatacaaaggaaccccccctgtctcttactatccacctcacatccccagtggttagggaggaaatggagaaggtcctggctggcgagacacttagtgtaaacgacccccccgacgttctagacagacagaaatgtctagctgctcttgccagtctccgccacgctaaatggttccaagctagagccaacgggctcaagagttgcgtcatcgtcatacgtgttttgagagacctgtgcacccgagtgcctacctggggacctttgagaggatggcctttggaattactctgcgagaaatcaatcggcactgcaaaccgtcctatgggcgcaggggaggccttacggagggtgctagagtgcctggcgagcggcatagtcatgccagatggttccggaatctacgatccttgtgagaaagaggcaacagatgccattggccacctggataggcaacagagagaagacatcacacaatctgcccaacatgcactgcgtctcgctgctttcggacagctgcacaaagtgctgggcatggatcccctcccctctaaaatgccaaagaagccgaaaaatgagaacccagtggactacacagtgcagatcccaccatcaacaacttacgccattacaccgatgaagcgtccaatggaagaagatggcgaggagaagagtccatccaagaagaagaagaaaatccagaaaaaggaggaaaaagctgaaccgccacaggccatgaacgcgctcatgcggctaaaccaactgaagcctggcctacagtacaagctcgtaagtcaaaccgggcccgtgcatgcgccaattttcacaatgtcagttgaggttgacgggaattcctttgaagctagcgggccctccaaaaaaacggccaagcttcacgtggccgtcaaggtcttgcaggacatgggcctgcctaccggtgccgagggccgcgacagcagtaaaggggaggatagtgcggaggaaacagaagcaaaaccagctgtggttgcccccgctcccgtagttgaggctgtgagcactccatctgccgccttccccagtgatgcaaccgctgagcagggaccgattctcaccaagcatggcaaaaatccagttatggaactcaacgaaaaacggagaggcctgaagtacgagcttatctccgagactggcggtagccatgataagcgatttgtgatggaggtggaggttgacggacagaagtttcagggggctggtagcaacaagaaggtggccaaggcctatgcagccctggcagcgctcgagaagttattccctgacacacctctggcacttgacgctaacaagaagaagcgtgcgcctgttcccgtgcggggcgggcctaagttcgcagccaagcctcacaaccccggattcgggatgggcggaccgatgcacaacgaagtacccccacctcccaatctgcggggtagaggccgaggtgggtctattagaggaaggggcagaggaaggggatttggaggtgcaaatcatggcggttatatgaacgccggcgccggatacggcagctacggctacggtggaaacagcgccacagctggttacagcgatttcttcacagactgctatggatatcatgactttggatcgagctag

SEQ ID NO: 147015 - DNA, 2109 bp, Artificial Sequence
  derived and/or modified sequence
atgcgaccaatgcgcatttttgtgaatgacgatcggcacgtgatggccaagcactccagcgtgtacccaacacaagaggagcttgaagcagtgcagaatatggtctcccatactgaaagagccctgaaggccgtctccgattggatcgacgaacaggaaaaaggaagctccgaacaagcagagtcagataacatggatgtgccgccagaggacgatagcaaagagggcgctggcgagcagaagactgaacacatgactcgcactcttaggggggtgatgcgtgttggcctagtggctaagggcctgctgcttaaaggcgatctcgatctggaacttgttctcctgtgcaaagaaaagccaactacagccctgctggacaaggtggcagataatttggctatccagttggccgcagtgaccgaggataaatacgaaattctccaatcagtggatgacgcagccatcgtgatcaaaaatacaaaagaacctcccctgtcgttaacaattcatcttacaagtccagtggtgagagaagagatggaaaaagtgctagcgggtgagaccctttcggtcaatgatccacctgacgttcttgaccggcagaaatgtctcgctgctctggcttcactgcgccacgccaagtggtttcaggcaagagccaacggcctcaaatcttgcgttattgtcatccgggtcctaagggatctgtgtacacgggttcctacttggggcccactccggggttggcctttagaattgctgtgtgagaagtcgattggcactgctaatagaccgatgggggctggcgaagccctgcgaagggtactggagtgcctagccagcggcatagtcatgcctgatgggagtgggatctacgacccttgcgaaaaggaggcaaccgacgccatcggtcatctcgatcggcagcaaagggaggatatcacacagagcgctcagcacgccctgaggctcgctgctttcggccagctccacaaggtactggggatggaccccctaccatccaagatgcctaagaagccaaaaaatgagaaccctgtggactacacagtgcaaatccctccctctaccacgtacgctataactccaatgaagcgcccaatggaggaggatggcgaagagaagtccccctctaagaagaaaaaaaaaattcaaaaaaaagaagaaaaggcagagcctccccaagccatgaatgcgctgatgagactgaatcagctgaaaccaggacttcagtataagttagtcagccagaccgggcctgtgcatgccccaatcttcacgatgagtgtagaggtggatgggaactccttcgaggcaagcggacctagtaagaagacagctaagctccacgtggctgtgaaagtattgcaggacatgggcctcccaacgggagccgagggaagagactcatccaagggtgaagattctgcagaagagacagaagccaagcccgcagttgtggctccggcacccgttgtcgaggcagtgtccacacctagcgccgcattcccaagcgacgctacagccgaacagggcccaattctgactaagcatggaaagaatccagtcatggagttgaatgaaaaaagaaggggcttgaaatatgagttgatctctgagacaggcggatcacatgataaaagattcgtaatggaagtcgaggtagacgggcagaaattccagggggcagggagcaacaaaaaggtggctaaggcctacgctgccctcgcagctctggaaaaattattccctgatacgccactcgccctggatgctaataagaaaaagcgagcaccagtgcctgtgaggggaggtcctaagtttgccgcaaagccacataaccccggttttgggatgggcggaccaatgcataacgaggttcctcctccccctaacttgcggggtcgaggtaggggcggatccattcgaggccgagggagagggagaggctttggaggagcaaaccacggcggatacatgaatgccggtgccggttatggcagctacggctatggcggaaactcagccacggccggatacagcgatttcttcacggactgttatgggtaccatgattttggctccagttag

SEQ ID NO: 147016 - DNA, 2109 bp, Artificial Sequence
  derived and/or modified sequence
atgaggcccatgagaatttttgtgaatgatgacaggcacgttatggccaagcattcaagcgtgtaccctacgcaagaggaacttgaggcggtgcagaatatggtgtctcacaccgagagagcgctgaaagcagtctcagactggatcgatgaacaggaaaaaggaagctctgaacaggccgaaagtgacaacatggacgtccctccagaagatgacagcaaagagggcgctggcgaacagaagaccgaacacatgacaagaacattacgtggcgtgatgcgggtgggacttgtcgctaaaggattgttgctgaagggagatttagatcttgaattggtgctcctatgcaaggagaagccgaccacagctctcttggataaagtcgcagataaccttgcaatccagctggccgctgttaccgaggataaatatgaaatccttcagtctgtggatgacgctgccatcgtgatcaaaaacacaaaggaacctcccctgagtctcaccattcacttaacatcacctgtggttagagaggaaatggagaaggtgctggccggtgaaacactcagtgtgaatgacccgcctgatgtgctggataggcagaagtgcctagctgcgctggcatccttgaggcatgctaagtggtttcaggcgagggctaatggtctcaaatcctgtgttattgtcatccgggtcttaagggatctatgcacaagggtgcccacgtggggacctctgcgcggatggccactggaacttctgtgcgaaaaaagtataggcacggccaacagacccatgggcgctggagaagctcttcgccgagtgctcgagtgcctcgcttccggaatcgtcatgcctgacggctctgggatttatgacccttgcgaaaaagaggccacggatgcgatcggccacttggaccgccagcagcgggaggatattacacagagcgcgcagcacgcactcagattagccgcttttggtcaattgcacaaagtactggggatggacccgcttccatcaaagatgcctaagaagcccaaaaacgagaacccagttgactatacggtccagattcctcccagcaccacatatgccattactcccatgaagcgcccaatggaggaggatggagaagaaaagtccccaagcaagaaaaaaaaaaaaattcagaaaaaggaagaaaaggccgaaccccctcaggcgatgaacgctctaatgagactgaaccagttaaaacccggtttgcaatataagctggtatcccagacaggccctgttcacgccccaatctttaccatgtctgttgaagtggatgggaactcttttgaggcctctggccctagcaaaaaaacagccaagctccacgtcgctgtcaaagtccttcaggacatgggcctcccaacaggtgctgagggacgagactccagcaaaggagaggactctgccgaggaaaccgaggccaagcccgcagttgtggccccagccccagtcgtggaggccgtgtctactccttcagccgctttccccagtgatgccacagccgaacaaggtcccatcttgacgaagcacgggaagaaccccgtgatggaactgaacgagaaacgcagaggactcaaatatgagctgattagcgagaccggagggagccacgacaagcgctttgtgatggaggtggaagttgacggtcagaagtttcagggtgccggttccaacaagaaggtagctaaagcatacgctgcactagctgcacttgagaagctgtttcccgacactccactggccttggacgcaaataagaaaaagagagctcccgtaccagttaggggtgggccaaagttcgctgctaagccgcataacccgggtttcggcatgggaggacctatgcacaatgaagtgcctcctcctcccaatctccgtggcaggggcagagggggttctataagaggtaggggccgaggccgtggctttggcggtgccaaccatggagggtacatgaatgctggggctggttatggcagctatgggtacggcggaaactctgcgacagctggatattccgattttttcacagattgctatggctaccacgacttcggtagctcctag

SEQ ID NO: 147017 - DNA, 2622 bp, Artificial Sequence
  derived and/or modified sequence
cttctcgccattgcagttggacccagcagcccggcgcgcaccgcgtggcttttgggggcagaccccggcgggctgtggcaggagggcggcggcggcggctgcggtcgaagaaggggacgccgacaagagttgaagtattgataacaccaaggaactctatcacaatttgaaaagataagcaaaagtttgatttccagacactacagaagaagtaaaaatgcgtccaatgcgaatttttgtgaatgatgaccgccatgtgatggcaaagcattcttccgtttatccaacacaagaggagctggaggcagtccagaacatggtgtcccacacggagcgggcgctcaaagctgtgtccgactggatagacgagcaggaaaagggtagcagcgagcaggcagagtccgataacatggatgtgcccccagaggacgacagtaaagaaggggctggggaacagaagacggagcacatgaccagaaccctgcggggagtgatgcgggtgggcctggtggcaaagggcctcctactcaagggggacttggatctggagctggtgctgctgtgtaaggagaagcccacaaccgccctcctggacaaggtggccgacaacctggccatccagcttgctgctgtaacagaagacaagtacgaaatactgcaatctgtcgacgatgctgcgattgtgataaaaaacacaaaagagcctccattgtccctgaccatccacctgacatcccctgttgtcagagaagaaatggagaaagtattagctggagaaacgctatcagtcaacgaccccccggacgttctggacaggcagaaatgccttgctgccttggcgtccctccgacacgccaagtggttccaggccagagccaacgggctgaagtcttgtgtcattgtgatccgggtcttgagggacctgtgcactcgcgtgcccacctggggtcccctccgaggctggcctctcgagctcctgtgtgagaaatccattggcacggccaacagaccgatgggtgctggcgaggccctgcggagagtgctggagtgcctggcgtcgggcatcgtgatgccagatggttctggcatttatgacccttgtgaaaaagaagccactgatgctattgggcatctagacagacagcaacgggaagatatcacacagagtgcgcagcacgcactgcggctcgctgccttcggccagctccataaagtcctaggcatggaccctctgccttccaagatgcccaagaaaccaaagaatgaaaacccagtggactacaccgttcagatcccaccaagcaccacctatgccattacgcccatgaaacgcccaatggaggaggacggggaggagaagtcgcccagcaaaaagaagaagaagattcagaagaaagaggagaaggcagagcccccccaggctatgaatgccctgatgcggttgaaccagctgaagccagggctgcagtacaagctggtgtcccagactgggcccgtccatgcccccatctttaccatgtctgtggaggttgatggcaattcattcgaggcctctgggccctccaaaaagacggccaagctgcacgtggccgttaaggtgttacaggacatgggcttgccgacgggtgctgaaggcagggactcgagcaagggggaggactcggctgaggagaccgaggcgaagccagcagtggtggcccctgccccagtggtagaagctgtctccacccctagtgcggcctttccctcagatgccactgccgagcaggggccgatcctgacaaagcacggcaagaacccagtcatggagctgaacgagaagaggcgtgggctcaagtacgagctcatctccgagaccgggggcagccacgacaagcgcttcgtcatggaggtcgaagtggatggacagaagttccaaggtgctggttccaacaaaaaggtggcgaaggcctacgctgctcttgctgccctagaaaagcttttccctgacacccctctcgcccttgatgccaacaaaaagaagagagccccagtacccgtcagagggggaccgaaatttgctgctaagccacataaccctggcttcggcatgggaggccccatgcacaacgaagtgcccccaccccccaaccttcgagggcggggaagaggcgggagcatccggggacgagggcgcgggcgaggatttggtggcgccaaccatggaggctacatgaatgccggtgctgggtatggaagctatgggtacggaggcaactcggcgacagcaggctacagtgactttttcacagactgctacggctatcatgattttgggtcttcctagagcgtctaaaagtattgcacacaaaatcaactttttactccaatttcctccaactccaaaacccaaagtgtccgtgctgtgtccctgtgcttcactgggtttctcaaccgtggcttttcaccgcagcttgtctgaaactcttagcctgcagaatttaagacaatggcagtttttatcgtgatttgcctttgaacttggtcctattgaagttcacaataagtggaaaacaattttttcagagaatgtatttttgtgcagaattgcacagaattctagagacagcgttgttcggcatc

SEQ ID NO: 147018 - DNA, 3728 bp, Artificial Sequence
  derived and/or modified sequence
aaagggggcggggcttcagccggtcacgtgttcccgcacctccccggcgcgcgcctgcccgcccgcccgctcgcccccggtccggactcctcctcctcctcttctcgccattgcagttggacccagcagcccggcgcgcaccgcgtggcttttgggggcagaccccggcgggctgtggcaggagggcggcggcggcggctgcggtcgaagaaggggacgccgacaagagttgaagtattgataacaccaaggaactctatcacaatttgaaaagataagcaaaagtttgatttccagacactacagaagaagtaaaaatgcgtccaatgcgaatttttgtgaatgatgaccgccatgtgatggcaaagcattcttccgtttatccaacacaagaggagctggaggcagtccagaacatggtgtcccacacggagcgggcgctcaaagctgtgtccgactggatagacgagcaggaaaagggtagcagcgagcaggcagagtccgataacatggatgtgcccccagaggacgacagtaaagaaggggctggggaacagaagacggagcacatgaccagaaccctgcggggagtgatgcgggtgggcctggtggcaaagggcctcctactcaagggggacttggatctggagctggtgctgctgtgtaaggagaagcccacaaccgccctcctggacaaggtggccgacaacctggccatccagcttgctgctgtaacagaagacaagtacgaaatactgcaatctgtcgacgatgctgcgattgtgataaaaaacacaaaagagcctccattgtccctgaccatccacctgacatcccctgttgtcagagaagaaatggagaaagtattagctggagaaacgctatcagtcaacgaccccccggacgttctggacaggcagaaatgccttgctgccttggcgtccctccgacacgccaagtggttccaggccagagccaacgggctgaagtcttgtgtcattgtgatccgggtcttgagggacctgtgcactcgcgtgcccacctggggtcccctccgaggctggcctctcgagctcctgtgtgagaaatccattggcacggccaacagaccgatgggtgctggcgaggccctgcggagagtgctggagtgcctggcgtcgggcatcgtgatgccagatggttctggcatttatgacccttgtgaaaaagaagccactgatgctattgggcatctagacagacagcaacgggaagatatcacacagagtgcgcagcacgcactgcggctcgctgccttcggccagctccataaagtcctaggcatggaccctctgccttccaagatgcccaagaaaccaaagaatgaaaacccagtggactacaccgttcagatcccaccaagcaccacctatgccattacgcccatgaaacgcccaatggaggaggacggggaggagaagtcgcccagcaaaaagaagaagaagattcagaagaaagaggagaaggcagagcccccccaggctatgaatgccctgatgcggttgaaccagctgaagccagggctgcagtacaagctggtgtcccagactgggcccgtccatgcccccatctttaccatgtctgtggaggttgatggcaattcattcgaggcctctgggccctccaaaaagacggccaagctgcacgtggccgttaaggtgttacaggacatgggcttgccgacgggtgctgaaggcagggactcgagcaagggggaggactcggctgaggagaccgaggcgaagccagcagtggtggcccctgccccagtggtagaagctgtctccacccctagtgcggcctttccctcagatgccactgccgagcaggggccgatcctgacaaagcacggcaagaacccagtcatggagctgaacgagaagaggcgtgggctcaagtacgagctcatctccgagaccgggggcagccacgacaagcgcttcgtcatggaggtcgaagtggatggacagaagttccaaggtgctggttccaacaaaaaggtggcgaaggcctacgctgctcttgctgccctagaaaagcttttccctgacacccctctcgcccttgatgccaacaaaaagaagagagccccagtacccgtcagagggggaccgaaatttgctgctaagccacataaccctggcttcggcatgggaggccccatgcacaacgaagtgcccccaccccccaaccttcgagggcggggaagaggcgggagcatccggggacgagggcgcgggcgaggatttggtggcgccaaccatggaggctacatgaatgccggtgctgggtatggaagctatgggtacggaggcaactcggcgacagcaggctacagtgactttttcacagactgctacggctatcatgattttgggtcttcctagagcgtctaaaagtattgcacacaaaatcaactttttactccaatttcctccaactccaaaacccaaagtgtccgtgctgtgtccctgtgcttcactgggtttctcaaccgtggcttttcaccgcagcttgtctgaaactcttagcctgcagaatttaagacaatggcagtttttatcgtgatttgcctttgaacttggtcctattgaagttcacaataagtggaaaacaattttttcagagaatgtatttttgtgcagaattgcacagaattctagagacagcgttgttcggcatcaaggcaaaagcccacctttgctttttatggaaagcattactttatttaaagagacagacaatgacgcattttaatctacctttgtcttaatttacagcaggttttgtatgaatttttaaccttttaacaaactcccaaatctggttgatgcctttgacagtgatgaaaacgatttcaccacatctgaatccagagaaaccggctttttttcttattgcgagcatgttaaaacgttgggaacatgtggggaattgtatattgcgctgaattaacttctcccgcctcttgtaatgctctggtgggttcttgtttgggaatgcgatattttgtggctggtttagctagagagtgaactctcaaaggtatcaaaactgtgcttccattattagtgcaagaaacagacaggctttaaggggtagatgacgtgaaattttgcaagtcttaattacagctgcagatgcatgggattctggatttttttgttgctttttagtttaatgggactttaaaagtaattgaggagaaagaaccgtgatgttccctgtttctccagtaaaggactggcttttgcttgggcagaggtggtgctgctgggtgtgcagctgccacagactccaaaggcgtagaagtttgtgccaacacacggagtcattctggctctctgctgaggcccctgttttctggcaggtgccctccttggaaactggttttggctctgatcagcggttctttttgcagcaaagcctgcatctgtgttgacttgcaagattttgcgtttattcaggcaaaaactggtcaaaatggttactacatgatttgttcccagaggtttgaaacattcagtgaaactttttaaaactttgattgcatgatgtattttttttttagaaagttattgtttgagaataatgtctttttataccaggaaaatagttatcctgaatgacgttgaaaactccccctcccctttatttttttttaatcaatacatgtgaaagtaacaagc

SEQ ID NO: 147019 - protein, 844 aa, Artificial Sequence
  derived and/or modified sequence
MVQKSRNGGVYPGPSGEKKLKVGFVGLDPGAPDSTRDGALLIAGSEAPKRGSILSKPRAGGAGAGKPPKRNAFYRKLQNFLYNVLERPRGWAFIYHAYVFLLVFSCLVLSVFSTIKEYEKSSEGALYILEIVTIVVFGVEYFVRIWAAGCCCRYRGWRGRLKFARKPFCVIDIMVLIASIAVLAAGSQGNVFATSALRSLRFLQILRMIRMDRRGGTWKLLGSVVYAHSKELVTAWYIGFLCLILASFLVYLAEKGENDHFDTYADALWWGLITLTTIGYGDKYPQTWNGRLLAATFTLIGVSFFALPAGILGSGFALKVQEQHRQKHFEKRRNPAAGLIQSAWRFYATNLSRTDLHSTWQYYERTVTVPMYRLIPPLNQLELLRNLKSKSGLAFRKDPPPEPSPSQKVSLKDRVFSSPRGVAAKGKGSPQAQTVRRSPSADQSLEDSPSKVPKSWSFGDRSRARQAFRIKGAASRQNSEEASLPGEDIVDDKSCPCEFVTEDLTPGLKVSIRAVCVMRFLVSKRKFKESLRPYDVMDVIEQYSAGHLDMLSRIKSLQSRVDQIVGRGPAITDKDRTKGPAEAELPEDPSMMGRLGKVEKQVLSMEKKLDFLVNIYMQRMGIPPTETEAYFGAKEPEPAPPYHSPEDSREHVDRHGCIVKIVRSSSSTGQKNFSAPPAAPPVQCPPSTSWQPQSHPRQGHGTSPVGDHGSLVRIPPPPAHERSLSAYGGGNRASMEFLRQEDTPGCRPPEGNLRDSDTSISIPSVDHEELERSFSGFSISQSKENLDALNSCYAAVAPCAKVRPYIAEGESDTDSDLCTPCGPPPRSATGEGPFGDVGWAGPRK

SEQ ID NO: 147020 - DNA, 3167 bp, Artificial Sequence
  derived and/or modified sequence
cgcggagcgaggtggccgcagcgtctccgcgcgcggcccaagcccggcaggagtgcggaaccgccgcctcggccatgcggctcccggccggggggcctgggctggggcccgcgccgccccccgcgctccgcccccgctgagcctgagcccgacccggggcgcctcccgccaggcaccatggtgcagaagtcgcgcaacggcggcgtataccccggcccgagcggggagaagaagctgaaggtgggcttcgtggggctggaccccggcgcgcccgactccacccgggacggggcgctgctgatcgccggctccgaggcccccaagcgcggcagcatcctcagcaaacctcgcgcgggcggcgcgggcgccgggaagccccccaagcgcaacgccttctaccgcaagctgcagaatttcctctacaacgtgctggagcggccgcgcggctgggcgttcatctaccacgcctacgtgttcctcctggttttctcctgcctcgtgctgtctgtgttttccaccatcaaggagtatgagaagagctcggagggggccctctacatcctggaaatcgtgactatcgtggtgtttggcgtggagtacttcgtgcggatctgggccgcaggctgctgctgccggtaccgtggctggagggggcggctcaagtttgcccggaaaccgttctgtgtgattgacatcatggtgctcatcgcctccattgcggtgctggccgccggctcccagggcaacgtctttgccacatctgcgctccggagcctgcgcttcctgcagattctgcggatgatccgcatggaccggcggggaggcacctggaagctgctgggctctgtggtctatgcccacagcaaggagctggtcactgcctggtacatcggcttcctttgtctcatcctggcctcgttcctggtgtacttggcagagaagggggagaacgaccactttgacacctacgcggatgcactctggtggggcctgatcacgctgaccaccattggctacggggacaagtacccccagacctggaacggcaggctccttgcggcaaccttcaccctcatcggtgtctccttcttcgcgctgcctgcaggcatcttggggtctgggtttgccctgaaggttcaggagcagcacaggcagaagcactttgagaagaggcggaacccggcagcaggcctgatccagtcggcctggagattctacgccaccaacctctcgcgcacagacctgcactccacgtggcagtactacgagcgaacggtcaccgtgcccatgtacagacttatccccccgctgaaccagctggagctgctgaggaacctcaagagtaaatctggactcgctttcaggaaggaccccccgccggagccgtctccaagccagaaggtcagtttgaaagatcgtgtcttctccagcccccgaggcgtggctgccaaggggaaggggtccccgcaggcccagactgtgaggcggtcacccagcgccgaccagagcctcgaggacagccccagcaaggtgcccaagagctggagcttcggggaccgcagccgggcacgccaggctttccgcatcaagggtgccgcgtcacggcagaactcagaagaagcaagcctccccggagaggacattgtggatgacaagagctgcccctgcgagtttgtgaccgaggacctgaccccgggcctcaaagtcagcatcagagccgtgtgtgtcatgcggttcctggtgtccaagcggaagttcaaggagagcctgcggccctacgacgtgatggacgtcatcgagcagtactcagccggccacctggacatgctgtcccgaattaagagcctgcagtccagagtggaccagatcgtggggcggggcccagcgatcacggacaaggaccgcaccaagggcccggccgaggcggagctgcccgaggaccccagcatgatgggacggctcgggaaggtggagaagcaggtcttgtccatggagaagaagctggacttcctggtgaatatctacatgcagcggatgggcatccccccgacagagaccgaggcctactttggggccaaagagccggagccggcgccgccgtaccacagcccggaagacagccgggagcatgtcgacaggcacggctgcattgtcaagatcgtgcgctccagcagctccacgggccagaagaacttctcggcgcccccggccgcgccccctgtccagtgtccgccctccacctcctggcagccacagagccacccgcgccagggccacggcacctcccccgtgggggaccacggctccctggtgcgcatcccgccgccgcctgcccacgagcggtcgctgtccgcctacggcgggggcaaccgcgccagcatggagttcctgcggcaggaggacaccccgggctgcaggccccccgaggggaacctgcgggacagcgacacgtccatctccatcccgtccgtggaccacgaggagctggagcgttccttcagcggcttcagcatctcccagtccaaggagaacctggatgctctcaacagctgctacgcggccgtggcgccttgtgccaaagtcaggccctacattgcggagggagagtcagacaccgactccgacctctgtaccccgtgcgggcccccgccacgctcggccaccggcgagggtccctttggtgacgtgggctgggccgggcccaggaagtgaggcggcgctgggccagtggacccgcccgcggccctcctcagcacggtgcctccgaggttttgaggcgggaaccctctggggcccttttcttacagtaactgagtgtggcgggaagggtgggccctggaggggcccatgtgggctgaaggatgggggctcctggcagtgaccttttacaaaagttattttccaacaggggctggagggctgggcagggccctgtggctccaggagcagcgtgcaggagcaaggctgccctgtccactctgctcagggccgcggccgacatcagcccggtgtgaggaggggcgggagtgatgacggggtgttgccagcgtggcaacaggcggggggttgtctcagccgagcccaggggaggcacaaagggcaggcctgttccctgaggacctgcgcaaagggcgggcctgtttggtgaggacctgcggccttgggtc

SEQ ID NO: 147021 - DNA, 2535 bp, Artificial Sequence
  derived and/or modified sequence
atggtccaaaagagtagaaatggaggcgtatatccaggcccatctggggaaaagaagctgaaggtcggcttcgtggggcttgatcctggggctcccgattccacccgggacggcgcactgctcatcgccggctccgaagcaccaaagcgggggagcatcttgtccaagcctagggctggcggggccggcgcggggaagccaccaaaaagaaacgctttttacagaaaacttcagaactttctttataatgtgttggaaagacctcgaggttgggcctttatctaccatgcctacgtgtttctactcgttttttcttgcctcgtgctcagtgtcttcagtactatcaaggagtatgaaaagagtagtgaaggtgcgctctacatcctggaaatcgtcactatcgtcgtgtttggtgtggagtattttgtcaggatctgggccgcgggatgctgctgtaggtacagaggttggagaggacgcctgaaattcgcacggaaaccgttctgcgtgatagacataatggtgcttatcgcatccattgcggtgcttgccgccgggagccagggaaacgtgttcgccacgtctgcactgcggtccctcagatttctgcagattttacgcatgattcgcatggataggaggggcggcacttggaaactcctgggcagcgtggtatacgcgcatagcaaggaactggttacagcttggtacatagggtttctgtgcttgattctggcttcattcctcgtctatttagcagagaagggagagaatgaccatttcgacacttacgccgacgccctgtggtgggggttaatcacgctcacaactattggctacggtgataaataccctcaaacctggaacggacgcttgctggctgccaccttcacccttattggcgtctcgtttttcgccctgcccgccggaattctgggcagtggattcgccctgaaagtgcaggagcagcatcggcagaagcacttcgagaaaagacgtaaccctgctgccgggttaattcaaagcgcctggcgcttctatgcgaccaatctgagtagaaccgatctgcattcgacttggcagtactacgagcgcaccgtcactgtcccgatgtatagattaattcccccattgaaccagttagaactgctgcgaaatctgaagtcaaaaagcggcctggctttccggaaggatcctccaccagagccttcacctagtcagaaggtgtcacttaaggatcgagtgttttcatccccccgtggcgtggcagctaaaggcaaggggtccccccaggcccagactgtccgacgcagtccaagcgccgaccagagcctggaggatagtccaagtaaggtccccaaatcttggagctttggggatcgtagcagagctaggcaggctttcagaatcaaaggggctgcttcgagacaaaactctgaagaggcctccttgccaggagaagacatagtagacgacaaatcctgtccctgcgaattcgtgacggaagatttaaccccaggccttaaagtgtccatcagagcagtatgcgtcatgcggtttctggtcagcaagcgtaagtttaaagaaagtctgcggccatacgacgtgatggatgtgatcgagcagtattctgctggccatttggatatgctctccagaatcaagagtcttcagtcgcgcgtcgaccaaatcgtcgggagaggacccgccattactgataaggacaggacaaaggggcctgccgaggccgagttaccagaggaccctagcatgatgggccgcctggggaaggtagaaaagcaagttctgtccatggagaagaaactcgactttttggtcaatatttatatgcagaggatgggtatcccgccaactgagactgaggcatatttcggtgcaaaagaaccagaacccgcccccccttaccactcgccagaagattcccgcgagcatgtggatcgtcatggctgcatagttaaaatagtgcggagcagtagttccaccggccagaaaaatttttcagccccccctgccgccccacctgttcagtgcccaccaagcacttcctggcagccacagagccatcccaggcagggccatggaacaagtcctgtcggcgaccacggtagcctcgtgagaattccacctcctcctgcccacgagcgatcactcagtgcatatggcggcggtaacagagcgtccatggaatttctccggcaggaagatacgccaggctgccgccctccagaagggaacctaagggactcagatacctctatcagtataccttcagtagaccatgaagaacttgaaaggtcattttcggggttctcgatcagccagagcaaggaaaatttggacgctctgaactcctgctatgcggcggtcgccccctgcgctaaggtaagaccctacattgccgaaggggagagcgacacggacagcgacctgtgtacaccatgtggcccaccccccagatcggccaccggcgagggcccattcggagatgtgggctgggccggcccccgcaaatag

SEQ ID NO: 147022 - DNA, 1311 bp, Artificial Sequence
  derived and/or modified sequence
atggtccagaagagccgcaacgggggggtctacccaggcccttccggagaaaaaaagctcaaagtgggattcgtcgggctggatccaggtgctccagattctactcgtgacggggcgttattgattgccggctcggaagctccgaagaggggctccattctgtcgaaaccgagagctggtggcgccggagcaggcaagccccccaagaggaacgccttctatcgaaaactccagaactttctgtacaacgtactggagcgtcccaggggctgggcatttatataccatgcctacgtatttctgctcgtgttcagttgtttggtgctatccgtgttcagtactatcaaagaatatgaaaagtcctcagaaggggcactgtatattttggagatcgtaacgatcgttgtatttggggtggagtattttgttaggatctgggccgccgggtgctgttgtaggtatcgggggtggagaggccgactaaaatttgcgcgcaaacccttttgcgtcatcgatattatggttctgatcgccagcatcgcggttctcgccgcaggtagccagggtaacgtgtttgcaacaagcgcccttcggagcctgcgcttcctgcagatacttaggatgattaggatggataggcgcgggggcacatggaaacttctgggtagtgtcgtctacgcccacagcaaggaactggtaaccgcgtggtatatagggtttctctgtttgatcctggcatcttttctcgtgtacctggccgaaaaaggggagaatgaccactttgatacctacgccgatgcactttggtggggcctgattacactcacaaccatcgggtacggcgacaaatatcctcaaacatggaacgggcgcctactggccgctacatttacacttattggagtcagttttttcgcattacccgctggcattctgggctccgggtttgcattgaaagtccaggaacaacatcggcagaaacattttgagaagaggcgcaacccagcagccggcctcatccagtctgcttggcgattttatgctacgaacctctcccggactgacctccattcaacatggcagtattatgaacggacggtgactgtccctatgtatcgcttgatcccccctctgaaccagttggagctgcttcgaaatctgaagtcaaagtctggtttggcttttcggaaggacccaccgccggagccaagcccccggtccgtgccccccgccgccactctggtgtctgccgtatgtacggcggtttggtcgttatcgcacacttgtgcgcagccagtgatggagatgtag

SEQ ID NO: 147023 - DNA, 2535 bp, Artificial Sequence
  derived and/or modified sequence
atggtgcagaagagcagaaatggaggagtgtacccaggccccagcggggagaagaagctgaaggtgggctttgtgggcctggaccccggggccccagacagcaccagagatggagccctgctgattgctggcagcgaggcccccaagaggggcagcatcctgagcaagcccagggctggaggagctggggccggcaagccacccaagagaaatgccttctacaggaagctgcagaacttcctgtacaacgtgctggagcggccccggggctgggccttcatctaccacgcctacgtgttcctgctggtgttcagctgcctggtgctgagcgtcttcagcaccatcaaggagtatgagaagagcagcgagggcgccctgtacatcctggagatcgtgaccatcgtggtgtttggagtggagtactttgtgcgcatctgggccgccggctgctgctgccgctaccggggctggaggggccgcctgaagtttgccaggaagcccttctgtgtgattgacatcatggtgctgattgccagcattgctgtgctggccgccggcagccagggcaatgtgtttgccaccagcgccctgcggagcctgcgcttcctgcagatcctgaggatgatccgcatggacagaagaggaggcacctggaagctgctgggctctgtggtgtatgcccacagcaaggagctggtgacagcctggtacatcggcttcctgtgcctgatcctggccagcttcctggtgtacctggccgagaagggagaaaatgaccactttgacacctatgcagatgccctgtggtggggcctcatcaccctgaccaccatcggctacggggacaagtacccccagacctggaatggccgcctgctggccgccaccttcaccctcatcggcgtgtccttctttgccctgcctgctggcatcctgggcagcggctttgccctgaaggtgcaggagcagcaccggcagaagcactttgagaagagaagaaatcctgctgctggcctcatccagagcgcctggaggttctacgccaccaacctgagcaggacagacctgcacagcacctggcagtactatgaaagaacagtgacagtgcccatgtaccgcctcatcccccccctgaaccagctggagctgctgaggaacctgaagagcaagagcggcctggccttcaggaaggaccccccacctgagcccagccccagccagaaggtgtccctgaaggacagagtcttcagcagcccccggggcgtggccgccaagggcaagggcagcccccaggcccagacagtgcggcgcagccccagcgctgaccagagcctggaggacagccccagcaaggtgcccaagtcctggagctttggagacaggagccgggcccggcaggccttccgcatcaagggagctgccagccggcagaacagcgaggaggccagcctgcctggagaagatattgtggatgacaagagctgcccctgtgaatttgtgacagaggacctgaccccaggcctgaaggtgtccatccgggctgtgtgtgtgatgaggttcctggtgtccaagaggaagttcaaggagagcctgcggccctatgatgtgatggatgtgattgagcagtacagcgctggccacctggacatgctgagccgcatcaagagcctgcagagccgggtggaccagatcgtgggccggggccctgccatcacagacaaggacaggaccaagggccctgctgaggccgagctgcctgaggaccccagcatgatgggccgcctgggcaaggtggagaagcaggtgctgtccatggagaagaagctggacttcctggtgaacatctacatgcagaggatgggcatccccccaacagaaacagaggcctactttggagccaaggagcctgagcccgccccaccctaccacagccctgaggacagccgggagcacgtggacagacatggctgcatcgtgaagatcgtgcgcagcagcagcagcacaggccagaagaacttcagcgcccccccagctgcccctcctgtgcagtgcccccccagcacctcctggcagccccagagccacccccggcagggccacggcaccagccctgtgggggaccacggcagcctggtgcgcatccccccacctccagcccacgagaggagcctgagcgcctatggaggcggcaacagagcctccatggagttcctgcggcaggaggacaccccaggctgccggcccccagagggcaacctgcgggacagcgacaccagcatcagcatccccagcgtggaccacgaggagctggagaggagcttcagcggcttcagcatcagccagagcaaggagaacctggatgccctgaacagctgctacgccgctgtggccccctgtgccaaggtgcggccctacatcgccgagggggagagtgacacagacagcgacctgtgcaccccctgtggccccccacccaggtctgccactggagagggcccctttggagatgtgggctgggccggccccaggaagtag

SEQ ID NO: 147024 - DNA, 1311 bp, Artificial Sequence
  derived and/or modified sequence
atggtgcagaagagcagaaatggaggagtgtacccaggccccagcggggagaagaagctgaaggtgggctttgtgggcctggaccccggggccccagacagcaccagagatggagccctgctgattgctggcagcgaggcccccaagaggggcagcatcctgagcaagcccagggctggaggagctggggccggcaagccacccaagagaaatgccttctacaggaagctgcagaacttcctgtacaacgtgctggagcggccccggggctgggccttcatctaccacgcctacgtgttcctgctggtgttcagctgcctggtgctgagcgtcttcagcaccatcaaggagtatgagaagagcagcgagggcgccctgtacatcctggagatcgtgaccatcgtggtgtttggagtggagtactttgtgcgcatctgggccgccggctgctgctgccgctaccggggctggaggggccgcctgaagtttgccaggaagcccttctgtgtgattgacatcatggtgctgattgccagcattgctgtgctggccgccggcagccagggcaatgtgtttgccaccagcgccctgcggagcctgcgcttcctgcagatcctgaggatgatccgcatggacagaagaggaggcacctggaagctgctgggctctgtggtgtatgcccacagcaaggagctggtgacagcctggtacatcggcttcctgtgcctgatcctggccagcttcctggtgtacctggccgagaagggagaaaatgaccactttgacacctatgcagatgccctgtggtggggcctcatcaccctgaccaccatcggctacggggacaagtacccccagacctggaatggccgcctgctggccgccaccttcaccctcatcggcgtgtccttctttgccctgcctgctggcatcctgggcagcggctttgccctgaaggtgcaggagcagcaccggcagaagcactttgagaagagaagaaatcctgctgctggcctcatccagagcgcctggaggttctacgccaccaacctgagcaggacagacctgcacagcacctggcagtactatgaaagaacagtgacagtgcccatgtaccgcctcatcccccccctgaaccagctggagctgctgaggaacctgaagagcaagagcggcctggccttcaggaaggaccccccacctgagcccagccccaggtctgtgcccccagctgccaccctggtgtctgctgtgtgcacagctgtgtggagcctgagccacacctgtgcccagcctgtgatggagatgtag

SEQ ID NO: 147025 - DNA, 2535 bp, Artificial Sequence
  derived and/or modified sequence
atggtgcagaagagccggaacggcggcgtgtaccccggccccagcggagaaaaaaagttaaaggtgggttttgttggcctggaccccggagctccagacagtactagagacggtgctcttctgattgccgggtcggaggctccaaagagaggctccatactttccaagcccagagccggaggggccggcgccggcaaaccccccaagaggaatgccttctacagaaagcttcagaatttcctctacaacgtgctagagcgaccccgggggtgggctttcatttatcatgcctacgtgtttctcctggtcttcagttgcttggtgctgtccgtcttcagtacaataaaagagtatgagaaatcctcagagggagccctgtacattttggagattgtgactatcgtcgtcttcggggtggaatacttcgtcagaatctgggctgcaggttgttgctgcagatatagaggctggaggggcaggctgaagttcgcccgaaagcccttttgtgtcatcgacattatggtactcatcgcatccatcgcagtgctggcggccgggagccaaggaaacgtgtttgcgacatcagctctacgatccctaagattcctgcagatattgagaatgatccgcatggaccggcggggtgggacatggaaattactaggctccgtggtgtacgcccattcaaaggaattagtcactgcatggtacataggatttctttgtctcattcttgcttcctttctcgtatacctggctgagaagggggaaaatgaccatttcgatacatacgcagatgccctgtggtggggcctaattaccttgacaacaatcggttatggcgacaaataccctcagacctggaatggccggctgctcgcagcgacctttacactcatcggggtgtctttttttgcgttgcctgccggtattctaggctccggcttcgctctgaaggtgcaggagcagcataggcagaagcatttcgaaaaaaggcggaatcctgctgcgggcctgattcaatccgcatggcgcttctacgccaccaacctgtctcgcactgacctacactccacttggcagtactacgaacgcaccgtaaccgtgcctatgtataggctgattcctcccctaaaccagctagaactgctccggaacctgaaatcaaagtcgggcttggcatttcggaaagaccctccccccgagccctcccctagccaaaaggtgagcctgaaggatagagttttcagttccccccgtggggtagccgccaaggggaagggctctccccaagcacaaactgttagaaggtcgccctcggctgaccagtccctcgaagatagcccttcaaaggtaccaaagagctggtcttttggtgaccggtctagagctcgccaagcattccgtattaagggggccgcttcccgacaaaactccgaggaagcttctctccccggtgaggatatcgtcgacgacaagtcatgtccctgcgagttcgttaccgaggacttaacccctgggctgaaagtgagtattcgcgcagtgtgtgttatgcgatttctggtctcaaagcggaagtttaaggagagcttaagaccttatgatgtgatggacgtgatagagcagtatagcgcaggccacctcgacatgctgtcccggattaagagccttcagtcccgggtggatcaaatcgtgggtagaggtcctgctattaccgataaggacagaaccaaaggaccagccgaggccgagctacctgaagaccccagcatgatgggtcgattgggcaaggtagagaagcaggttctcagcatggaaaagaagctggatttcctggtcaatatatacatgcaacgcatgggcatccctccgaccgagacggaagcttattttggggcaaaggagcctgagcctgcaccaccctaccattcacccgaggactctcgggagcacgtggatagacatggctgcatcgtcaagattgtgcgtagtagctcatcaactggccaaaaaaacttcagcgcccctcctgccgcacccccagtccagtgccccccaagtacctcttggcagccccagtctcaccccaggcaaggccatggcacgtcacccgtaggggatcacgggtccctggttcgaataccaccccctcctgcccatgaacggtccctaagcgcctacgggggtggcaatagagcttcgatggagtttctgaggcaggaggacaccccaggctgccggccacctgagggcaacctgagggactctgatactagtatatccatcccaagcgtggatcacgaagaattagaacgaagttttagcgggttttccatttctcagtctaaagagaatttggacgccctgaattcttgctacgcagcagtcgccccttgtgccaaagtgagaccatatattgcagagggggagagcgatacagacagcgatctttgcaccccttgtgggcctccccctcggagtgcaacaggggaagggccatttggagatgtcgggtgggccggtccccgcaagtag

SEQ ID NO: 147026 - DNA, 1311 bp, Artificial Sequence
  derived and/or modified sequence
atggtgcagaagagccggaacggcggcgtgtaccccggccccagcggcgagaagaaattgaaagtcgggttcgtcggtctcgaccctggagctccagactctacccgggacggggcactgctgatcgcgggcagtgaggcccctaaacgcggctctatcctgtccaagccgcgagctggtggcgccggagcaggcaagccgccgaagcgcaatgcgttctataggaagctgcagaatttcttgtataatgtcctcgagcggccgaggggttgggccttcatctaccatgcctacgtgtttttgcttgtgttcagttgcttggtactgagcgtgttttcaaccatcaaggagtacgagaagtcttccgaaggggctttgtacatcctggaaatagtgactattgtggtttttggtgtggagtatttcgttagaatttgggccgcaggctgctgttgcaggtaccgggggtggcgcggtcgtctcaagtttgcacggaagccattctgtgtaatcgacatcatggtccttatagccagtatcgctgtactggctgccgggagccaggggaacgtcttcgccacctccgcactcaggtcactgaggttcctgcagatcctccgtatgatccgaatggacagacggggcgggacctggaagctccttggatctgttgtctatgcccactccaaagagcttgtgaccgcctggtacataggattcctttgtctgattctcgcttccttcctagtgtaccttgcagaaaagggagaaaatgatcacttcgatacatatgcagacgcattatggtggggtctgattacactaaccaccatcggttacggagacaagtacccgcagacttggaatgggcgacttctcgctgccaccttcaccctgataggcgtgtcattctttgcccttcctgccggcattctcgggtcaggttttgcccttaaagtgcaggagcagcatcggcaaaaacactttgaaaaaagacgcaacccggcagctggtcttattcagtcagcgtggcgattttacgcaacaaacctctcccggaccgacctgcactcaacctggcaatactatgagcgtactgttactgtgccgatgtacaggctgatccctccccttaaccaacttgaactcttgcgtaacttaaaatccaaaagcggattagcgttccgcaaagaccctccacccgaaccctcccccagaagcgtccctcctgctgccaccttggtgtccgccgtgtgtacggccgtatggagtctgtcccatacatgcgcacagccagtaatggagatgtag

SEQ ID NO: 147027 - DNA, 2908 bp, Artificial Sequence
  derived and/or modified sequence
cggagcgaggtggccgcagcgtctccgcgcgcggcccaagcccggcaggagtgcggaaccgccgcctcggccatgcggctcccggccggggggcctgggctggggcccgcgccgccccccgcgctccgcccccgctgagcctgagcccgacccggggcgcctcccgccaggcaccatggtgcagaagtcgcgcaacggcggcgtataccccggcccgagcggggagaagaagctgaaggtgggcttcgtggggctggaccccggcgcgcccgactccacccgggacggggcgctgctgatcgccggctccgaggcccccaagcgcggcagcatcctcagcaaacctcgcgcgggcggcgcgggcgccgggaagccccccaagcgcaacgccttctaccgcaagctgcagaatttcctctacaacgtgctggagcggccgcgcggctgggcgttcatctaccacgcctacgtgttcctcctggttttctcctgcctcgtgctgtctgtgttttccaccatcaaggagtatgagaagagctcggagggggccctctacatcctggaaatcgtgactatcgtggtgtttggcgtggagtacttcgtgcggatctgggccgcaggctgctgctgccggtaccgtggctggagggggcggctcaagtttgcccggaaaccgttctgtgtgattgacatcatggtgctcatcgcctccattgcggtgctggccgccggctcccagggcaacgtctttgccacatctgcgctccggagcctgcgcttcctgcagattctgcggatgatccgcatggaccggcggggaggcacctggaagctgctgggctctgtggtctatgcccacagcaaggagctggtcactgcctggtacatcggcttcctttgtctcatcctggcctcgttcctggtgtacttggcagagaagggggagaacgaccactttgacacctacgcggatgcactctggtggggcctgatcacgctgaccaccattggctacggggacaagtacccccagacctggaacggcaggctccttgcggcaaccttcaccctcatcggtgtctccttcttcgcgctgcctgcaggcatcttggggtctgggtttgccctgaaggttcaggagcagcacaggcagaagcactttgagaagaggcggaacccggcagcaggcctgatccagtcggcctggagattctacgccaccaacctctcgcgcacagacctgcactccacgtggcagtactacgagcgaacggtcaccgtgcccatgtacagacttatccccccgctgaaccagctggagctgctgaggaacctcaagagtaaatctggactcgctttcaggaaggaccccccgccggagccgtctccaagccagaaggtcagtttgaaagatcgtgtcttctccagcccccgaggcgtggctgccaaggggaaggggtccccgcaggcccagactgtgaggcggtcacccagcgccgaccagagcctcgaggacagccccagcaaggtgcccaagagctggagcttcggggaccgcagccgggcacgccaggctttccgcatcaagggtgccgcgtcacggcagaactcagaagaagcaagcctccccggagaggacattgtggatgacaagagctgcccctgcgagtttgtgaccgaggacctgaccccgggcctcaaagtcagcatcagagccgtgtgtgtcatgcggttcctggtgtccaagcggaagttcaaggagagcctgcggccctacgacgtgatggacgtcatcgagcagtactcagccggccacctggacatgctgtcccgaattaagagcctgcagtccagagtggaccagatcgtggggcggggcccagcgatcacggacaaggaccgcaccaagggcccggccgaggcggagctgcccgaggaccccagcatgatgggacggctcgggaaggtggagaagcaggtcttgtccatggagaagaagctggacttcctggtgaatatctacatgcagcggatgggcatccccccgacagagaccgaggcctactttggggccaaagagccggagccggcgccgccgtaccacagcccggaagacagccgggagcatgtcgacaggcacggctgcattgtcaagatcgtgcgctccagcagctccacgggccagaagaacttctcggcgcccccggccgcgccccctgtccagtgtccgccctccacctcctggcagccacagagccacccgcgccagggccacggcacctcccccgtgggggaccacggctccctggtgcgcatcccgccgccgcctgcccacgagcggtcgctgtccgcctacggcgggggcaaccgcgccagcatggagttcctgcggcaggaggacaccccgggctgcaggccccccgaggggaacctgcgggacagcgacacgtccatctccatcccgtccgtggaccacgaggagctggagcgttccttcagcggcttcagcatctcccagtccaaggagaacctggatgctctcaacagctgctacgcggccgtggcgccttgtgccaaagtcaggccctacattgcggagggagagtcagacaccgactccgacctctgtaccccgtgcgggcccccgccacgctcggccaccggcgagggtccctttggtgacgtgggctgggccgggcccaggaagtgaggcggcgctgggccagtggacccgcccgcggccctcctcagcacggtgcctccgaggttttgaggcgggaaccctctggggcccttttcttacagtaactgagtgtggcgggaagggtgggccctggaggggcccatgtgggctgaaggatgggggctcctggcagtgaccttttacaaaagttattttccaacaggg

SEQ ID NO: 147028 - DNA, 1545 bp, Artificial Sequence
  derived and/or modified sequence
cggagcgaggtggccgcagcgtctccgcgcgcggcccaagcccggcaggagtgcggaaccgccgcctcggccatgcggctcccggccggggggcctgggctggggcccgcgccgccccccgcgctccgcccccgctgagcctgagcccgacccggggcgcctcccgccaggcaccatggtgcagaagtcgcgcaacggcggcgtataccccggcccgagcggggagaagaagctgaaggtgggcttcgtggggctggaccccggcgcgcccgactccacccgggacggggcgctgctgatcgccggctccgaggcccccaagcgcggcagcatcctcagcaaacctcgcgcgggcggcgcgggcgccgggaagccccccaagcgcaacgccttctaccgcaagctgcagaatttcctctacaacgtgctggagcggccgcgcggctgggcgttcatctaccacgcctacgtgttcctcctggttttctcctgcctcgtgctgtctgtgttttccaccatcaaggagtatgagaagagctcggagggggccctctacatcctggaaatcgtgactatcgtggtgtttggcgtggagtacttcgtgcggatctgggccgcaggctgctgctgccggtaccgtggctggagggggcggctcaagtttgcccggaaaccgttctgtgtgattgacatcatggtgctcatcgcctccattgcggtgctggccgccggctcccagggcaacgtctttgccacatctgcgctccggagcctgcgcttcctgcagattctgcggatgatccgcatggaccggcggggaggcacctggaagctgctgggctctgtggtctatgcccacagcaaggagctggtcactgcctggtacatcggcttcctttgtctcatcctggcctcgttcctggtgtacttggcagagaagggggagaacgaccactttgacacctacgcggatgcactctggtggggcctgatcacgctgaccaccattggctacggggacaagtacccccagacctggaacggcaggctccttgcggcaaccttcaccctcatcggtgtctccttcttcgcgctgcctgcaggcatcttggggtctgggtttgccctgaaggttcaggagcagcacaggcagaagcactttgagaagaggcggaacccggcagcaggcctgatccagtcggcctggagattctacgccaccaacctctcgcgcacagacctgcactccacgtggcagtactacgagcgaacggtcaccgtgcccatgtacagacttatccccccgctgaaccagctggagctgctgaggaacctcaagagtaaatctggactcgctttcaggaaggaccccccgccggagccgtctccaaggtcagtgccccctgctgctaccctggtgtctgccgtgtgcacggccgtctggtctctctcccacacgtgtgcgcaacctgtcatggagatgtgagggccttgtgtgtgcttccgtgtgtgactgtgtgactgcgggtccagacccccgcctgg

SEQ ID NO: 147029 - DNA, 2535 bp, Artificial Sequence
  derived and/or modified sequence
atggtgcagaagtctcgcaatggcggagtgtatccagggccatctggggagaaaaagctaaaagtcggattcgttggactcgatccaggagcacccgattccacccgggatggggcactgctgattgccggatccgaagctcccaaacgtggcagcattctaagtaaacccagagcaggcggagctggagctggaaaaccccctaaacggaatgcgttctatcggaaattacagaatttcctgtataacgtgctggagaggcctcggggttgggcattcatctaccatgcttacgtctttcttctggtgttcagctgccttgtgctgtcagttttctctactataaaggagtatgaaaagagctccgagggagccctctacatcctggagattgtgacaattgtcgtgtttggtgtcgagtatttcgtccggatctgggccgctggttgttgctgccggtacagagggtggcggggtcggctaaagttcgccagaaaaccattttgcgtaatcgacatcatggtgcttatagcaagcattgctgtcctggctgcaggcagtcaggggaacgtgttcgccacttctgcgctgaggagtctgcgcttcctgcagatactgcgcatgattcgcatggatcgcaggggcggtacatggaaattactgggctcggtggtgtatgcccattcaaaggagctggtgactgcctggtatattggctttctctgccttatcctcgcttcctttttggtttatttagcagaaaaaggggagaatgatcatttcgatacctatgctgatgcgctgtggtggggactcataaccttaacaacaattggctacggcgacaaatacccccaaacctggaacgggaggctgcttgcagccacctttacattaatcggggtctcattcttcgccctcccagctgggatcctgggctcaggttttgcattgaaagtgcaagagcagcataggcagaaacactttgagaaaagaagaaacccggctgctggcctcatccagtcagcgtggcggttctacgcgaccaacctttcacgcaccgatctccatagcacatggcagtactatgagcgcactgttaccgtgccgatgtatcgccttatccccccacttaatcagctggagctcctgagaaacctgaagtcaaagagcgggttggcttttcgtaaggatccacctcccgagccctcccctagccagaaggttagtcttaaagatcgagttttttccagtccgcgtggagtggccgcaaagggaaaaggcagtcctcaggctcaaacggttaggaggtctcctagcgccgaccaaagcttggaggattcacccagcaaggtgcctaaaagctggtcattcggggatcgcagcagagcgaggcaagcattcagaattaagggagcagctagccgacagaactcggaagaggcctcactgccaggggaagacatagttgatgacaagtcatgcccgtgtgagtttgtgacggaagatctcacgcccggactaaaggtaagcataagagccgtatgcgtcatgcgattcctcgtttccaagaggaaattcaaggagtcactacgcccttatgacgttatggacgtaattgaacagtattccgctggccatttggacatgctaagtcggataaagagtttgcagtcacgggttgaccagattgtgggcagagggcctgctattactgacaaggacagaactaaaggaccggctgaggctgaacttccagaagacccttccatgatgggtcgactgggcaaggtggagaaacaagtgctctctatggagaaaaagctcgattttctcgtgaacatctatatgcaaagaatgggaattccaccaacagaaacagaggcctactttggcgcaaaggaacctgagccagccccaccttaccactcccccgaagattcccgtgagcacgttgatcgtcacggatgtatcgtgaagatcgtgcgaagtagttccagtactgggcaaaagaattttagtgcgccacccgctgcccctccggttcagtgcccccctagcaccagttggcaacctcagtcacatccacggcaggggcacggaacctctcccgttggggatcatgggtccctggtgcgaatccccccaccccctgctcacgagaggagcctgagtgcctatgggggtgggaatcgcgcaagcatggaatttctgcggcaagaggatacccccggatgcaggcccccagaggggaatctgcgtgattcagatacatctatcagtattccatctgtggaccacgaagagttggagcgctcattcagcggtttttcgatctctcaaagcaaggagaatctggacgccctcaactcatgctacgccgcagttgccccttgtgcaaaggtcagaccgtacattgctgagggcgaatctgatacagatagcgacctgtgcacgccttgtggtcctccccctaggtctgctaccggtgagggcccatttggagatgtggggtgggcaggaccaagaaagtag

SEQ ID NO: 147030 - DNA, 1311 bp, Artificial Sequence
  derived and/or modified sequence
atggtgcagaaaagccgaaacggaggcgtgtatcccggtccctcaggggaaaagaaactcaaagtaggctttgtgggcttagacccaggtgcacccgattctactcgcgatggtgctctgctgattgcgggttccgaagctcccaagcgtggatctattctgagtaaacctcgtgctggcggagctggggcaggcaagcccccaaaaagaaacgccttctatagaaaattgcagaactttttatacaacgtgctggaacgcccaagagggtgggccttcatttaccatgcctacgtcttcttattagtgtttagttgtcttgtgctgtcagtgtttagcaccatcaaggagtatgagaaaagttccgaaggggcactgtacatcctggagatagtgaccattgttgtgtttggagttgagtatttcgtcagaatatgggcagcaggatgctgttgccgctaccggggatggcggggaagattaaaatttgccaggaagcctttctgtgttattgacatcatggtattgattgcaagtatcgctgtgctggccgcagggtcccagggcaacgtgttcgccacttcggcgttaaggtcccttcggttcttgcaaatactgaggatgataagaatggatcgccgtggaggaacatggaaattgcttgggagcgtggtgtatgcccattcaaaggagctggtcacagcctggtacattggcttcctatgcttaatcctggcgtcattcctagtgtacctcgcggagaagggcgaaaatgaccatttcgacacatatgctgatgctctgtggtggggactgatcaccctcaccacaatcggttacggcgacaaataccctcagacatggaacggcaggttgttagcagccacctttacccttatcggcgtttccttcttcgccttaccggcagggatactcggaagtggattcgctttgaaggtccaggaacagcacaggcagaaacactttgagaaacgccgtaacccagccgctgggctaattcagtccgcttggcgcttttacgccacaaacctgtctagaacggatttgcatagtacatggcagtactatgagcggactgttacagtccctatgtataggcttatccctcctctcaatcaacttgaattattgcggaatctgaagtccaagtcaggtctggctttccggaaggacccgccaccagagcctagcccccgaagcgtaccccctgccgcaactctcgtgagtgctgtttgcaccgctgtttggtccctcagccacacatgcgcccagccagtaatggagatgtag

SEQ ID NO: 147031 - DNA, 2535 bp, Artificial Sequence
  derived and/or modified sequence
atggtgcagaagagcagaaacggcggcgtgtaccccggccccagcggcgagaagaagctgaaggtgggcttcgtgggcctggaccccggcgcccccgacagcaccagagacggcgccctgctgatcgccggcagcgaggcccccaagagaggcagcatcctgagcaagcccagagccggcggcgccggcgccggcaagccccccaagagaaacgccttctacagaaagctgcagaacttcctgtacaacgtgctggagagacccagaggctgggccttcatctaccacgcctacgtgttcctgctggtgttcagctgcctggtgctgagcgtgttcagcaccatcaaggagtacgagaagagcagcgagggcgccctgtacatcctggagatcgtgaccatcgtggtgttcggcgtggagtacttcgtgagaatctgggccgccggctgctgctgcagatacagaggctggagaggcagactgaagttcgccagaaagcccttctgcgtgatcgacatcatggtgctgatcgccagcatcgccgtgctggccgccggcagccagggcaacgtgttcgccaccagcgccctgagaagcctgagattcctgcagatcctgagaatgatcagaatggacagaagaggcggcacctggaagctgctgggcagcgtggtgtacgcccacagcaaggagctggtgaccgcctggtacatcggcttcctgtgcctgatcctggccagcttcctggtgtacctggccgagaagggcgagaacgaccacttcgacacctacgccgacgccctgtggtggggcctgatcaccctgaccaccatcggctacggcgacaagtacccccagacctggaacggcagactgctggccgccaccttcaccctgatcggcgtgagcttcttcgccctgcccgccggcatcctgggcagcggcttcgccctgaaggtgcaggagcagcacagacagaagcacttcgagaagagaagaaaccccgccgccggcctgatccagagcgcctggagattctacgccaccaacctgagcagaaccgacctgcacagcacctggcagtactacgagagaaccgtgaccgtgcccatgtacagactgatcccccccctgaaccagctggagctgctgagaaacctgaagagcaagagcggcctggccttcagaaaggaccccccccccgagcccagccccagccagaaggtgagcctgaaggacagagtgttcagcagccccagaggcgtggccgccaagggcaagggcagcccccaggcccagaccgtgagaagaagccccagcgccgaccagagcctggaggacagccccagcaaggtgcccaagagctggagcttcggcgacagaagcagagccagacaggccttcagaatcaagggcgccgccagcagacagaacagcgaggaggccagcctgcccggcgaggacatcgtggacgacaagagctgcccctgcgagttcgtgaccgaggacctgacccccggcctgaaggtgagcatcagagccgtgtgcgtgatgagattcctggtgagcaagagaaagttcaaggagagcctgagaccctacgacgtgatggacgtgatcgagcagtacagcgccggccacctggacatgctgagcagaatcaagagcctgcagagcagagtggaccagatcgtgggcagaggccccgccatcaccgacaaggacagaaccaagggccccgccgaggccgagctgcccgaggaccccagcatgatgggcagactgggcaaggtggagaagcaggtgctgagcatggagaagaagctggacttcctggtgaacatctacatgcagagaatgggcatcccccccaccgagaccgaggcctacttcggcgccaaggagcccgagcccgcccccccctaccacagccccgaggacagcagagagcacgtggacagacacggctgcatcgtgaagatcgtgagaagcagcagcagcaccggccagaagaacttcagcgccccccccgccgccccccccgtgcagtgcccccccagcaccagctggcagccccagagccaccccagacagggccacggcaccagccccgtgggcgaccacggcagcctggtgagaatcccccccccccccgcccacgagagaagcctgagcgcctacggcggcggcaacagagccagcatggagttcctgagacaggaggacacccccggctgcagaccccccgagggcaacctgagagacagcgacaccagcatcagcatccccagcgtggaccacgaggagctggagagaagcttcagcggcttcagcatcagccagagcaaggagaacctggacgccctgaacagctgctacgccgccgtggccccctgcgccaaggtgagaccctacatcgccgagggcgagagcgacaccgacagcgacctgtgcaccccctgcggccccccccccagaagcgccaccggcgagggccccttcggcgacgtgggctgggccggccccagaaagtag

SEQ ID NO: 147032 - DNA, 1311 bp, Artificial Sequence
  derived and/or modified sequence
atggtgcagaagagcagaaacggcggcgtgtaccccggccccagcggcgagaagaagctgaaggtgggcttcgtgggcctggaccccggcgcccccgacagcaccagagacggcgccctgctgatcgccggcagcgaggcccccaagagaggcagcatcctgagcaagcccagagccggcggcgccggcgccggcaagccccccaagagaaacgccttctacagaaagctgcagaacttcctgtacaacgtgctggagagacccagaggctgggccttcatctaccacgcctacgtgttcctgctggtgttcagctgcctggtgctgagcgtgttcagcaccatcaaggagtacgagaagagcagcgagggcgccctgtacatcctggagatcgtgaccatcgtggtgttcggcgtggagtacttcgtgagaatctgggccgccggctgctgctgcagatacagaggctggagaggcagactgaagttcgccagaaagcccttctgcgtgatcgacatcatggtgctgatcgccagcatcgccgtgctggccgccggcagccagggcaacgtgttcgccaccagcgccctgagaagcctgagattcctgcagatcctgagaatgatcagaatggacagaagaggcggcacctggaagctgctgggcagcgtggtgtacgcccacagcaaggagctggtgaccgcctggtacatcggcttcctgtgcctgatcctggccagcttcctggtgtacctggccgagaagggcgagaacgaccacttcgacacctacgccgacgccctgtggtggggcctgatcaccctgaccaccatcggctacggcgacaagtacccccagacctggaacggcagactgctggccgccaccttcaccctgatcggcgtgagcttcttcgccctgcccgccggcatcctgggcagcggcttcgccctgaaggtgcaggagcagcacagacagaagcacttcgagaagagaagaaaccccgccgccggcctgatccagagcgcctggagattctacgccaccaacctgagcagaaccgacctgcacagcacctggcagtactacgagagaaccgtgaccgtgcccatgtacagactgatcccccccctgaaccagctggagctgctgagaaacctgaagagcaagagcggcctggccttcagaaaggaccccccccccgagcccagccccagaagcgtgccccccgccgccaccctggtgagcgccgtgtgcaccgccgtgtggagcctgagccacacctgcgcccagcccgtgatggagatgtag

SEQ ID NO: 147033 - protein, 872 aa, Artificial Sequence
  derived and/or modified sequence
MGLKARRAAGAAGGGGDGGGGGGGAANPAGGDAAAAGDEERKVGLAPGDVEQVTLALGAGADKDGTLLLEGGGRDEGQRRTPQGIGLLAKTPLSRPVKRNNAKYRRIQTLIYDALERPRGWALLYHALVFLIVLGCLILAVLTTFKEYETVSGDWLLLLETFAIFIFGAEFALRIWAAGCCCRYKGWRGRLKFARKPLCMLDIFVLIASVPVVAVGNQGNVLATSLRSLRFLQILRMLRMDRRGGTWKLLGSAICAHSKELITAWYIGFLTLILSSFLVYLVEKDVPEVDAQGEEMKEEFETYADALWWGLITLATIGYGDKTPKTWEGRLIAATFSLIGVSFFALPAGILGSGLALKVQEQHRQKHFEKRRKPAAELIQAAWRYYATNPNRIDLVATWRFYESVVSFPFFRKEQLEAASSQKLGLLDRVRLSNPRGSNTKGKLFTPLNVDAIEESPSKEPKPVGLNNKERFRTAFRMKAYAFWQSSEDAGTGDPMAEDRGYGNDFPIEDMIPTLKAAIRAVRILQFRLYKKKFKETLRPYDVKDVIEQYSAGHLDMLSRIKYLQTRIDMIFTPGPPSTPKHKKSQKGSAFTFPSQQSPRNEPYVARPSTSEIEDQSMMGKFVKVERQVQDMGKKLDFLVDMHMQHMERLQVQVTEYYPTKGTSSPAEAEKKEDNRYSDLKTIICNYSETGPPEPPYSFHQVTIDKVSPYGFFAHDPVNLPRGGPSSGKVQATPPSSATTYVERPTVLPILTLLDSRVSCHSQADLQGPYSDRISPRQRRSITRDSDTPLSLMSVNHEELERSPSGFSISQDRDDYVFGPNGGSSWMREKRYLAEGETDTDTDPFTPSGSMPLSSTGDGISDSVWTPSNKPI

SEQ ID NO: 147034 - protein, 849 aa, Artificial Sequence
  derived and/or modified sequence
RAAAEKAKRPAGARQMGLKARRAAAGDEERKVGLAPGDVEQVTLALGAGADKDGTLLLEGGGRDEGQRRTPQGIGLLAKTPLSRPVKRNNAKYRRIQTLIYDALERPRGWALLYHALVFLIVLGCLILAVLTTFKEYETVSGDWLLLLETFAIFIFGAEFALRIWAAGCCCRYKGWRGRLKFARKPLCMLDIFVLIASVPVVAVGNQGNVLATSLRSLRFLQILRMLRMDRRGGTWKLLGSAICAHSKELITAWYIGFLTLILSSFLVYLVEKDVPEVDAQGEEMKEEFETYADALWWGLITLATIGYGDKTPKTWEGRLIAATFSLIGVSFFALPAGILGSGLALKVQEQHRQKHFEKRRKPAAELIQAAWRYYATNPNRIDLVATWRFYESVVSFPFFRKEQLEAASSQKLGLLDRVRLSNPRGSNTKGKLFTPLNVDAIEESPSKEPKPVGLNNKERFRTAFRMKAYAFWQSSEDAGTGDPMAEDRGYGNDFPIEDMIPTLKAAIRAVRILQFRLYKKKFKETLRPYDVKDVIEQYSAGHLDMLSRIKYLQTRIDMIFTPGPPSTPKHKKSQKGNEPYVARPSTSEIEDQSMMGKFVKVERQVQDMGKKLDFLVDMHMQHMERLQVQVTEYYPTKGTSSPAEAEKKEDNRYSDLKTIICNYSETGPPEPPYSFHQVTIDKVSPYGFFAHDPVNLPRGGPSSGKVQATPPSSATTYVERPTVLPILTLLDSRVSCHSQADLQGPYSDRISPRQRRSITRDSDTPLSLMSVNHEELERSPSGFSISQDRDDYVFGPNGGSSWMREKRYLAEGETDTDTDPFTPSGSMPLSSTGDGISDSVWTPSNKPI

SEQ ID NO: 147035 - DNA, 2619 bp, Artificial Sequence
  derived and/or modified sequence
atgggtctgaaagctagaagagctgccggtgcagccggaggaggcggcgatgggggcggaggcggtggaggggcggccaatccagctgggggagacgcggccgcagccggcgatgaagagcggaaggttgggctggctccaggggatgtcgagcaagtgacactggccttaggtgccggtgccgacaaagatggcacattactcttagaaggcggaggcagggacgagggtcaacgccgaaccccccaggggattggtctgctagcgaagaccccactgtcacgccccgtcaagcgcaacaatgctaaataccgtcgtatccaaacacttatttacgacgcactggagagacccaggggttgggccctgctctaccatgcgttggtattcttaatcgtcttggggtgcctgattttagcagtactgacgacttttaaggagtatgagacagtgtccggggattggctgctacttcttgagacattcgccatttttatattcggggcagaattcgcactgcgcatctgggccgccggatgctgttgcaggtacaagggatggcggggcagactgaaattcgctcgcaagccactgtgtatgctggacattttcgtcttgatagcgagcgttcctgtggtggcagtcggaaatcagggcaacgttcttgcgacgagtctcagatcgttgcgattcctgcagattctccgaatgcttagaatggatcgccgcggaggtacctggaagttattgggaagcgcaatatgtgcacattctaaagaactaataacggcttggtacatcggtttcctgactttgatcctttcctcttttctggtgtatctggtggaaaaagacgtgcccgaggttgacgcgcagggagaagagatgaaagaagaattcgaaacctatgctgacgccctctggtggggactcattacactggctactattggctatggggacaagaccccgaaaacctgggaggggcgtctcatagcagcaaccttctccctgataggagtgtcgtttttcgcacttcccgcaggcattctgggttccgggctggcactgaaggttcaggagcaacacagacagaaacacttcgagaagcgtcgaaagcctgccgcagaattaatacaggcggcctggcgatattacgcaaccaacccgaaccgcatcgacctggttgctacctggcgcttttatgaatccgtggtatctttcccgttcttcaggaaagagcagctcgaggccgccagctcccagaagctaggacttttggaccgggttaggctgagtaacccacgaggatcgaataccaaaggaaagctatttaccccactcaacgtggatgcaatcgaggagtccccctctaaggagccaaagcccgtgggtctcaataacaaagagcgttttcgcacagcgtttaggatgaaggcatatgctttctggcagtcatcagaagatgcaggaactggcgatcccatggctgaagaccgggggtatggaaatgattttcctatcgaagatatgatccccacactcaaagcagctatacgagccgtccgcattctgcagtttcgtctttacaaaaaaaaatttaaagaaacactgcgcccatacgatgttaaggatgtgattgaacagtactccgctggacatttggatatgctatctcggattaaatacctccagactcggatcgacatgatctttaccccgggcccaccctcaactccaaagcacaaaaaatcacagaagggctcagcgttcacattcccgtcgcaacagtccccgcggaatgaaccatatgtggcacgcccttctacatctgagatcgaagaccaatctatgatgggtaaattcgtaaaagtcgaaaggcaggtgcaggatatgggcaaaaaactcgatttcctggttgatatgcacatgcagcatatggaacgtcttcaggttcaggttaccgagtattatcctaccaaagggacatcgagccccgccgaggccgagaagaaagaagataatcgttactccgacttaaagacaataatatgtaattatagcgaaaccggaccaccagagcccccatattctttccaccaggtgaccatagacaaggtcagtccctacggcttctttgctcatgacccagtgaacctcccccggggcggaccatcctccgggaaagtgcaggctactccgcccagctctgccaccacctatgtggagcgcccgacagtgcttccaattctcacactcctcgacagcagagtttcttgccacagccaagccgacctgcaaggaccttacagtgatcggatcagtcctaggcagcggagatccattactagagactctgacacacctctgtccctgatgtcggtgaaccatgaggagttggagcggtcaccttccggcttcagcatttcacaagacagagatgactacgtttttggccccaacgggggctcctcttggatgcgagagaagaggtacttagcagaaggcgagactgatactgatacagatccgtttaccccctctggtagtatgccactctctagtaccggggatggaatcagcgacagcgtctggacaccctctaataaacccatttag

SEQ ID NO: 147036 - DNA, 2550 bp, Artificial Sequence
  derived and/or modified sequence
agggcggccgcggagaaggcgaagcgtccagccggtgcacggcagatgggtctgaaggcccgacgtgcggccgctggggacgaagagcgcaaagttggactggctcccggcgatgtggagcaagttacactggctctgggcgccggcgccgataaggacggtacacttctgctcgagggtggcggaagggacgagggacagcgccgcactcctcagggtatcggccttttggctaagacccccctgagtaggcccgtcaaaaggaacaacgctaagtaccggagaattcaaacactgatctacgatgccctggagcgaccaagagggtgggctctgctttatcacgccttggttttcttgatagtcctgggttgcctgattttggctgtactcacgacctttaaagagtacgagacggtatctggggactggctcctgttgcttgagacatttgcgatcttcatattcggcgccgaattcgcactgaggatttgggctgcaggctgctgctgcaggtataagggctggagaggaaggctgaagtttgcgcgcaaaccactgtgcatgctggacatttttgtgctgattgcctcagtgccagttgtggcggtcggaaaccaaggaaacgtgctcgctacatcattgcgctcgcttcgatttctgcaaattctccgcatgctgcggatggacagacgtggcggaacttggaagctgctcggctcagccatctgcgctcactctaaagagctgataactgcctggtacattggtttcctaaccttaattcttagcagtttcctggtgtatctcgtagagaaggacgtgcctgaagtggatgcccagggcgaggagatgaaagaagagtttgagacttatgcggatgccttgtggtggggtttgatcacgctggctaccatagggtacggcgacaaaaccccaaaaacctgggaaggaagactgattgccgcaacattcagcctgatcggcgtgagctttttcgctctgccagccggaatactggggagtggtcttgcactgaaggttcaggagcagcaccgacagaaacattttgaaaaaaggagaaagcccgccgcagaactcatacaggcagcctggagatattacgccactaatcccaaccgcattgatttagtggcaacgtggcgcttttatgagagtgtggtaagtttcccatttttccggaaagagcagctggaggccgcttcgtcccagaagctcgggctgctggaccgcgttcgccttagcaatccccgcggctccaacacaaaggggaagctcttcacaccactcaatgtcgatgctatcgaggaaagcccctcgaaggagcccaagcctgtgggcctgaacaacaaggaacgatttaggactgcttttagaatgaaagcctatgccttctggcagagctctgaagatgccggcaccggcgaccccatggcagaagaccggggatatggaaacgacttccctattgaagacatgattccaaccctgaaggccgctattcgggccgtccggattcttcaattcagactgtacaaaaaaaagtttaaggagactctccgcccgtatgacgtgaaggacgtcatcgagcagtattccgcagggcacctcgatatgctaagtaggataaaatacctgcagacccgtattgatatgatcttcacacccgggccacctagtactccaaagcacaaaaagtctcagaagggaaacgaaccttacgtcgcacgcccctccacatccgagattgaggaccagagcatgatgggaaaatttgtcaaggtagagcggcaggtccaagacatgggcaagaagctcgactttctggtcgatatgcacatgcagcacatggagagactccaggtgcaggtgaccgagtattatcctactaaaggaacatcatctcccgccgaggctgagaaaaaagaagataatagatactctgacctcaaaactatcatctgcaactattctgagaccgggccacctgagcctccttactcatttcaccaggtcaccattgataaagtgtctccttacggattcttcgcacatgacccagtcaacctgcctcgtggaggacccagttctggtaaggtccaggcgacccctccttcctctgcaaccacgtacgttgaaagaccaacggtcttgccaatccttactctgctcgattccagggtttcatgccactcccaggccgacctacagggtccatactccgatcgaatttctccccggcaacgtagatccattactcgcgatagtgacaccccactgtccctgatgtccgtgaatcacgaggaactcgagagatcccccagtggcttctctatatcccaagaccgtgacgactacgtatttggacccaacggtggaagctcctggatgagggaaaagaggtacctggcagagggcgagaccgacacggacaccgatccttttacaccctccggctctatgccgctgagctctacaggcgatggcataagtgactcagtgtggaccccttccaataaacccatctag

SEQ ID NO: 147037 - DNA, 2619 bp, Artificial Sequence
  derived and/or modified sequence
atgggcctgaaggcccggcgggctgctggagctgctgggggcggcggagatggcggcggcggcggcggcggggccgccaacccagctggaggagatgctgctgctgctggagatgaggagaggaaggtgggcctggcccctggagatgtggagcaggtgaccctggccctgggcgctggagctgacaaggatggcaccctgctgctggagggcggcggcagagatgagggccagaggaggaccccccagggcatcggcctgctggccaagacccccctgagcaggcctgtgaagagaaataatgccaagtaccgccgcatccagaccctcatctatgatgccctggagcggccccggggctgggccctgctgtaccacgccctggtgttcctgattgtgctgggctgcctgatcctggccgtgctgaccaccttcaaggagtatgagaccgtgtctggggactggctgctgctgctggagacctttgccatcttcatctttggagctgagtttgccctgcgcatctgggccgccggctgctgctgccgctacaagggctggaggggccgcctgaagtttgccaggaagcccctgtgcatgctggacatctttgtgctgattgcctctgtgcctgtggtggccgtgggcaaccagggcaatgtgctggccaccagcctgcggagcctgcgcttcctgcagatcctgaggatgctgaggatggaccggcggggcggcacctggaagctgctgggcagcgccatctgtgcccacagcaaggagctgatcacagcctggtacatcggcttcctgaccctcatcctgagcagcttcctggtgtacctggtggagaaggatgtgcctgaggtggatgcccagggcgaggagatgaaggaggagtttgagacctatgcagatgccctgtggtggggcctcatcaccctggccaccatcggctatggagacaagacccccaagacctgggagggccgcctgattgctgccaccttcagcctgattggagtgtccttctttgccctgcctgctggcatcctgggcagcggcctggccctgaaggtgcaggagcagcaccggcagaagcactttgagaagaggaggaagccagctgctgagctgatccaggccgcctggagatactatgccaccaaccccaacagaattgacctggtggccacctggaggttctatgagagcgtggtgtccttccccttcttcaggaaggagcagctggaggccgccagcagccagaagctgggcctgctggacagagtgcggctgagcaacccccggggcagcaacaccaagggcaagctgttcacccccctgaatgtggatgccatcgaggagagccccagcaaggagcccaagcctgtgggcctgaacaacaaggagcgcttcagaacagccttcaggatgaaggcctatgccttctggcagagcagtgaagatgctggcaccggggaccccatggccgaggaccggggctatggaaatgacttccccatcgaggacatgatccccaccctgaaggccgccatccgggctgtgcgcatcctgcagttccggctgtacaagaagaagttcaaggagaccctgcggccctatgatgtgaaggatgtgattgagcagtacagcgctggccacctggacatgctgagccgcatcaagtacctgcagaccagaattgacatgatcttcaccccaggcccccccagcacccccaagcacaagaagagccagaagggcagcgccttcaccttccccagccagcagagccccagaaatgagccctacgtggcccggcccagcaccagcgagattgaggaccagagcatgatgggcaagtttgtgaaggtggagcggcaggtgcaggacatgggcaagaagctggacttcctggtggacatgcacatgcagcacatggagcggctgcaggtgcaggtgacagagtactaccccaccaagggcaccagcagccctgctgaggccgagaagaaggaggacaaccgctacagcgacctgaagaccatcatctgcaactacagcgagaccggccccccagagcccccctacagcttccaccaggtgaccatcgacaaggtgagcccctacggcttctttgcccatgaccctgtgaacctgccccggggcggccccagcagcggcaaggtgcaggccaccccacccagcagcgccaccacctacgtggagcggcccaccgtgctgcccatcctgaccctgctggacagccgggtgtcctgccacagccaggccgacctgcagggcccctacagcgaccgcatcagcccccggcagaggaggagcatcacccgggacagcgacacccccctgagcctgatgtctgtgaaccacgaggagctggagaggagccccagcggcttcagcatcagccaggacagagatgattatgtgtttggccccaatggaggcagctcctggatgagggagaagcgctacctggccgagggggagacagacacagacacagaccccttcacccccagcggctccatgcccctgagcagcactggagatggcatcagtgacagcgtgtggacccccagcaacaagcccatctag

SEQ ID NO: 147038 - DNA, 2550 bp, Artificial Sequence
  derived and/or modified sequence
cgggctgctgctgagaaggccaagaggcctgctggggcccggcagatgggcctgaaggccaggagagctgctgctggagatgaggagaggaaggtgggcctggcccctggagatgtggagcaggtgaccctggccctgggcgctggagctgacaaggatggcaccctgctgctggagggcggcggcagagatgagggccagaggaggaccccccagggcatcggcctgctggccaagacccccctgagcaggcctgtgaagaggaacaatgccaagtaccgccgcatccagaccctcatctatgatgccctggagcggccccggggctgggccctgctgtaccacgccctggtgttcctgattgtgctgggctgcctgatcctggccgtgctgaccaccttcaaggagtatgaaacagtgtctggggactggctgctgctgctggagacctttgccatcttcatctttggagctgagtttgccctgcgcatctgggccgccggctgctgctgccgctacaagggctggaggggccgcctgaagtttgccaggaagcccctgtgcatgctggacatctttgtgctgattgcctctgtgcctgtggtggccgtgggcaaccagggcaatgtgctggccaccagcctgcggagcctgcgcttcctgcagatcctgaggatgctgaggatggacagaagaggaggcacctggaagctgctgggcagcgccatctgtgcccacagcaaggagctgatcacagcctggtacatcggcttcctgaccctcatcctgagcagcttcctggtgtacctggtggagaaggatgtgcctgaggtggatgcccagggcgaggagatgaaggaggagtttgagacctatgcagatgccctgtggtggggcctcatcaccctggccaccatcggctacggggacaagacccccaagacctgggagggccgcctgattgctgccaccttcagcctcatcggcgtgtccttctttgccctgcctgctggcatcctgggcagcggcctggccctgaaggtgcaggagcagcaccggcagaagcactttgagaagaggaggaagccagctgctgagctgatccaggccgcctggagatactatgccaccaaccccaacagaattgacctggtggccacctggaggttctatgaatctgtggtgtccttccccttcttcaggaaggagcagctggaggccgccagcagccagaagctgggcctgctggacagagtgcggctgagcaacccccggggcagcaacaccaagggcaagctgttcacccccctgaatgtggatgccatcgaggagagccccagcaaggagcccaagcctgtgggcctgaacaacaaggagcgcttcagaacagccttcaggatgaaggcctatgccttctggcagagcagtgaagatgctggcactggagaccccatggctgaagatcggggctatggaaatgacttccccatcgaggacatgatccccaccctgaaggccgccatccgggctgtgcgcatcctgcagttccggctgtacaagaagaagttcaaggagaccctgcggccctatgatgtgaaggatgtgattgagcagtacagcgctggccacctggacatgctgagccgcatcaagtacctgcagaccagaattgacatgatcttcaccccaggcccccccagcacccccaagcacaagaagagccagaagggaaatgagccctacgtggcccggcccagcaccagcgagattgaggaccagagcatgatgggcaagtttgtgaaggtggagcggcaggtgcaggacatgggcaagaagctggacttcctggtggacatgcacatgcagcacatggagcggctgcaggtgcaggtgacagagtactaccccaccaagggcaccagcagccctgctgaggccgagaagaaggaggacaaccgctacagcgacctgaagaccatcatctgcaactacagcgagactggacctcctgagcccccctacagcttccaccaggtgaccatcgacaaggtgagcccctacggcttctttgcccatgaccctgtgaacctgccccggggcggccccagcagcggcaaggtgcaggccaccccacccagcagcgccaccacctacgtggagcggcccaccgtgctgcccatcctgaccctgctggacagccgggtgtcctgccacagccaggccgacctgcagggcccctacagcgaccgcatcagcccccggcagaggaggagcatcacccgggacagcgacacccccctgagcctgatgtctgtgaaccacgaggagctggagaggagccccagcggcttcagcatcagccaggacagagatgattatgtgtttggccccaacggcggcagctcctggatgagggagaagcgctacctggccgagggggagacagacacagacacagaccccttcaccccatctggctccatgcccctgagcagcactggagatggcatcagtgacagcgtgtggacccccagcaacaagcccatctag

SEQ ID NO: 147039 - DNA, 2619 bp, Artificial Sequence
  derived and/or modified sequence
atgggcctgaaggcccggcgggccgccggcgccgccggcggcggcggtgacggcggaggcggaggagggggcgcggctaatcccgccgggggagatgctgctgccgcaggagatgaagaaaggaaggtggggctggcacctggcgatgtcgaacaggtaacactcgccctgggggcaggcgcagacaaggatggcactcttttactggaaggtgggggccgggacgaaggacaacgcagaacaccccaggggatcgggctgctcgctaaaactcctctgtctagacccgtcaaacgcaacaacgctaaatataggcggattcagacgctgatttatgatgcgctcgaaagaccccgggggtgggctctcctttatcacgcacttgtgttcctaattgtgctgggatgtctaatcctggcagtgctgacaacttttaaggagtacgagaccgtctccggcgactggctgctcctcctggagacatttgctatatttatttttggagccgaattcgccctgcggatctgggcggccggatgctgctgcaggtacaagggttggagaggcaggcttaagttcgccagaaaacccctgtgcatgcttgacatcttcgtcctcatcgccagcgtcccagttgtagccgtaggaaaccagggtaacgttttagcaactagcctacgaagcctgcggttcctacagatcctgcggatgctacgaatggatagacggggaggaacctggaaactgctggggtcggcaatctgcgcgcattccaaggagctcattactgcctggtacattggcttcttaaccctgatcctgtcctcattccttgtttacctggtggaaaaggatgtgccagaagttgacgcgcaaggtgaggaaatgaaagaagaatttgaaacgtatgcagacgccctctggtggggcctcattactctggccactataggatatggcgacaaaacccccaaaacttgggagggaaggctcatagctgctactttttctctgattggagtgtcttttttcgctctgcccgctggcattttggggtcaggactggccctgaaagtccaagagcaacaccgacagaagcatttcgaaaaaagacgaaaaccagccgcagagctgattcaggccgcgtggaggtactatgccacgaatcctaaccgtattgacctggttgctacgtggcgcttttacgaatcagtcgtttccttcccgttctttcgaaaagagcaactggaggccgcatcctcacagaagctcggcttgctcgatcgcgtgcgattgtccaacccccgcggcagcaataccaaaggtaagctcttcaccccccttaatgtggatgcgatcgaggagagtccatccaaggaacccaaacccgtgggactcaataacaaggagcgattccggacagcctttcggatgaaagcctacgcattctggcaatcttcagaagacgccggcaccggagaccccatggcagaggaccggggttacggcaacgatttccctattgaagatatgatccctaccctgaaagccgctatacgcgcggtgcggattttacagttccgcctgtataagaagaagttcaaagagacacttagaccatacgacgtgaaggatgtgatagagcaatatagtgcgggtcatctggatatgctcagtaggatcaagtatctccagaccagaatcgatatgatcttcacaccagggccgccgagcactccgaaacataagaaatcacaaaagggttccgcatttactttcccttcccagcagtccccaaggaatgagccctatgtagctcgcccttcaacctcagagatcgaggaccagagcatgatgggcaagttcgtcaaagtggagagacaggtgcaagatatgggcaagaagttggacttcctcgtggacatgcacatgcagcatatggagcgcttgcaggtccaggtgaccgaatattaccctacgaaggggacctcctcacccgccgaagcagaaaaaaaggaggacaatagatactccgacttaaagaccataatctgtaactattctgaaaccgggcccccagagcctccatactctttccatcaggttacaattgataaggtaagcccctatggttttttcgctcatgatcctgtgaacttacccagaggaggaccttccagtgggaaagtgcaggccacccctccttcgagcgccacaacgtacgtggagcggcctaccgtacttccaatccttactttgctcgatagtcgcgtcagttgtcacagtcaggccgacctacaaggcccgtactctgacaggatctccccccggcagcggagatccataacccgggactctgataccccactaagcctgatgagcgtgaatcacgaggagcttgagaggtctcccagcggtttctcaatatcacaagacagggacgattacgtgttcgggcccaacggcggctcctcttggatgagggaaaagaggtatctcgcggaaggggaaacagataccgatactgatccatttaccccctcggggagcatgcctctgtcaagtaccggcgatgggatatccgacagcgtttggactccaagtaataaacctatttag

SEQ ID NO: 147040 - DNA, 2550 bp, Artificial Sequence
  derived and/or modified sequence
cgggccgccgccgagaaggccaagcggcccgccggcgcccggcagatgggactgaaggcacggcgggccgccgcaggtgacgaagaacggaaggtcggtcttgcccccggagatgtcgaacaagttaccctcgcactgggggccggggccgacaaggacggcactctgttgcttgagggggggggtagggacgagggacagcgtcggactcctcagggcatcggactgttggctaagactcccttaagtaggcccgtgaaacgtaacaatgccaaataccggagaattcagactctcatttacgatgctctcgagaggccgcgcggctgggctctgctttaccacgctttagtgttcctgatagtgctcgggtgtctaattctggctgtgctcaccacgtttaaagaatacgaaacagtgagcggagactggctgctcttgctggaaacgtttgccatctttatctttggggcagagttcgccctgaggatctgggccgctgggtgctgctgcaggtacaaaggctggcgaggcaggctgaagtttgcccggaaacctctttgcatgctggacatattcgtcctgattgccagtgtgcccgttgtggctgtgggcaatcagggaaatgtccttgccacctcactgagaagcctgaggtttttacagatccttcgcatgctgcgcatggatcggcgggggggaacctggaaattacttgggtcagcaatctgtgcacacagtaaagagttgatcaccgcctggtacatcggttttctgaccctgatactgtcctccttcctagtttatctagtggagaaagacgtgccagaagtagacgcccaaggcgaggaaatgaaagaagagttcgaaacatacgccgacgccctctggtggggcctgattacgctggcaaccataggatacggagataagactcccaaaacatgggaaggccgccttattgctgcaactttctcactgatcggcgtgtctttctttgccctgcctgccggtatcctgggaagcggccttgcacttaaggtgcaggagcaacaccgacagaagcattttgaaaaacgcagaaaacctgcagccgagttgattcaagccgcctggcggtactatgccactaacccgaaccggattgatcttgttgccacctggcggttctatgagagtgtggtctcatttccatttttccgtaaggagcagttggaggcggcatcatcccagaaactgggccttctggatcgcgtgcggctgtctaatcctcgcggaagtaataccaagggaaagctctttactccactaaatgtagatgctatcgaagagtcccccagcaaggagcctaaacctgtcggactgaataataaggaaagattcaggacagcatttagaatgaaggcctatgccttctggcagagctccgaggatgccgggactggtgacccgatggctgaagacagaggttacggcaacgacttccctatcgaagatatgatccccacgctgaaggccgccattagggcggtcaggatcctgcagtttcgcctgtacaagaagaagttcaaggagacgttgcgcccctacgatgtgaaggatgtaattgagcaatacagtgccggacacctggatatgctgagccgaattaaatacttacagaccagaatagatatgatcttcactccaggacccccttctacgcctaaacacaaaaagtcccagaaaggaaacgaaccatacgtcgcgcgtccctcaacatctgagatcgaagatcaaagcatgatgggaaaatttgtgaaggtggagcgccaagtgcaggatatgggcaaaaaactggacttcctggtggatatgcatatgcagcatatggagcgtttgcaggtgcaggttactgagtattatcctacgaagggcacctcatccccagcagaagcagaaaaaaaagaggacaatcgctacagcgacctgaagacgattatttgcaattactcagagactggtcctccagagccaccatacagttttcatcaggtgacaatcgataaggttagtccttacggtttttttgcccacgaccctgttaatttgcccagaggaggcccgtcctccggcaaggttcaggccacaccgccatcgagcgcgaccacgtacgtcgagcgacccaccgtgctgcctatccttacattgctcgactcacgagtgtcttgtcactctcaggccgacttacaggggccatattctgataggatcagcccccggcagcggagaagcattacccgcgactctgatacaccactgtccctcatgtcagtcaatcatgaggagttggagcggagtccaagcgggtttagcatttcccaggatagggatgattacgtctttggacccaatgggggttcatcatggatgcgggagaaaaggtacctggctgaaggggagacagatacagatacagacccttttacaccctccggttcaatgcctctgtccagcacaggggatggcattagcgattctgtgtggacacccagtaacaaacccatatag

SEQ ID NO: 147041 - DNA, 5356 bp, Artificial Sequence
  derived and/or modified sequence
ggctggcaccgggcttgtaaataaactgcgatgctgtcttgggctcgccggcctgggtgccgccgccgccgccgccgccccggagcgccggttccaggctcccgccgccgcgcgccctagcgcctccgcgccagcctcgcgcgccctcccagcttctccgcagcccccggcccgcgaccctcggggtcctgcggctgacccgcgcgggatgtgaccccctgaccccctgcctggcctcccctgccccccagggggcccgcctttgcctgcttttgggggggggtggggaggggcgcgcggatcatggcattggagttcccgggcttgcagccgccgccgccgcctcgttcacgcaccccgagcgccccttcttcccagagcagcagcggagaaggcgaagcggccggcgggggcgaggcagatggggctcaaggcgcgcagggcggcgggggcggctggcggcggcggcgacgggggcggcggaggcggcggggcggctaacccagccggaggggacgcggcggcggccggcgacgaggagcggaaagtggggctggcgcccggcgacgtggagcaagtcaccttggcgctcggggccggagccgacaaagacgggaccctgctgctggagggcggcggccgcgacgaggggcagcggaggaccccgcagggcatcgggctcctggccaagaccccgctgagccgcccagtcaagagaaacaacgccaagtaccggcgcatccaaactttgatctacgacgccctggagagaccgcggggctgggcgctgctttaccacgcgttggtgttcctgattgtcctggggtgcttgattctggctgtcctgaccacattcaaggagtatgagactgtctcgggagactggcttctgttactggagacatttgctattttcatctttggagccgagtttgctttgaggatctgggctgctggatgttgctgccgatacaaaggctggcggggccgactgaagtttgccaggaagcccctgtgcatgttggacatctttgtgctgattgcctctgtgccagtggttgctgtgggaaaccaaggcaatgttctggccacctccctgcgaagcctgcgcttcctgcagatcctgcgcatgctgcggatggaccggagaggtggcacctggaagcttctgggctcagccatctgtgcccacagcaaagaactcatcacggcctggtacatcggtttcctgacactcatcctttcttcatttcttgtctacctggttgagaaagacgtcccagaggtggatgcacaaggagaggagatgaaagaggagtttgagacctatgcagatgccctgtggtggggcctgatcacactggccaccattggctatggagacaagacacccaaaacgtgggaaggccgtctgattgccgccaccttttccttaattggcgtctccttttttgcccttccagcgggcatcctggggtccgggctggccctcaaggtgcaggagcaacaccgtcagaagcactttgagaaaaggaggaagccagctgctgagctcattcaggctgcctggaggtattatgctaccaaccccaacaggattgacctggtggcgacatggagattttatgaatcagtcgtctcttttcctttcttcaggaaagaacagctggaggcagcatccagccaaaagctgggtctcttggatcgggttcgcctttctaatcctcgtggtagcaatactaaaggaaagctatttacccctctgaatgtagatgccatagaagaaagtccttctaaagaaccaaagcctgttggcttaaacaataaagagcgtttccgcacggccttccgcatgaaagcctacgctttctggcagagttctgaagatgccgggacaggtgaccccatggcggaagacaggggctatgggaatgacttccccatcgaagacatgatccccaccctgaaggccgccatccgagccgtcagaattctacaattccgtctctataaaaaaaaattcaaggagactttgaggccttacgatgtgaaggatgtgattgagcagtattctgccgggcatctcgacatgctttccaggataaagtaccttcagacgagaatagatatgattttcacccctggacctccctccacgccaaaacacaagaagtctcagaaagggtcagcattcaccttcccatcccagcaatctcccaggaatgaaccatatgtagccagaccatccacatcagaaatcgaagaccaaagcatgatggggaagtttgtaaaagttgaaagacaggttcaggacatggggaagaagctggacttcctcgtggatatgcacatgcaacacatggaacggttgcaggtgcaggtcacggagtattacccaaccaagggcacctcctcgccagctgaagcagagaagaaggaggacaacaggtattccgatttgaaaaccatcatctgcaactattctgagacaggccccccggaaccaccctacagcttccaccaggtgaccattgacaaagtcagcccctatgggttttttgcacatgaccctgtgaacctgccccgagggggacccagttctggaaaggttcaggcaactcctccttcctcagcaacaacgtatgtggagaggcccacggtcctgcctatcttgactcttctcgactcccgagtgagctgccactcccaggctgacctgcagggcccctactcggaccgaatctccccccggcagagacgtagcatcacgcgagacagtgacacacctctgtccctgatgtcggtcaaccacgaggagctggagaggtctccaagtggcttcagcatctcccaggacagagatgattatgtgttcggccccaatggggggtcgagctggatgagggagaagcggtacctcgccgagggtgagacggacacagacacggaccccttcacgcccagcggctccatgcctctgtcgtccacaggggatgggatttctgattcagtatggaccccttccaataagcccatttaaaagaggtcactggctgacccctccttgtaatgtagacagactttgtatagttcacttactcttacacccgacgcttaccagcggggacaccaatggctgcatcaaatgcatgcgtgtgcgtggtggccccacccaggcaggggcttcccacagcctcttcctccccatgtcaccacaacaaagtgcttccttttcagcatggtttgcatgactttacactatataaatggttccgctaatctcttctaggatacacatttatctgctgttcttacttttaatcacgattggaccagtacagggagaaattactgatgagccatgctatttgtctgtttggttggctggtttgggttttggtttggtaagcagagaaagtagtttaagttatttctaggatcactgccctcttgtgtaaaacgctccagcaattaactgtttttgaaagcaaggaaataattttctcaacaaaaccacattgtgtatcagtggggctgcctactgagctaacattaggaaaggaatgagatagtcattgtgtctctaaaacaaagaatttaaacaaatatttaaggcaaaaccttttaaaagctctccaaaagacctcacttggcctgatgttacttagtatcatgcctcagtttccttatctgtaaaaagtggtggtaatcccaagtgtagcatttctgatgagttatgaattggcagggagaaaacacacacacacacacacacacacacacacacacacacatacacaaagttaaaatagtttccaatttatgtagccaaggacaatggaatttatcagaagtgaagtgcccctctgggcaggagctgagttcagtgcctttaaaatgaatttccaactctcatttcttcccatgatactgaagtacaaaatatccatctaaaatagaaattaaagtcaagaaggcacacagaaattttctagtccaaggacttccttttataaatgaagaatcttaggctcaggtaaagtgacatacccagagtcactcagttgtcccatagagaaccaggactcaaaagtcaggtctgcccactctccctgaccttgtttcccctcaccacaccattcttccatttatataatgcatcctagagattgtgtcaagatatatgactttgtgtcgcgtggaaagcacccagtttatccagcaggagggggatttccacttttattgcaaaacatgcttgcttgatgcaatgcatttcagatctagaaaaaaataatgcaagcaagctacatttacagatgtgtaaacaggcaaaatttccagaaccgtccaattttacttttccaaatttatggaaccaacccagattttttaaatgaaaatactaaaaccatatgtaaccgtaagacaagctaaaatgtaagcagacagcctgggaagcactgccctactgtacaggtgtgatattaagcacaagccatcctctggcctcttatgagatgttgttattctctgaaaaactttgatggaaaaggtttctgttaggcttagactgaattagctaaatgaccatgccacagtattattgtatcactcttctcacacacctaggcactggttgtggatagttgccatggtgacaatcaagataatccagatgacctaaacaaatgtctgtatgcagctgacactgctattctccctcacagtcttgtcaagagccacagtagctatggcagacatttggttgatggtttcatcatttcctaatacgagagtctggcactatgttggagagaggaatcacttcctcagagataggttcctttcaactcacatgtcaacagttactgtacaaaaagctcagaatacagtaatgattagagcttgacccctgactttaggaacttagaaccaaagcccaaagtcccaggccaagggcagacattgtgagcagcagaagggtgttttttatggagagccccataaatggatgggtgtagaccttgaagtctgagatgggaaatataccagaatgctcaatgcatcagacatgaagccccacgggcttccatttgacatgctggcaatctgaaggacaaagggcatgggttatttgggccttttccccactccttcaatatggctgaaagtgccagtggggattacaacctaagaaaccctatgccccttcctgagggcttgattattgaatcctgatcttcctggaatctttcacttgagatgatcacctgcctaacatccaacatgttactatgctcttctttatgtacatgagttactggaaaccaacaataaaggagagtgagtcata

SEQ ID NO: 147042 - DNA, 2550 bp, Artificial Sequence
  derived and/or modified sequence
agagcagcagcggagaaggcgaagcggccggcgggggcgaggcagatggggctcaaggcgcgcagggcggcggccggcgacgaggagcggaaagtggggctggcgcccggcgacgtggagcaagtcaccttggcgctcggggccggagccgacaaagacgggaccctgctgctggagggcggcggccgcgacgaggggcagcggaggaccccgcagggcatcgggctcctggccaagaccccgctgagccgcccagtcaagagaaacaacgccaagtaccggcgcatccaaactttgatctacgacgccctggagagaccgcggggctgggcgctgctttaccacgcgttggtgttcctgattgtcctggggtgcttgattctggctgtcctgaccacattcaaggagtatgagactgtctcgggagactggcttctgttactggagacatttgctattttcatctttggagccgagtttgctttgaggatctgggctgctggatgttgctgccgatacaaaggctggcggggccgactgaagtttgccaggaagcccctgtgcatgttggacatctttgtgctgattgcctctgtgccagtggttgctgtgggaaaccaaggcaatgttctggccacctccctgcgaagcctgcgcttcctgcagatcctgcgcatgctgcggatggaccggagaggtggcacctggaagcttctgggctcagccatctgtgcccacagcaaagaactcatcacggcctggtacatcggtttcctgacactcatcctttcttcatttcttgtctacctggttgagaaagacgtcccagaggtggatgcacaaggagaggagatgaaagaggagtttgagacctatgcagatgccctgtggtggggcctgatcacactggccaccattggctatggagacaagacacccaaaacgtgggaaggccgtctgattgccgccaccttttccttaattggcgtctccttttttgcccttccagcgggcatcctggggtccgggctggccctcaaggtgcaggagcaacaccgtcagaagcactttgagaaaaggaggaagccagctgctgagctcattcaggctgcctggaggtattatgctaccaaccccaacaggattgacctggtggcgacatggagattttatgaatcagtcgtctcttttcctttcttcaggaaagaacagctggaggcagcatccagccaaaagctgggtctcttggatcgggttcgcctttctaatcctcgtggtagcaatactaaaggaaagctatttacccctctgaatgtagatgccatagaagaaagtccttctaaagaaccaaagcctgttggcttaaacaataaagagcgtttccgcacggccttccgcatgaaagcctacgctttctggcagagttctgaagatgccgggacaggtgaccccatggcggaagacaggggctatgggaatgacttccccatcgaagacatgatccccaccctgaaggccgccatccgagccgtcagaattctacaattccgtctctataaaaaaaaattcaaggagactttgaggccttacgatgtgaaggatgtgattgagcagtattctgccgggcatctcgacatgctttccaggataaagtaccttcagacgagaatagatatgattttcacccctggacctccctccacgccaaaacacaagaagtctcagaaagggaatgaaccatatgtagccagaccatccacatcagaaatcgaagaccaaagcatgatggggaagtttgtaaaagttgaaagacaggttcaggacatggggaagaagctggacttcctcgtggatatgcacatgcaacacatggaacggttgcaggtgcaggtcacggagtattacccaaccaagggcacctcctcgccagctgaagcagagaagaaggaggacaacaggtattccgatttgaaaaccatcatctgcaactattctgagacaggccccccggaaccaccctacagcttccaccaggtgaccattgacaaagtcagcccctatgggttttttgcacatgaccctgtgaacctgccccgagggggacccagttctggaaaggttcaggcaactcctccttcctcagcaacaacgtatgtggagaggcccacggtcctgcctatcttgactcttctcgactcccgagtgagctgccactcccaggctgacctgcagggcccctactcggaccgaatctccccccggcagagacgtagcatcacgcgagacagtgacacacctctgtccctgatgtcggtcaaccacgaggagctggagaggtctccaagtggcttcagcatctcccaggacagagatgattatgtgttcggccccaatggggggtcgagctggatgagggagaagcggtacctcgccgagggtgagacggacacagacacggaccccttcacgcccagcggctccatgcctctgtcgtccacaggggatgggatttctgattcagtatggaccccttccaataagcccatttaa

SEQ ID NO: 147043 - DNA, 2619 bp, Artificial Sequence
  derived and/or modified sequence
atggggctgaaagccagacgggcagcaggcgcagcaggtggtggcggtgatggcggagggggtggtggaggggctgccaaccctgctgggggagacgccgctgcagccggtgacgaagagcggaaggtggggctggcccctggagatgttgaacaggtcacccttgccctaggtgcgggagctgataaagatgggacactgttgctggaggggggagggcgtgatgaggggcagaggcggactccacagggaattgggctcctggctaagacccccctgagcagacccgtgaagcgaaataatgcaaagtacagacgaattcagaccttgatttacgacgccctggagcgaccaagaggctgggctttactctaccacgcgttggttttcctgatcgtcctgggatgcctgatccttgcggtcctcacaacgttcaaggaatatgaaaccgtctcaggtgattggctgcttctgcttgaaaccttcgccatttttattttcggcgcagagttcgctctgagaatatgggctgctggctgttgttgtaggtataaaggatggcgaggcagattgaaatttgccaggaaaccactttgtatgcttgacattttcgtgctgatcgcctccgtcccggtcgtggcagtcgggaaccagggaaacgtgctggctaccagcttgaggtctctgcgctttctgcaaatccttcggatgttgaggatggatagacgcggtggcacttggaaacttctcggttcagctatatgcgcccattcaaaggagcttattactgcgtggtacattggatttctcaccctgattctgtcctcttttcttgtgtatcttgtcgagaaagatgtgcctgaagtggacgcccaaggagaggaaatgaaggaggagtttgagacttatgcagacgctttgtggtggggcctgattacactggcgactattggttacggggacaaaacgccaaaaacatgggaggggcgactcatcgccgcaacctttagcttaatcggggttagtttcttcgccttacccgctggtattttgggtagtggcctggcactgaaggtgcaagagcaacacagacaaaagcactttgaaaaacggagaaagcctgccgcagagcttattcaggctgcatggcgctattacgcgacaaatcctaaccgaattgatttagtggctacctggaggttttacgaaagtgtcgtgagcttcccctttttccggaaggagcagcttgaggctgcttcctcccagaagttgggccttctagaccgagtacgccttagtaaccccagaggctctaatacgaaaggaaaactgtttacacccctgaatgtagacgctatcgaggagtcaccctctaaggaaccaaaacccgtgggcttaaacaataaggaaagattccgcacagcattccgtatgaaagcatatgccttttggcagtcctcagaggacgcgggaaccggcgatccaatggccgaggacaggggctatggcaatgattttccaattgaggatatgatcccgacactgaaagcagctatcagggcggtgcgcattctccagtttagactttacaaaaaaaaattcaaagagactctcagaccctatgatgtaaaggatgtaattgaacagtattccgcaggacaccttgatatgctgagccgtattaaatacctgcagaccaggattgacatgatctttacaccgggtccaccctctacccccaagcacaaaaagagtcagaaaggtagcgccttcacatttccgagccagcagtccccaaggaatgagccatatgtagccaggcccagcacatcggaaattgaggaccagagcatgatgggaaagtttgttaaggtggagcgacaagtacaagatatgggtaaaaagctagactttctcgtggacatgcatatgcaacacatggaaagattgcaagtacaggtgactgagtactacccgacgaagggtactagctctcctgcggaagctgagaaaaaggaggataatcgatactctgacttgaagacaattatctgtaattactccgagactggaccgccagaacccccatactcctttcaccaggtgacaatagataaggtctcgccatacggatttttcgcccacgacccagtgaacctgccccgagggggtccaagtagcggaaaggtccaggcgactccgccatcttcagccacaacctatgttgaaagaccgaccgtgttgccaatccttaccttgcttgattctcgcgtttcttgtcattcacaggccgacctgcaaggtccttattcagacaggatcagcccaagacaacgccgatctatcaccagggattcagataccccattgtcactgatgtcggtcaaccatgaagaactggagcgaagcccctctggttttagtatttctcaagacagggatgactatgtctttggaccaaacgggggatcttcatggatgagggagaagcgatacctggctgagggcgagactgataccgacaccgatccttttacaccatcggggagtatgcccctatcgtctaccggcgacggaatttcagatagcgtgtggacaccctctaataagcctatatag

SEQ ID NO: 147044 - DNA, 2550 bp, Artificial Sequence
  derived and/or modified sequence
agagcggctgccgaaaaggccaagcgcccagctggggctaggcaaatgggcctaaaagcaagaagggctgctgctggcgacgaggaaaggaaagtcggcttggcacccggtgacgtggaacaggttaccctggctctgggggctggcgctgataaagacggcactcttctgctggaaggaggaggcagagacgagggacagcgaaggacccctcagggtatcggactactcgccaaaacacccctgtctcgcccagtgaaacgcaataacgctaagtacaggaggattcagacgctgatctacgatgccctcgaaagaccgagggggtgggcgctgctgtaccatgcgctggtttttctcattgtgctgggatgtttgattctcgccgttttgacaacctttaaagaatacgaaacagtgtctggtgactggcttcttctcctagagaccttcgcgatattcatcttcggcgctgaatttgccctgaggatttgggccgctggatgttgctgtcgctataaaggatggagggggaggctaaagttcgccagaaaaccgctgtgtatgcttgatattttcgtgctcatcgcctctgtcccagtcgtggccgtcggcaatcagggcaacgtcctagccacatccctgaggtcactccggtttctccaaattcttcggatgcttcgcatggataggaggggagggacgtggaaactgctggggtccgccatctgcgcccactccaaagagttgattacggcatggtacatagggtttttgacactaatcctgagcagttttctcgtctatctcgttgagaaggacgtccctgaggtggatgctcagggagaagaaatgaaagaggaattcgagacctatgctgacgcgctttggtggggcctgattacactagccacaatcggctacggagataaaacccctaagacttgggaaggcagattgatagctgcgaccttctctctgattggcgtctcctttttcgctctcccggctgggatcctcggctcaggactggctttgaaagtccaggagcagcatcgacagaaacatttcgaaaagcgcagaaagccggcagcggagctgatccaggccgcatggcggtactatgctaccaaccccaaccggatagatctggtagctacgtggaggttctacgagtcggtggtgagttttcccttctttcggaaagagcaactggaagccgcatccagccaaaaactcggacttttagaccgggtccgtctttctaatcctcggggtagtaataccaaaggcaagctgttcacgccactgaacgtggatgccattgaggaatccccatctaaggagcccaagcccgtggggctaaataataaagagcgctttcggacagccttcaggatgaaggcctatgccttctggcagagttcagaggacgcaggtactggggacccaatggccgaggatcgtgggtacggcaatgactttccaattgaggacatgattccgactctcaaagccgctattagggctgtgcgcattttacagtttcggttgtataagaaaaagttcaaggagactctcagaccctatgatgttaaagatgtcattgagcaatactccgccggtcacttagacatgctttctagaataaagtatttgcagacccgcatagatatgattttcacgcccggtccccctagcactccaaagcataaaaagtcgcagaaaggcaacgagccatatgtggcgaggcccagcacctctgaaattgaagatcagagcatgatgggcaagtttgtgaaggtcgaacgtcaagtacaggatatgggaaagaagctggacttcttggtcgatatgcacatgcaacacatggagcgtctgcaggtgcaagtgacagaatattatccaaccaagggaactagtagccccgcagaggccgagaagaaagaggacaaccggtacagtgatctcaaaaccattatctgtaactattccgaaaccggtcctcctgaacctccatatagctttcaccaagtaaccattgacaaggtgagcccctatggcttcttcgcccatgatccggttaacctgcccagaggcggacctagcagcggcaaggtgcaggccaccccaccctcttcagccacaacatacgtagagcggccaacagtactgcctatcctcacgttgctggactcccgcgtaagttgccacagtcaggctgatctgcagggcccatattctgacaggatcagtccgaggcagcgcagaagtattaccagggacagcgataccccattaagcctgatgagtgtcaaccacgaggagctcgagcgaagccctagcggattttcgattagccaggacagagacgactacgtatttggtcctaacggcggttccagttggatgcgagagaagcgatacttggcagaaggcgagacagacacggatacggacccctttaccccttctggatccatgccactgagttctaccggcgatggcatcagcgactctgtttggaccccctccaataaacctatttag

SEQ ID NO: 147045 - DNA, 2619 bp, Artificial Sequence
  derived and/or modified sequence
atgggcctgaaggccagaagagccgccggcgccgccggcggcggcggcgacggcggcggcggcggcggcggcgccgccaaccccgccggcggcgacgccgccgccgccggcgacgaggagagaaaggtgggcctggcccccggcgacgtggagcaggtgaccctggccctgggcgccggcgccgacaaggacggcaccctgctgctggagggcggcggcagagacgagggccagagaagaaccccccagggcatcggcctgctggccaagacccccctgagcagacccgtgaagagaaacaacgccaagtacagaagaatccagaccctgatctacgacgccctggagagacccagaggctgggccctgctgtaccacgccctggtgttcctgatcgtgctgggctgcctgatcctggccgtgctgaccaccttcaaggagtacgagaccgtgagcggcgactggctgctgctgctggagaccttcgccatcttcatcttcggcgccgagttcgccctgagaatctgggccgccggctgctgctgcagatacaagggctggagaggcagactgaagttcgccagaaagcccctgtgcatgctggacatcttcgtgctgatcgccagcgtgcccgtggtggccgtgggcaaccagggcaacgtgctggccaccagcctgagaagcctgagattcctgcagatcctgagaatgctgagaatggacagaagaggcggcacctggaagctgctgggcagcgccatctgcgcccacagcaaggagctgatcaccgcctggtacatcggcttcctgaccctgatcctgagcagcttcctggtgtacctggtggagaaggacgtgcccgaggtggacgcccagggcgaggagatgaaggaggagttcgagacctacgccgacgccctgtggtggggcctgatcaccctggccaccatcggctacggcgacaagacccccaagacctgggagggcagactgatcgccgccaccttcagcctgatcggcgtgagcttcttcgccctgcccgccggcatcctgggcagcggcctggccctgaaggtgcaggagcagcacagacagaagcacttcgagaagagaagaaagcccgccgccgagctgatccaggccgcctggagatactacgccaccaaccccaacagaatcgacctggtggccacctggagattctacgagagcgtggtgagcttccccttcttcagaaaggagcagctggaggccgccagcagccagaagctgggcctgctggacagagtgagactgagcaaccccagaggcagcaacaccaagggcaagctgttcacccccctgaacgtggacgccatcgaggagagccccagcaaggagcccaagcccgtgggcctgaacaacaaggagagattcagaaccgccttcagaatgaaggcctacgccttctggcagagcagcgaggacgccggcaccggcgaccccatggccgaggacagaggctacggcaacgacttccccatcgaggacatgatccccaccctgaaggccgccatcagagccgtgagaatcctgcagttcagactgtacaagaagaagttcaaggagaccctgagaccctacgacgtgaaggacgtgatcgagcagtacagcgccggccacctggacatgctgagcagaatcaagtacctgcagaccagaatcgacatgatcttcacccccggcccccccagcacccccaagcacaagaagagccagaagggcagcgccttcaccttccccagccagcagagccccagaaacgagccctacgtggccagacccagcaccagcgagatcgaggaccagagcatgatgggcaagttcgtgaaggtggagagacaggtgcaggacatgggcaagaagctggacttcctggtggacatgcacatgcagcacatggagagactgcaggtgcaggtgaccgagtactaccccaccaagggcaccagcagccccgccgaggccgagaagaaggaggacaacagatacagcgacctgaagaccatcatctgcaactacagcgagaccggcccccccgagcccccctacagcttccaccaggtgaccatcgacaaggtgagcccctacggcttcttcgcccacgaccccgtgaacctgcccagaggcggccccagcagcggcaaggtgcaggccaccccccccagcagcgccaccacctacgtggagagacccaccgtgctgcccatcctgaccctgctggacagcagagtgagctgccacagccaggccgacctgcagggcccctacagcgacagaatcagccccagacagagaagaagcatcaccagagacagcgacacccccctgagcctgatgagcgtgaaccacgaggagctggagagaagccccagcggcttcagcatcagccaggacagagacgactacgtgttcggccccaacggcggcagcagctggatgagagagaagagatacctggccgagggcgagaccgacaccgacaccgaccccttcacccccagcggcagcatgcccctgagcagcaccggcgacggcatcagcgacagcgtgtggacccccagcaacaagcccatctag

SEQ ID NO: 147046 - DNA, 2550 bp, Artificial Sequence
  derived and/or modified sequence
agagccgccgccgagaaggccaagagacccgccggcgccagacagatgggcctgaaggccagaagagccgccgccggcgacgaggagagaaaggtgggcctggcccccggcgacgtggagcaggtgaccctggccctgggcgccggcgccgacaaggacggcaccctgctgctggagggcggcggcagagacgagggccagagaagaaccccccagggcatcggcctgctggccaagacccccctgagcagacccgtgaagagaaacaacgccaagtacagaagaatccagaccctgatctacgacgccctggagagacccagaggctgggccctgctgtaccacgccctggtgttcctgatcgtgctgggctgcctgatcctggccgtgctgaccaccttcaaggagtacgagaccgtgagcggcgactggctgctgctgctggagaccttcgccatcttcatcttcggcgccgagttcgccctgagaatctgggccgccggctgctgctgcagatacaagggctggagaggcagactgaagttcgccagaaagcccctgtgcatgctggacatcttcgtgctgatcgccagcgtgcccgtggtggccgtgggcaaccagggcaacgtgctggccaccagcctgagaagcctgagattcctgcagatcctgagaatgctgagaatggacagaagaggcggcacctggaagctgctgggcagcgccatctgcgcccacagcaaggagctgatcaccgcctggtacatcggcttcctgaccctgatcctgagcagcttcctggtgtacctggtggagaaggacgtgcccgaggtggacgcccagggcgaggagatgaaggaggagttcgagacctacgccgacgccctgtggtggggcctgatcaccctggccaccatcggctacggcgacaagacccccaagacctgggagggcagactgatcgccgccaccttcagcctgatcggcgtgagcttcttcgccctgcccgccggcatcctgggcagcggcctggccctgaaggtgcaggagcagcacagacagaagcacttcgagaagagaagaaagcccgccgccgagctgatccaggccgcctggagatactacgccaccaaccccaacagaatcgacctggtggccacctggagattctacgagagcgtggtgagcttccccttcttcagaaaggagcagctggaggccgccagcagccagaagctgggcctgctggacagagtgagactgagcaaccccagaggcagcaacaccaagggcaagctgttcacccccctgaacgtggacgccatcgaggagagccccagcaaggagcccaagcccgtgggcctgaacaacaaggagagattcagaaccgccttcagaatgaaggcctacgccttctggcagagcagcgaggacgccggcaccggcgaccccatggccgaggacagaggctacggcaacgacttccccatcgaggacatgatccccaccctgaaggccgccatcagagccgtgagaatcctgcagttcagactgtacaagaagaagttcaaggagaccctgagaccctacgacgtgaaggacgtgatcgagcagtacagcgccggccacctggacatgctgagcagaatcaagtacctgcagaccagaatcgacatgatcttcacccccggcccccccagcacccccaagcacaagaagagccagaagggcaacgagccctacgtggccagacccagcaccagcgagatcgaggaccagagcatgatgggcaagttcgtgaaggtggagagacaggtgcaggacatgggcaagaagctggacttcctggtggacatgcacatgcagcacatggagagactgcaggtgcaggtgaccgagtactaccccaccaagggcaccagcagccccgccgaggccgagaagaaggaggacaacagatacagcgacctgaagaccatcatctgcaactacagcgagaccggcccccccgagcccccctacagcttccaccaggtgaccatcgacaaggtgagcccctacggcttcttcgcccacgaccccgtgaacctgcccagaggcggccccagcagcggcaaggtgcaggccaccccccccagcagcgccaccacctacgtggagagacccaccgtgctgcccatcctgaccctgctggacagcagagtgagctgccacagccaggccgacctgcagggcccctacagcgacagaatcagccccagacagagaagaagcatcaccagagacagcgacacccccctgagcctgatgagcgtgaaccacgaggagctggagagaagccccagcggcttcagcatcagccaggacagagacgactacgtgttcggccccaacggcggcagcagctggatgagagagaagagatacctggccgagggcgagaccgacaccgacaccgaccccttcacccccagcggcagcatgcccctgagcagcaccggcgacggcatcagcgacagcgtgtggacccccagcaacaagcccatctag

SEQ ID NO: 147047 - protein, 706 aa, Artificial Sequence
  derived and/or modified sequence
MATANFGKIQIGIYVEIKRSDGRIHQAMVTSLNEDNESVTVEWIENGDTKGKEIDLESIFSLNPDLVPDEEIEPSPETPPPPASSAKVNKIVKNRRTVASIKNDPPSRDNRVVGSARARPSQFPEQSSSAQQNGSVSDISPVQAAKKEFGPPSRRKSNCVKEVEKLQEKREKRRLQQQELREKRAQDVDATNPNYEIMCMIRDFRGSLDYRPLTTADPIDEHRICVCVRKRPLNKKETQMKDLDVITIPSKDVVMVHEPKQKVDLTRYLENQTFRFDYAFDDSAPNEMVYRFTARPLVETIFERGMATCFAYGQTGSGKTHTMGGDFSGKNQDCSKGIYALAARDVFLMLKKPNYKKLELQVYATFFEIYSGKVFDLLNRKTKLRVLEDGKQQVQVVGLQEREVKCVEDVLKLIDIGNSCRTSGQTSANAHSSRSHAVFQIILRRKGKLHGKFSLIDLAGNERGADTSSADRQTRLEGAEINKSLLALKECIRALGRNKPHTPFRASKLTQVLRDSFIGENSRTCMIATISPGMASCENTLNTLRYANRVKELTVDPTAAGDVRPIMHHPPNQIDDLETQWGVGSSPQRDDLKLLCEQNEEEVSPQLFTFHEAVSQMVEMEEQVVEDHRAVFQESIRWLEDEKALLEMTEEVDYDVDSYATQLEAILEQKIDILTELRDKVKSFRAALQEEEQASKQINPKRPRAL

SEQ ID NO: 147048 - DNA, 2121 bp, Artificial Sequence
  derived and/or modified sequence
atggccaccgccaacttcggcaagatccagatcggcatctacgtggagatcaagagaagcgacggcagaatccaccaggccatggtgaccagcctgaacgaggacaacgagagcgtgaccgtggagtggatcgagaacggcgacaccaagggcaaggagatcgacctggagagcatcttcagcctgaaccccgacctggtgcccgacgaggagatcgagcccagccccgagaccccccccccccccgccagcagcgccaaggtgaacaagatcgtgaagaacagaagaaccgtggccagcatcaagaacgacccccccagcagagacaacagagtggtgggcagcgccagagccagacccagccagttccccgagcagagcagcagcgcccagcagaacggcagcgtgagcgacatcagccccgtgcaggccgccaagaaggagttcggcccccccagcagaagaaagagcaactgcgtgaaggaggtggagaagctgcaggagaagagagagaagagaagactgcagcagcaggagctgagagagaagagagcccaggacgtggacgccaccaaccccaactacgagatcatgtgcatgatcagagacttcagaggcagcctggactacagacccctgaccaccgccgaccccatcgacgagcacagaatctgcgtgtgcgtgagaaagagacccctgaacaagaaggagacccagatgaaggacctggacgtgatcaccatccccagcaaggacgtggtgatggtgcacgagcccaagcagaaggtggacctgaccagatacctggagaaccagaccttcagattcgactacgccttcgacgacagcgcccccaacgagatggtgtacagattcaccgccagacccctggtggagaccatcttcgagagaggcatggccacctgcttcgcctacggccagaccggcagcggcaagacccacaccatgggcggcgacttcagcggcaagaaccaggactgcagcaagggcatctacgccctggccgccagagacgtgttcctgatgctgaagaagcccaactacaagaagctggagctgcaggtgtacgccaccttcttcgagatctacagcggcaaggtgttcgacctgctgaacagaaagaccaagctgagagtgctggaggacggcaagcagcaggtgcaggtggtgggcctgcaggagagagaggtgaagtgcgtggaggacgtgctgaagctgatcgacatcggcaacagctgcagaaccagcggccagaccagcgccaacgcccacagcagcagaagccacgccgtgttccagatcatcctgagaagaaagggcaagctgcacggcaagttcagcctgatcgacctggccggcaacgagagaggcgccgacaccagcagcgccgacagacagaccagactggagggcgccgagatcaacaagagcctgctggccctgaaggagtgcatcagagccctgggcagaaacaagccccacacccccttcagagccagcaagctgacccaggtgctgagagacagcttcatcggcgagaacagcagaacctgcatgatcgccaccatcagccccggcatggccagctgcgagaacaccctgaacaccctgagatacgccaacagagtgaaggagctgaccgtggaccccaccgccgccggcgacgtgagacccatcatgcaccacccccccaaccagatcgacgacctggagacccagtggggcgtgggcagcagcccccagagagacgacctgaagctgctgtgcgagcagaacgaggaggaggtgagcccccagctgttcaccttccacgaggccgtgagccagatggtggagatggaggagcaggtggtggaggaccacagagccgtgttccaggagagcatcagatggctggaggacgagaaggccctgctggagatgaccgaggaggtggactacgacgtggacagctacgccacccagctggaggccatcctggagcagaagatcgacatcctgaccgagctgagagacaaggtgaagagcttcagagccgccctgcaggaggaggagcaggccagcaagcagatcaaccccaagagacccagagccctgtag

SEQ ID NO: 147049 - DNA, 2121 bp, Artificial Sequence
  derived and/or modified sequence
atggctacagccaattttgggaagatccagatcgggatctacgttgaaattaagcgctccgacggtcgtattcaccaggctatggtgaccagcctaaatgaggataatgagtctgtgactgtcgagtggattgagaacggagacacaaaaggaaaagagattgatctggagtctattttcagtctcaacccggacttggtcccagatgaagagatcgaaccctctcccgaaacgccaccgccgcccgcctcaagtgccaaggtaaacaaaattgttaagaatcggcggacagtggccagcattaaaaacgatcctcctagccgcgataaccgagttgttgggtctgcccgcgccagaccttcccaatttccagaacaaagcagctcggcccaacagaatgggagtgtgtccgatattagccccgtgcaggcggccaaaaaagaattcgggccgccttcccgtaggaagagcaattgtgttaaggaagtcgaaaagctccaagagaagcgcgagaagcgcaggctgcagcaacaggagctgagggaaaaacgggcacaagacgttgatgccactaacccaaactacgaaataatgtgcatgattcgggactttcgagggtctttagattacaggcctctgaccaccgccgatcccattgatgaacaccgcatatgtgtgtgcgtaaggaaacgccctctgaataagaaagaaacacaaatgaaagacctagacgtgattacaatcccttccaaggacgtagtgatggtacacgaacccaaacagaaggtggatttaacacgttacttggaaaatcaaacgtttagattcgactacgcattcgacgactcggcccccaacgagatggtctatcgctttaccgctcgcccgcttgttgagacaatctttgagaggggtatggcaacctgcttcgcatacggccaaaccggatctggaaagactcacacaatgggtggcgactttagcggcaaaaaccaggattgctctaaaggaatctacgccctggctgccagggacgtgtttttaatgttaaagaaaccaaactacaaaaagctggaactgcaggtgtatgccaccttttttgaaatatactctgggaaagtttttgatctcctcaaccgcaaaacaaaactgagggttctggaagacggaaagcaacaggttcaggtagtgggtctccaggaaagggaagtcaagtgcgtggaagatgtgttgaagcttatcgatattggaaattcctgcaggacttccgggcagacaagtgccaatgcacactccagccgatcgcatgctgtgtttcagatcattctgagaaggaagggaaagctgcacggaaagttctcacttattgacctggccgggaatgagagaggagcagacactagttctgctgaccgccaaactcgcctcgaaggtgccgagattaacaaaagcttacttgctttgaaggaatgcattcgcgctttagggcgaaataagccccatactccatttcgagctagcaaactaactcaggttctgcgcgattccttcatcggggaaaatagccgtacttgtatgattgcaacgatcagccctggaatggcaagctgcgagaataccctgaacacattacgctatgccaacagagtgaaggagcttactgtggatcccacagctgctggcgatgtaagacctattatgcaccaccccccgaaccagatcgacgatcttgagacacaatggggcgttggttcatcaccccagagagatgatctgaagctgctctgtgagcagaatgaagaagaagtatctccgcagctgtttacgtttcatgaggccgtgagccagatggtcgaaatggaggagcaagtggtggaggatcaccgcgccgtgtttcaggaatcaattcgttggctcgaggacgagaaggcattgctagagatgacagaggaggtggactatgacgttgattcatatgcgactcagttggaggcaatcttggagcagaaaatcgatatactgacggaattacgtgacaaggtgaagtccttcagagcagccctacaggaagaagagcaggcctcaaagcagattaatccaaaaaggccccgcgccctctag

SEQ ID NO: 147050 - DNA, 2121 bp, Artificial Sequence
  derived and/or modified sequence
atggccacagccaactttgggaagatccagatcggcatctacgtggagatcaagagaagtgatggccgcatccaccaggccatggtgaccagcctgaatgaagataatgaatctgtgacagtggagtggattgaaaatggagacaccaagggcaaggagattgacctggagagcatcttcagcctgaacccagacctggtgcctgatgaggagattgagcccagccctgagaccccacctcctccagccagcagcgccaaggtgaacaagatcgtgaagaacagaagaacagtggccagcatcaagaatgacccccccagccgggacaacagagtggtgggcagcgcccgggcccggcccagccagtttcctgagcagagcagcagcgcccagcagaatggatctgtgtctgacatcagccctgtgcaggccgccaagaaggagtttggaccacccagcaggaggaagagcaactgtgtgaaggaggtggagaagctgcaggagaagcgggagaagaggcggctgcagcagcaggagctgcgggagaagagggcccaggatgtggatgccaccaaccccaactatgagatcatgtgcatgatccgggacttccggggcagcctggactaccggcccctgaccacagctgaccccattgatgagcaccgcatctgtgtgtgtgtgaggaagaggcccctgaacaagaaggagacccagatgaaggacctggatgtgatcaccatccccagcaaggatgtggtgatggtgcatgagcccaagcagaaggtggacctgacccgctacctggagaaccagaccttccgctttgattatgcctttgatgattctgccccaaatgagatggtgtaccgcttcaccgcccggcccctggtggagaccatctttgagcggggcatggccacctgctttgcctacggccagacaggcagcggcaagacccacaccatgggcggggacttcagcggcaagaaccaggactgcagcaagggcatctatgccctggccgccagagatgtgttcctgatgctgaagaagcccaactacaagaagctggagctgcaggtgtatgccaccttctttgagatctacagcggcaaggtgtttgacctgctgaacaggaagaccaagctgcgggtgctggaggatggcaagcagcaggtgcaggtggtgggcctgcaggagcgggaggtgaagtgtgtggaggatgtgctgaagctgattgacatcggcaacagctgcaggaccagcggccagaccagcgccaatgcccacagcagccgcagccatgctgtgttccagatcatcctgcggaggaagggcaagctgcacggcaagttcagcctgattgacctggccggaaatgaaagaggagctgacaccagcagcgctgaccggcagacccggctggagggcgctgagatcaacaagagcctgctggccctgaaggagtgcatccgggccctgggcaggaacaagccccacacccccttccgggccagcaagctgacccaggtgctgcgggacagcttcatcggggagaacagcaggacctgcatgattgccaccatcagccctggcatggccagctgtgagaacaccctgaacaccctgcgctatgccaacagagtgaaggagctgactgtggaccccacagctgctggagatgtgcggcccatcatgcaccacccccccaaccagattgatgacctggagacccagtggggcgtgggcagcagcccccagagagatgacctgaagctgctgtgtgagcagaatgaggaggaggtgagcccccagctgttcaccttccatgaagctgtgtcccagatggtggagatggaggagcaggtggtggaggaccacagagctgtgttccaggagagcatccgctggctggaggatgagaaggccctgctggagatgacagaggaggtggactatgatgtggacagctatgccacccagctggaggccatcctggagcagaagattgacatcctgacagagctgcgggacaaggtgaagagcttccgggccgccctgcaggaggaggagcaggccagcaagcagatcaaccccaagaggccccgggccctgtag

SEQ ID NO: 147051 - DNA, 2121 bp, Artificial Sequence
  derived and/or modified sequence
atggccaccgccaacttcggcaagatccagatcggcatctacgtggaaattaagcgtagtgatggtcggatccaccaggcgatggttacatctctcaacgaagataacgaatcagtgactgtggaatggattgagaatggtgacactaagggcaaggagattgacctggaatcaatcttcagtctgaatcctgacctggtgcccgacgaggagatcgagccgtcccctgagactccccctcctcccgcttcaagcgctaaagttaataaaattgtgaaaaaccgccggaccgtcgcatccattaagaacgatccccccagtcgcgataatcgcgtcgtgggctccgcaagagcacgaccgagtcagttccccgagcagtcttcctccgcgcagcagaatggttcagtatctgatatcagccctgtgcaggctgctaagaaagagtttggcccccccagccgcaggaagagtaactgcgttaaggaggtagagaaactgcaggaaaaaagggagaagaggaggctgcagcagcaggagcttagggaaaagcgagcccaggacgttgatgctaccaatcctaactatgaaatcatgtgtatgattcgtgacttccggggttctctggactacagacccctgacaacagctgaccctatcgacgagcatcgtatctgtgtctgtgtccgcaaaaggccacttaataagaaagagacccagatgaaagatctggacgtcattacaatcccctcgaaggacgtggtgatggtgcacgagcccaagcaaaaagtggatttgaccagatacctcgagaaccaaacattcaggttcgattatgcgtttgatgatagtgcccccaacgagatggtatatcggttcacggctcgtcctctggtggagaccattttcgagcgaggaatggctacctgcttcgcatacggccaaacaggaagtggcaaaacccacacgatggggggcgactttagtgggaagaatcaggattgcagtaagggtatctatgctctggccgctagggatgtgttcctcatgctgaaaaagccaaactataagaagttagagttgcaggtctatgccacttttttcgaaatctacagcggtaaagtcttcgacctgttgaatcggaagactaaattacgagttctcgaggatgggaagcagcaggtgcaggtagtgggcctacaagaacgcgaagtgaagtgcgtggaggatgtgctcaagctgatcgacatcggtaattcgtgtagaacaagcggccagaccagtgccaatgcccattcttctaggtcgcacgctgtgtttcaaattatcttgcggcgaaaagggaagctccatgggaaattttccctaatcgacctggccggtaacgagcgaggcgcagatacttccagcgcagataggcaaaccagattagagggcgctgagatcaacaagtccctgctggccttaaaagaatgtatcagggctctgggccgaaacaaaccccatactcctttcagagccagcaaactgacccaggttctgcgcgattcttttatcggcgagaatagccgcacctgcatgatcgcaactatctctccaggaatggcttcgtgcgagaacactctgaataccctcaggtacgccaacagagtgaaggagttaaccgtcgatcctaccgccgctggggacgtgcgccccattatgcatcacccaccaaatcagatcgacgacttagagacacagtggggagtgggatcctccccacagcgcgatgatcttaaactgctgtgcgaacagaatgaggaggaagttagccctcaactgtttacatttcatgaagcagttagccaaatggtcgaaatggaggaacaggtggtcgaggaccatcgcgctgtgtttcaggaatcaattcggtggctggaggatgaaaaagcccttctggagatgaccgaggaggtggattatgatgtggacagctatgcaacccaattggaggccattttggagcagaagatcgatattctgaccgaactgcgagacaaggttaagagcttcagagccgcgctgcaggaagaggaacaggcttcaaaacaaattaacccaaagcgccctagagctctatag

SEQ ID NO: 147052 - DNA, 2539 bp, Artificial Sequence
  derived and/or modified sequence
gcctccccagcgtcggctccccggcgggcggtgcgggccctcccactctaccccgcgccgtctcacggccccggccctagcttcaccccgactacccggcgtgcgcgtcctcctgccggcctgcaggcccggggcctccgcctgcttccccacagctgctccttgcggccccgcttgcgttcacgctgtcgcccgggccggcgcggccgcgggcaaccgctccccctcccacacctaccccgccccctccccgccttttccgccctccggtccccctccctcggcccgctgctgctgctccagatgaggtgatggcaacggccaacttcggcaagatccagatcgggatttacgtggagatcaagcgcagcgatggccgaatacatcaagcaatggtaacatctttaaatgaagataatgaaagtgtaactgttgaatggatagaaaatggagatacaaaaggcaaagagattgacctggagagcatcttttcacttaaccctgaccttgttcctgatgaagaaattgaacccagtccagaaacacctccacctccagcatcctcagccaaagtaaacaaaattgtaaagaatcgacggactgtagcttctattaagaatgaccctccttcaagagataatagagtggttggttcagcacgtgcacggcccagtcaatttcctgaacagtcttcctctgcacaacagaatggtagtgtttcagatatatctccagttcaagctgcaaaaaaggaatttggacccccttcacgtagaaaatctaattgtgtgaaagaagtagaaaaactgcaagaaaaacgagagaaaaggagattgcaacagcaagaacttagagaaaaaagagcccaggacgttgatgctacaaacccaaattatgaaattatgtgtatgatcagagactttagaggaagtttggattatagaccattaacaacagcagatcctattgatgaacataggatatgtgtgtgtgtaagaaaacgaccactcaataaaaaagaaactcaaatgaaagatcttgatgtaatcacaattcctagtaaagatgttgtgatggtacatgaaccaaaacaaaaagtagatttaacaaggtacctagaaaaccaaacatttcgttttgattatgcctttgatgactcagctcctaatgaaatggtttacaggtttactgctagaccactagtggaaactatatttgaaaggggaatggctacatgctttgcttatgggcagactggaagtggaaaaactcatactatgggtggtgacttttcaggaaagaaccaagattgttctaaaggaatttatgcattagcagctcgagatgtctttttaatgctaaagaagccaaactataagaagctagaacttcaagtatatgcaaccttctttgaaatttatagtggaaaggtgtttgacttgctaaacaggaaaacaaaattaagagttctagaagatggaaaacagcaggttcaagtggtgggattacaggaacgggaggtcaaatgtgttgaagatgtactgaaactcattgacataggcaacagttgcagaacatccggtcaaacatctgcaaatgcacattcatctcggagccatgcagtgtttcagattattcttagaaggaaaggaaaactacatggcaaattttctctcattgatttggctggaaatgaaagaggagctgatacttccagtgcggacaggcaaactaggcttgaaggtgctgaaattaataaaagccttttagcactcaaggagtgcatcagagccttaggtagaaataaacctcatactcctttccgtgcaagtaaactcactcaggtgttaagagattctttcataggtgaaaactctcgtacctgcatgattgccacaatctctccaggaatggcatcctgtgaaaatactcttaatacattaagatatgcaaatagggtcaaagaattgactgtagatccaactgctgctggtgatgttcgtccaataatgcaccatccaccaaaccagattgatgacttagagacacagtggggtgtggggagttcccctcagagagatgatctaaaacttctttgtgaacaaaatgaagaagaagtctctccacagttgtttactttccacgaagctgtttcacaaatggtagaaatggaagaacaagttgtagaagatcacagggcagtgttccaggaatctattcggtggttagaagatgaaaaggccctcttagagatgactgaagaagtagattatgatgtcgattcatatgctacacaacttgaagctattcttgagcaaaaaatagacattttaactgaactgcgggataaagtgaaatctttccgtgcagctctacaagaggaggaacaagccagcaagcaaatcaacccgaagagaccccgtgccctttaaaccggcatttgctgctaaaggatacccagaaccctcactactgtaacatacaacggttcagctgtaagggccatttgaaagtttggaattttaagtgtctgtggaaa

SEQ ID NO: 147053 - DNA, 2121 bp, Artificial Sequence
  derived and/or modified sequence
atggctaccgctaactttggcaagatacagatagggatctacgtggagattaaacgcagtgacgggcgaattcaccaggcaatggttacgtccctgaatgaggataatgagtcagtgaccgtcgagtggatagagaacggagatacaaaagggaaggagatagatctggagtcaatatttagcctgaacccagacctcgtgcccgacgaggaaatcgagcctagccccgagaccccgccacctccagcaagctctgccaaagttaataagattgtgaagaatcggagaactgttgcaagcattaagaacgacccaccaagtcgcgataacagggtggttgggtctgcccgagctagaccctcccaatttcctgagcagtcttcttctgcccagcagaatggatctgtgtcagacatcagtccagtgcaagcagcaaagaaagagtttggtccaccaagcagaagaaagtccaactgtgtgaaggaggtcgagaagttgcaggagaagagggaaaagaggagacttcagcaacaggagctccgcgaaaagagggcacaggacgtagacgccacaaatcccaactacgagatcatgtgcatgatccgagacttcagaggttcattggactatcgacctctgaccacggccgaccccatcgacgagcaccgcatttgcgtctgtgttagaaaacgtcccctgaataaaaaagagacacagatgaaagacctcgatgtgatcaccataccatcaaaggatgtggtaatggtgcacgagcccaagcagaaggtcgatctgacgagatacctggagaaccaaacttttcggtttgattatgcgtttgatgattcagccccaaacgagatggtttaccgatttactgccaggcccctggtcgaaacaatttttgaaagaggaatggccacctgcttcgcgtacggtcagacaggatccggcaagacacacaccatgggcggagactttagcggcaagaaccaggattgttccaaggggatctacgcgctggcagcaagggacgtgttcctgatgctgaagaagcctaattacaagaaacttgaattgcaggtgtacgccacgttctttgagatttatagcggcaaggtctttgacctgcttaataggaagaccaagctgagggtgctggaggacggtaaacagcaggtgcaggtggtcggcttgcaggaacgggaagtgaaatgcgttgaagacgtgctgaaattaattgacattggcaatagctgtcgtacctccgggcagacgagcgctaacgcccattctagtcgcagccacgccgtgtttcagatcatcttgaggcgtaaagggaagctccatgggaaattctctcttattgacctggcaggcaatgaaaggggcgcagatacctcatcagctgatcgccagaccaggctggaaggtgcagagataaacaagagtctactcgctcttaaggaatgcatcagagctctagggagaaacaaaccacacactccttttcgtgcttctaagctcacacaggtccttcgggattcttttatcggagagaactctcggacctgcatgattgcaactatcagtcccggaatggctagctgcgagaatactctgaatacgctgcgatatgcaaaccgcgtcaaggaattgactgtggatcccaccgctgctggtgatgtgcgccctataatgcatcacccacccaatcagatcgatgacctcgaaactcaatggggagtgggatctagtccccagagagacgacctgaagttgctttgcgagcagaacgaggaagaagtctcaccgcagctgtttacctttcacgaagcagtgtcgcaaatggtggagatggaggaacaagtagtggaagatcatcgagcagtgtttcaggaatccattagatggcttgaagatgagaaagccctcctggaaatgacggaagaagtcgactacgacgtcgattcatacgccacgcaactagaggccatcctagaacagaaaatcgacatcctcactgaattgagggataaggtgaagtcattcagggctgcactccaggaggaagaacaagcctctaaacagattaatccaaaacgtcccagagccttgtag

SEQ ID NO: 147054 - protein, 963 aa, Artificial Sequence
  derived and/or modified sequence
MADLAECNIKVMCRFRPLNESEVNRGDKYIAKFQGEDTVVIASKPYAFDRVFQSSTSQEQVYNDCAKKIVKDVLEGYNGTIFAYGQTSSGKTHTMEGKLHDPEGMGIIPRIVQDIFNYIYSMDENLEFHIKVSYFEIYLDKIRDLLDVSKTNLSVHEDKNRVPYVKGCTERFVCSPDEVMDTIDEGKSNRHVAVTNMNEHSSRSHSIFLINVKQENTQTEQKLSGKLYLVDLAGSEKVSKTGAEGAVLDEAKNINKSLSALGNVISALAEGSTYVPYRDSKMTRILQDSLGGNCRTTIVICCSPSSYNESETKSTLLFGQRAKTIKNTVCVNVELTAEQWKKKYEKEKEKNKILRNTIQWLENELNRWRNGETVPIDEQFDKEKANLEAFTVDKDITLTNDKPATAIGVIGNFTDAERRKCEEEIAKLYKQLDDKDEEINQQSQLVEKLKTQMLDQEELLASTRRDQDNMQAELNRLQAENDASKEEVKEVLQALEELAVNYDQKSQEVEDKTKEYELLSDELNQKSATLASIDAELQKLKEMTNHQKKRAAEMMASLLKDLAEIGIAVGNNDVKQPEGTGMIDEEFTVARLYISKMKSEVKTMVKRCKQLESTQTESNKKMEENEKELAACQLRISQHEAKIKSLTEYLQNVEQKKRQLEESVDALSEELVQLRAQEKVHEMEKEHLNKVQTANEVKQAVEQQIQSHRETHQKQISSLRDEVEAKAKLITDLQDQNQKMMLEQERLRVEHEKLKATDQEKSRKLHELTVMQDRREQARQDLKGLEETVAKELQTLHNLRKLFVQDLATRVKKSAEIDSDDTGGSAAQKQKISFLENNLEQLTKVHKQLVRDNADLRCELPKLEKRLRATAERVKALESALKEAKENASRDRKRYQQEVDRIKEAVRSKNMARRGHSAQIAKPIRPGQHPAASPTHPSAIRGGGAFVQNSQPVAVRGGGGKQV

SEQ ID NO: 147055 - DNA, 2892 bp, Artificial Sequence
  derived and/or modified sequence
atggctgatctggccgaatgcaatatcaaagtcatgtgccggtttcggccacttaacgagagcgaggttaatagaggagacaagtacatcgcaaagtttcagggcgaggacaccgtggtgatagcttcaaagccctatgcctttgaccgcgtgtttcagtcctccaccagccaggaacaagtttataacgattgcgccaaaaaaatagtgaaagacgtcttggaaggatacaatggcaccatcttcgcctatggccagacttcatcaggaaaaacccataccatggaggggaaacttcacgatcccgagggcatggggatcattcctcgcatagtacaagacatatttaactacatttactccatggacgagaaccttgagttccatattaaggtgagctatttcgagatttacttagacaagatccgggatctgctggacgtttcaaagaccaacttgtctgtgcacgaagacaaaaatcgagtgccatatgttaaaggttgcactgagagatttgtgtgttctcctgatgaagtgatggacaccattgatgagggcaagtccaatagacacgttgctgtaactaatatgaatgagcacagcagtcggtcacacagcatttttctcatcaatgtgaaacaggaaaatacgcaaactgaacaaaagctatcaggaaaattatatcttgtggaccttgctggttctgagaaggtaagcaaaactggggccgagggggctgtgttagatgaagcaaagaatattaacaagagcctgagtgccctcggtaatgtcatctccgccctagcggagggctcaacctatgtcccctaccgagactcaaagatgacccgaatcctgcaggattcccttggcggcaactgtcggacgacaatcgtcatctgctgctcaccatcgtcctacaatgagagcgagacaaaatcaaccttgttgttcggccagagagctaaaaccattaagaacactgtctgtgttaacgtggaattgactgcggaacagtggaaaaagaaatatgagaaggagaaggaaaaaaataagatactgcgcaacactatccagtggcttgagaatgagcttaatcggtggagaaatggcgagaccgtccccattgacgaacagtttgataaggagaaagctaaccttgaggcttttacggtagacaaagacataaccttgacaaacgacaaacctgcaaccgctattggggtgatcggcaatttcacggacgccgagcgtcgcaaatgtgaggaggagattgccaaactttataagcagctcgacgacaaagacgaggagattaaccaacagtcacagctggttgagaagttaaaaacgcagatgctggatcaggaggagcttttagcgagcaccagacgcgaccaggataacatgcaagctgagctgaaccgtctccaggccgagaacgatgcctcgaaagaggaagtgaaagaagtgctgcaggctctcgaagaattggctgtgaactatgaccaaaagagtcaagaagtggaagataagaccaaagagtacgaactgttgtcagatgagctgaaccaaaaatctgcgacgctcgcaagcatcgacgccgagttgcagaaattgaaagagatgacgaatcaccagaagaaacgggccgccgagatgatggcttccctgctgaaagacctggcggagatcggaatagccgtggggaataacgatgtgaaacagcccgaaggtacggggatgatcgacgaagaattcactgttgctcgcctctacattagcaagatgaaaagcgaggtcaaaaccatggtgaagcgatgcaagcagctggagagtacccaaacggagtcgaataaaaagatggaggaaaatgagaaagagttagcggcttgtcagctgcggatctcccagcacgaagccaaaataaagtccctgaccgaatacctgcaaaacgttgagcagaagaagcgccagcttgaggagagcgtggacgccctgagtgaggaactggttcagcttagagctcaggaaaaggtccatgaaatggagaaagaacacttgaacaaagtgcagaccgcaaatgaggtgaagcaggctgtggaacagcagatacagtcacatcgagagacacatcagaagcagatctctagtcttcgagacgaggtggaggccaaggctaagctgattaccgatctgcaggatcaaaatcaaaagatgatgctggagcaggaacggctgagggtagaacatgaaaagctcaaagccaccgaccaggagaaatcacgcaaacttcacgagctgactgtgatgcaggacagacgagagcaggcccgacaggatctgaagggactggaggagaccgttgctaaggaactccagaccctgcataatctgcggaagctcttcgtgcaggacctggccacccgggtcaaaaaatccgcagagatcgattcagacgacaccggcggttcggcagcccagaagcagaagataagttttcttgaaaataatctggaacaactgactaaggtccacaaacagctggtgcgcgataacgctgacttaaggtgcgagctgcctaaactcgagaaaaggctgcgcgccaccgctgaaagggtgaaggccctggaaagcgctctcaaggaggccaaagaaaacgctagtagggatcggaaacgatatcagcaggaggtcgaccgcatcaaagaagccgttcgctccaaaaatatggccagaagggggcactctgcacagatcgctaagcctataagacccgggcagcaccccgccgcaagccccacccacccaagcgcaataagaggaggcggcgcctttgtgcaaaattcgcaaccagtggcagtccgaggaggcggcggaaaacaggtatag

SEQ ID NO: 147056 - DNA, 5877 bp, Artificial Sequence
  derived and/or modified sequence
cgccctgtcgcccaacggcggcctcaggagtgatcgggcagcagtcggccggccagcggacggcagagcgggcggacgggtaggcccggcctgctcttcgcgaggaggaagaaggtggccactctcccggtccccagaacctccccagcccccgcagtccgcccagaccgtaaagggggacgctgaggagccgcggacgctctccccggtgccgccgccgctgccgccgccatggctgccatgatggatcggaagtgagcattagggttaacggctgccggcgccggctcttcaagtcccggctccccggccgcctccacccggggaagcgcagcgcggcgcagctgactgctgcctctcacggccctcgcgaccacaagccctcaggtccggcgcgttccctgcaagactgagcggcggggagtggctcccggccgccggccccggctgcgagaaagatggcggacctggccgagtgcaacatcaaagtgatgtgtcgcttcagacctctcaacgagtctgaagtgaaccgcggcgacaagtacatcgccaagtttcagggagaagacacggtcgtgatcgcgtccaagccttatgcatttgatcgggtgttccagtcaagcacatctcaagagcaagtgtataatgactgtgcaaagaagattgttaaagatgtacttgaaggatataatggaacaatatttgcatatggacaaacatcctctgggaagacacacacaatggagggtaaacttcatgatccagaaggcatgggaattattccaagaatagtgcaagatatttttaattatatttactccatggatgaaaatttggaatttcatattaaggtttcatattttgaaatatatttggataagataagggacctgttagatgtttcaaagaccaacctttcagttcatgaagacaaaaaccgagttccctatgtaaaggggtgcacagagcgttttgtatgtagtccagatgaagttatggataccatagatgaaggaaaatccaacagacatgtagcagttacaaatatgaatgaacatagctctaggagtcacagtatatttcttattaatgtcaaacaagagaacacacaaacggaacaaaagctgagtggaaaactttatctggttgatttagctggtagtgaaaaggttagtaaaactggagctgaaggtgctgtgctggatgaagctaaaaacatcaacaagtcactttctgctcttggaaatgttatttctgctttggctgagggtagtacatatgttccatatcgagatagtaaaatgacaagaatccttcaagattcattaggtggcaactgtagaaccactattgtaatttgctgctctccatcatcatacaatgagtctgaaacaaaatctacactcttatttggccaaagggccaaaacaattaagaacacagtttgtgtcaatgtggagttaactgcagaacagtggaaaaagaagtatgaaaaagaaaaagaaaaaaataagatcctgcggaacactattcagtggcttgaaaatgagctcaacagatggcgtaatggggagacggtgcctattgatgaacagtttgacaaagagaaagccaacttggaagctttcacagtggataaagatattactcttaccaatgataaaccagcaaccgcaattggagttataggaaattttactgatgctgaaagaagaaagtgtgaagaagaaattgctaaattatacaaacagcttgatgacaaggatgaagaaattaaccagcaaagtcaactggtagagaaactgaagacgcaaatgttggatcaggaggagcttttggcatctaccagaagggatcaagacaatatgcaagctgagctgaatcgccttcaagcagaaaatgatgcctctaaagaagaagtgaaagaagttttacaggccctagaagaacttgctgtcaattatgatcagaagtctcaggaagttgaagacaaaactaaggaatatgaattgcttagtgatgaattgaatcagaaatcggcaactttagcgagtatagatgctgagcttcagaaacttaaggaaatgaccaaccaccagaaaaaacgagcagctgagatgatggcatctttactaaaagaccttgcagaaataggaattgctgtgggaaataatgatgtaaagcagcctgagggaactggcatgatagatgaagagttcactgttgcaagactctacattagcaaaatgaagtcagaagtaaaaaccatggtgaaacgttgcaagcagttagaaagcacacaaactgagagcaacaaaaaaatggaagaaaatgaaaaggagttagcagcatgtcagcttcgtatctctcaacatgaagccaaaatcaagtcattgactgaataccttcaaaatgtggaacaaaagaaaagacagttggaggaatctgtcgatgccctcagtgaagaactagtccagcttcgagcacaagagaaagtccatgaaatggaaaaggagcacttaaataaggttcagactgcaaatgaagttaagcaagctgttgaacagcagatccagagccatagagaaactcatcaaaaacagatcagtagtttgagagatgaagtagaagcaaaagcaaaacttattactgatcttcaagaccaaaaccagaaaatgatgttagagcaggaacgtctaagagtagaacatgagaagttgaaagccacagatcaggaaaagagcagaaaactacatgaacttacggttatgcaagatagacgagaacaagcaagacaagacttgaagggtttggaagagacagtggcaaaagaacttcagactttacacaacctgcgcaaactctttgttcaggacctggctacaagagttaaaaagagtgctgagattgattctgatgacaccggaggcagcgctgctcagaagcaaaaaatctcctttcttgaaaataatcttgaacagctcactaaagtgcacaaacagttggtacgtgataatgcagatctccgctgtgaacttcctaagttggaaaagcgacttcgagctacagctgagagagtgaaagctttggaatcagcactgaaagaagctaaagaaaatgcatctcgtgatcgcaaacgctatcagcaagaagtagatcgcataaaggaagcagtcaggtcaaagaatatggccagaagagggcattctgcacagattgctaaacctattcgtcccgggcaacatccagcagcttctccaactcacccaagtgcaattcgtggaggaggtgcatttgttcagaacagccagccagtggcagtgcgaggtggaggaggcaaacaagtgtaatcgtttatacatacccacaggtgttaaaaagtaatcgaagtacgaagaggacatggtatcaagcagtcattcaatgactataacctctactcccttgggattgtagaattataacttttaaaaaaaatgtataaattatacctggcctgtacagctgtttcctacctactcttcttgtaaactctgctgcttcccaacacaactagagtgcaattttggcatcttaggagggaaaaaggacagtttacaactgtggccctatttattacacagtttgtctatcgtgtcttaaatttagtctttactgtgccaagctaactgtaccttataggactgtactttttgtattttttgtgtatgtttattttttaatctcagtttaaattacctagctgctactgcttcttgtttttcttttcctattaaaacgtcttcctttttttttcttaagagaaaatggaacatttaggttaaatgtctttaaattttaccacttaacaacactacatgcccataaaatatatccagtcagtactgtattttaaaatcccttgaaatgatgatatcagggttaaaattacttgtattgtttctgaagtttgctcctgaaaactactgtttgagcactgaaacgttacaaatgcctaataggcatttgagactgagcaaggctacttgttatctcatgaaatgcctgttgccgagttattttgaatagaaatattttaaagtatcaaaagcagatcttagtttaagggagtttggaaaaggaattatatttctctttttcctgattctgtactcaacaagtcttgatggaattaaaatactctgctttattctggtgagcctgctagctaatataagtattggacaggtaataatttgtcatctttaatattagtaaaatgaattaagatattataggattaaacataattttatacggttagtactttattggccgacctaaatttatagcgtgtggaaattgagaaaaatgaagaaacaggacagatatatgatgaattaaaaatatatataggtcaattttggtctgaaatccctgaggtgtttttaacctgctacactaatttgtacactaatttatttctttagtctagaaatagtaaattgtttgcaagtcactaataatcattagataaattattttcttggccatagccgataattttgtaatcagtactaagtgtatacgtatttttgccactttttcctcagatgattaaagtaagtcaacagcttattttaggaaactgtaaaagtaatagggaaagagatttcactatttgcttcatcagtggtaggggggcggtgactgcaactgtgttagcagaaattcacagagaatggggatttaaggttagcagagaaacttggaaagttctgtgttaggatcttgctggcagaattaactttttgcaaaagttttatacacagatatttgtattaaatttggagccatagtcagaagactcagatcataattggcttatttttctatttccgtaactattgtaatttccacttttgtaataattttgatttaaaatataaatttatttatttatttttttaatagtcaaaaatctttgctgttgtagtctgcaacctctaaaatgattgtgttgcttttaggattgatcagaagaaacactccaaaaattgagatgaaatgttggtgcagccagttataagtaatatagttaacaagcaaaaaaagtgctgccaccttttatgatgattttctaaatggagaaacatttggctgcatccacatagacctttatgttttgttttcagttgaaaacttgcctcctttggcaacattcgtaaatgaagcagaatttttttttctcttttttccaaatatgttagttttgttcttgtaagatgtatcatgggtattggtgctgtgtaatgaacaacgaattttaattagcatgtggttcagaatatacaatgttaggtttttaaaaagtatcttgatggttcttttctatttataatttcagactttcataaagtgtaccaagaatttcataaatttgttttcagtgaactgctttttgctatggtaggtcattaaacacagcacttactcttaaaaatgaaaatttctgatcatctaggatattgacacatttcaatttgcagtgtctttttgactggatatattaacgttcctctgaatggcattgatagatggttcagaagagaaactcaatgaaataaagagaatatttattcatggcgattaattaaattatttgcctaacttaagaaaactactgtgcgtaactctcagtttgtgcttaactccatttgacatgaggtgacagaagagagtctgagtctacctgtggaatatgttggtttattttcagtgcttgaagatacattcacaaatacttggtttgggaagacaccgtttaattttaagttaacttgcatgttgtaaatgcgttttatgtttaaataaagaggaaaattttttgaaatgtaa

SEQ ID NO: 147057 - DNA, 2892 bp, Artificial Sequence
  derived and/or modified sequence
atggctgacctggccgagtgcaacatcaaggtgatgtgccgcttccggcccctgaatgaaagtgaggtgaacagaggagacaagtacatcgccaagttccagggcgaggacacagtggtgattgccagcaagccctatgcctttgacagagtcttccagagcagcaccagccaggagcaggtgtacaatgactgtgccaagaagatcgtgaaggatgtgctggagggctacaacggcaccatctttgcctacggccagaccagcagcggcaagacccacaccatggagggcaagctgcatgaccctgagggcatgggcatcatccccagaattgtgcaggacatcttcaactacatctacagcatggatgagaacctggagttccacatcaaggtgtcctactttgagatctacctggacaagatccgggacctgctggatgtgtccaagaccaacctgtctgtgcatgaggacaagaacagagtgccctacgtgaagggctgcacagaaagatttgtgtgcagcccagatgaggtgatggacaccattgatgagggcaagagcaacagacatgtggccgtgaccaacatgaatgagcacagcagccgcagccacagcatcttcctgatcaacgtgaagcaggagaacacccagacagagcagaagctgagcggcaagctgtacctggtggacctggccggcagcgagaaggtgtccaagacaggagctgagggcgctgtgctggatgaggccaagaacatcaacaagagcctgagcgccctgggcaatgtcatcagcgccctggccgagggcagcacctacgtgccctacagagacagcaagatgacccgcatcctgcaggacagcctgggcggcaactgcaggaccaccatcgtcatctgctgcagccccagcagctacaatgaaagtgagaccaagagcaccctgctgtttggccagagggccaagaccatcaagaacacagtgtgtgtgaatgtggagctgacagctgagcagtggaagaagaagtatgagaaggagaaggagaagaacaagatcctgaggaacaccatccagtggctggagaatgagctgaaccgctggagaaatggagaaacagtgcccattgatgagcagtttgacaaggagaaggccaacctggaggccttcaccgtggacaaggacatcaccctgaccaatgacaagccagccacagccatcggggtcatcggcaacttcacagatgctgagaggaggaaatgtgaggaggagatcgccaagctgtacaagcagctggatgacaaggatgaggagatcaaccagcagagccagctggtggagaagctgaagacccagatgctggaccaggaggagctgctggccagcacccggcgggaccaggacaacatgcaggccgagctgaaccggctgcaggccgagaatgatgccagcaaggaggaggtgaaggaggtgctgcaggccctggaggagctggccgtgaactatgaccagaagagccaggaggtggaggacaagaccaaggagtatgagctgctgagtgatgagctgaaccagaagagcgccaccctggccagcattgatgctgagctgcagaagctgaaggagatgaccaaccaccagaagaagagagctgctgagatgatggccagcctgctgaaggacctggccgagattggaattgctgtgggcaacaatgatgtgaagcagcctgagggcaccggcatgattgatgaggagttcaccgtggcccggctgtacatcagcaagatgaagtctgaggtgaagaccatggtgaagcgctgcaagcagctggagagcacccagacagagagcaacaagaagatggaggagaatgagaaggagctggccgcctgccagctgcgcatcagccagcacgaggccaagatcaagagcctgacagagtacctgcagaatgtggagcagaagaagaggcagctggaggagagcgtggatgccctgtctgaggagctggtgcagctgcgggcccaggagaaggtgcatgagatggagaaggagcacctgaacaaggtgcagacagccaatgaggtgaagcaggccgtggagcagcagatccagagccaccgggagacccaccagaagcagatcagcagcctgagagatgaggtggaggccaaggccaagctgatcacagacctgcaggaccagaaccagaagatgatgctggagcaggagcggctgcgggtggagcacgagaagctgaaggccacagaccaggagaagagcaggaagctgcacgagctgactgtgatgcaggaccggcgggagcaggcccggcaggacctgaagggcctggaggagaccgtggccaaggagctgcagaccctgcacaacctgaggaagctgtttgtgcaggacctggccaccagggtgaagaagtctgctgagattgacagtgatgacaccggcggcagcgctgcccagaagcagaagatctccttcctggagaacaacctggagcagctgaccaaggtgcacaagcagctggtgcgggacaatgctgacctgcgctgtgagctgcccaagctggagaagaggctgcgggccacagctgagcgggtgaaggccctggagagcgccctgaaggaggccaaggaaaatgccagccgggacaggaagcgctaccagcaggaggtggaccgcatcaaggaggccgtgcgcagcaagaacatggcccggcggggccacagcgcccagatcgccaagcccatccggcccggccagcaccctgctgccagccccacccaccccagcgccatccggggcggcggggcctttgtgcagaacagccagcctgtggccgtgcggggcggcggcggcaagcaggtgtag

SEQ ID NO: 147058 - DNA, 2892 bp, Artificial Sequence
  derived and/or modified sequence
atggccgacctggccgagtgcaacatcaaggtgatgtgccggttccggccgctgaacgagtccgaagtgaatcgaggagataaatatatcgccaaattccagggagaagatacggtcgtgatcgcttctaagccctatgctttcgacagagtgtttcagagctccacttcacaggaacaagtgtataacgattgcgccaaaaaaatcgttaaggatgtattggaaggttataatgggaccattttcgcttatggccagacgagctctgggaagactcatactatggaaggcaagctgcacgatcctgaaggcatgggaatcatacctagaatcgtacaggacatttttaactacatttatagcatggacgagaatctggaattccatattaaagtgtcctatttcgaaatttatctggacaagattagggacctgctggacgtctcaaagaccaacctgtccgtgcacgaggataagaatcgagttccctacgtcaaaggttgtacggagaggttcgtttgttcacccgacgaagtgatggatactatagacgaagggaaatccaaccggcatgtggcagtaaccaatatgaacgagcactctagccgctcccactcaatttttttaatcaacgtcaagcaggagaacacccagaccgagcagaagctgagtggcaaactctacctagtggatctcgctgggtctgagaaagtcagcaaaactggcgccgaaggcgccgtattggacgaggccaaaaacattaataaatcactctccgcattagggaatgtgattagcgcactggctgaggggagcacctacgttccatatcgggattccaagatgacgagaatacttcaggatagcctagggggcaactgcaggacaacaatcgtcatctgttgctccccgtcctcttataacgagtcagaaacgaaatctaccctgctgttcggtcagagagcaaaaacaataaaaaacacagtttgtgtcaatgtcgaactgacggccgagcagtggaaaaaaaagtacgaaaaggagaaggagaagaacaagatcttacgcaacacaattcaatggctcgaaaatgaacttaaccgatggcggaacggggagactgttcccattgatgaacaatttgataaggaaaaagccaacctggaagcctttaccgtggataaggatataactctcacgaacgataagcctgcaactgcgataggcgttattgggaatttcaccgacgcggagagacgtaagtgcgaggaggagatcgctaaactgtataagcagctcgatgataaggatgaagagattaaccagcaatctcagctggtcgagaagctgaagacacagatgttggatcaggaggaactgcttgcgtccacccgccgcgatcaggacaatatgcaggccgagctgaaccgcctgcaggcagagaatgacgccagcaaggaagaagtcaaagaggtgttacaggcgctcgaggaactagcagtgaactacgatcaaaaatcccaagaggtagaggataaaacgaaagaatatgagctcctgtccgacgagttaaatcagaaaagcgcaaccttggcatccatcgatgcagaacttcaaaagctgaaggagatgactaaccatcagaagaagcgggctgccgaaatgatggcctctttgctcaaagacctggctgaaatcggaatcgctgttggtaacaatgacgtgaaacagcccgaaggcaccggcatgatcgacgaggaatttacagtcgctaggctgtacatatccaagatgaaaagtgaggtgaaaaccatggtgaagaggtgtaagcagctggagtcgacccagacagaatccaataaaaagatggaggagaacgagaaggaactggccgcatgtcagctgaggatttcccaacatgaggccaagatcaaatcattaaccgaataccttcaaaatgtggagcagaagaagagacagctggaggaaagcgtagacgccttgtcagaagagctcgtacagctccgagcgcaggagaaggttcatgaaatggagaaagagcacctcaacaaggtccagactgccaacgaggtgaaacaggccgttgagcagcaaattcagagtcatagggagacacatcagaagcaaatctcctcgctgagggacgaagtggaggccaaggcaaagctgataactgacctgcaggatcaaaaccagaagatgatgctggaacaggagagactgcgggtggaacatgaaaaactcaaggccacagaccaggagaaatccagaaaactccacgaactcaccgtgatgcaggacagacgtgaacaggcccgccaagacttaaagggcctggaggagaccgtggccaaggagctgcagaccctgcacaacctgaggaaactgttcgtccaagatctcgccacacgggtgaagaagtccgcagagattgactctgacgatactggcggctcggccgcccagaaacagaaaatttccttcttggaaaacaacctggaacagctgaccaaagtccataaacagctggtgagggataacgccgatcttcggtgtgaattacctaagttagaaaaacgccttcgtgccactgccgagagggtcaaggcactcgagtcagccctgaaggaggccaaggagaatgctagccgagacaggaaacgctaccagcaggaggtcgatcgtataaaagaagcggtgcggagcaaaaacatggcccgcagaggccattcggcacagattgcaaagccaatacgcccaggacagcaccccgcagccagccccactcacccgtccgccatccgcgggggaggggcttttgtccaaaattcccagccagtggccgtacgaggcggaggtggaaagcaggtatag

SEQ ID NO: 147059 - DNA, 2892 bp, Artificial Sequence
  derived and/or modified sequence
atggccgaccttgctgagtgtaatatcaaggtcatgtgcagattcaggcctctgaacgaaagtgaggtgaacagaggggataagtatatcgccaagttccagggggaggacaccgtggtcatagcctctaagccatacgcctttgacagagtttttcagtcctctactagccaggaacaagtatataatgactgcgctaagaaaatcgtgaaggatgtgttggaagggtataatgggacaatcttcgcatacggacagaccagtagcgggaaaactcacacgatggagggcaagctgcatgaccctgaagggatggggattattccacgcattgttcaggatatttttaactacatttacagcatggatgagaatcttgagttccatattaaggtctcctacttcgagatctaccttgataagatcagggacctcttagatgtgagcaaaaccaacctgtcagtgcatgaagataagaatcgtgtcccttacgtgaaaggctgtacagagaggttcgtctgtagtcctgacgaagtaatggatactatcgacgagggaaaatctaatcgtcacgtggcagtaaccaacatgaacgagcattcttcccgtagccacagtatattcctgataaatgtcaagcaagaaaacactcagacagagcaaaagctgagtggaaaactctacctggtggatctggccggttctgaaaaagtgtctaagaccggggctgagggcgcagtgctggatgaggcaaaaaacatcaataaatccctttcagctctgggcaacgtgatctcagctctggccgagggatccacatatgtcccttacagggacagcaagatgacacggattctacaggactcactgggcggtaactgccgtactacgattgttatatgttgtagccccagttcctacaacgaaagcgagacaaaatctacactcctcttcggtcagagggcgaaaacgataaagaataccgtgtgtgtgaacgtggagcttacagccgaacagtggaagaagaagtacgaaaaggaaaaggagaaaaataagattcttagaaatacaatacagtggctggaaaacgaactgaataggtggaggaatggtgagacggtcccaattgatgagcaattcgataaggagaaggccaacctcgaggccttcactgtagataaggacatcacactaactaacgacaagccagcgacggcaattggggttataggtaatttcactgacgccgagaggaggaaatgtgaggaggaaattgccaaattatacaagcagctggacgataaggatgaagagattaatcagcaatcacagctagttgaaaaactcaagacccagatgctcgaccaggaggagctgctggcttctactaggagggaccaagacaatatgcaagctgagttaaaccgcctgcaggcagaaaatgacgccagcaaagaagaggtgaaagaggtgttacaagccctcgaagagttggcagttaattacgaccagaagtcacaagaggtggaagataagacaaaggagtatgagctgctgtcagacgagctcaaccagaaatcagctactttggcgagtatcgatgcggagctgcagaaactcaaggaaatgactaaccaccagaagaaacgcgcagccgaaatgatggctagcttattgaaggacctcgccgaaattggtattgccgtggggaataacgatgtgaaacaacccgagggtacaggaatgatcgatgaagagtttactgtggcccgtctttatatttctaaaatgaagagcgaggtgaaaactatggtcaaacggtgtaagcaactcgaatcgacacagaccgagtcaaataagaagatggaggagaacgaaaaagagctggcggcttgccagttgcgtattagtcaacatgaggccaagatcaagagccttacagagtacctgcagaatgtggagcaaaaaaagcgccaactggaagagtctgtcgacgctctgtccgaggagttggttcagttaagagcccaagagaaagtccacgagatggaaaaagaacatcttaacaaagtgcagaccgcgaacgaagtgaaacaagcagtggaacagcagattcagagccaccgcgagactcatcagaagcagatttctagcctgcgcgacgaggtggaagcaaaagcgaagttgatcacagatctgcaggatcagaaccagaagatgatgctagaacaggaacggctaagggtcgagcacgagaaacttaaggccacagaccaggaaaagtcacgcaaacttcacgagctcactgtgatgcaagatagaagagaacaagccagacaggacctcaaaggcctcgaggaaacggtggccaaggagttgcagaccctgcacaatcttaggaaactcttcgttcaggacttggcaacacgggtgaaaaaatctgcagaaatcgacagtgacgataccggcggttccgccgctcaaaagcagaagatctccttcctagaaaataacctggagcagctaactaaggtgcacaaacagctagtcagagacaatgccgacctgagatgcgaattgccaaagctggaaaaacgcctaagagcaacagcagagagagtcaaggccttggaatctgcattaaaagaggctaaggagaacgcctcaagagatagaaaacgttaccaacaggaggttgataggatcaaagaggccgtgcgatccaagaacatggcgaggagaggccattccgctcaaatcgctaaacctatacgacccggacagcaccccgctgccagtcccacccacccttctgccattcgcggtggcggtgccttcgtacagaactcacagccagttgcggttcgaggcggtggcggtaagcaggtgtag

SEQ ID NO: 147060 - DNA, 2892 bp, Artificial Sequence
  derived and/or modified sequence
atggccgacctggccgagtgcaacatcaaggtgatgtgcagattcagacccctgaacgagagcgaggtgaacagaggcgacaagtacatcgccaagttccagggcgaggacaccgtggtgatcgccagcaagccctacgccttcgacagagtgttccagagcagcaccagccaggagcaggtgtacaacgactgcgccaagaagatcgtgaaggacgtgctggagggctacaacggcaccatcttcgcctacggccagaccagcagcggcaagacccacaccatggagggcaagctgcacgaccccgagggcatgggcatcatccccagaatcgtgcaggacatcttcaactacatctacagcatggacgagaacctggagttccacatcaaggtgagctacttcgagatctacctggacaagatcagagacctgctggacgtgagcaagaccaacctgagcgtgcacgaggacaagaacagagtgccctacgtgaagggctgcaccgagagattcgtgtgcagccccgacgaggtgatggacaccatcgacgagggcaagagcaacagacacgtggccgtgaccaacatgaacgagcacagcagcagaagccacagcatcttcctgatcaacgtgaagcaggagaacacccagaccgagcagaagctgagcggcaagctgtacctggtggacctggccggcagcgagaaggtgagcaagaccggcgccgagggcgccgtgctggacgaggccaagaacatcaacaagagcctgagcgccctgggcaacgtgatcagcgccctggccgagggcagcacctacgtgccctacagagacagcaagatgaccagaatcctgcaggacagcctgggcggcaactgcagaaccaccatcgtgatctgctgcagccccagcagctacaacgagagcgagaccaagagcaccctgctgttcggccagagagccaagaccatcaagaacaccgtgtgcgtgaacgtggagctgaccgccgagcagtggaagaagaagtacgagaaggagaaggagaagaacaagatcctgagaaacaccatccagtggctggagaacgagctgaacagatggagaaacggcgagaccgtgcccatcgacgagcagttcgacaaggagaaggccaacctggaggccttcaccgtggacaaggacatcaccctgaccaacgacaagcccgccaccgccatcggcgtgatcggcaacttcaccgacgccgagagaagaaagtgcgaggaggagatcgccaagctgtacaagcagctggacgacaaggacgaggagatcaaccagcagagccagctggtggagaagctgaagacccagatgctggaccaggaggagctgctggccagcaccagaagagaccaggacaacatgcaggccgagctgaacagactgcaggccgagaacgacgccagcaaggaggaggtgaaggaggtgctgcaggccctggaggagctggccgtgaactacgaccagaagagccaggaggtggaggacaagaccaaggagtacgagctgctgagcgacgagctgaaccagaagagcgccaccctggccagcatcgacgccgagctgcagaagctgaaggagatgaccaaccaccagaagaagagagccgccgagatgatggccagcctgctgaaggacctggccgagatcggcatcgccgtgggcaacaacgacgtgaagcagcccgagggcaccggcatgatcgacgaggagttcaccgtggccagactgtacatcagcaagatgaagagcgaggtgaagaccatggtgaagagatgcaagcagctggagagcacccagaccgagagcaacaagaagatggaggagaacgagaaggagctggccgcctgccagctgagaatcagccagcacgaggccaagatcaagagcctgaccgagtacctgcagaacgtggagcagaagaagagacagctggaggagagcgtggacgccctgagcgaggagctggtgcagctgagagcccaggagaaggtgcacgagatggagaaggagcacctgaacaaggtgcagaccgccaacgaggtgaagcaggccgtggagcagcagatccagagccacagagagacccaccagaagcagatcagcagcctgagagacgaggtggaggccaaggccaagctgatcaccgacctgcaggaccagaaccagaagatgatgctggagcaggagagactgagagtggagcacgagaagctgaaggccaccgaccaggagaagagcagaaagctgcacgagctgaccgtgatgcaggacagaagagagcaggccagacaggacctgaagggcctggaggagaccgtggccaaggagctgcagaccctgcacaacctgagaaagctgttcgtgcaggacctggccaccagagtgaagaagagcgccgagatcgacagcgacgacaccggcggcagcgccgcccagaagcagaagatcagcttcctggagaacaacctggagcagctgaccaaggtgcacaagcagctggtgagagacaacgccgacctgagatgcgagctgcccaagctggagaagagactgagagccaccgccgagagagtgaaggccctggagagcgccctgaaggaggccaaggagaacgccagcagagacagaaagagataccagcaggaggtggacagaatcaaggaggccgtgagaagcaagaacatggccagaagaggccacagcgcccagatcgccaagcccatcagacccggccagcaccccgccgccagccccacccaccccagcgccatcagaggcggcggcgccttcgtgcagaacagccagcccgtggccgtgagaggcggcggcggcaagcaggtgtag

SEQ ID NO: 147061 - protein, 957 aa, Artificial Sequence
  derived and/or modified sequence
MADPAECSIKVMCRFRPLNEAEILRGDKFIPKFKGDETVVIGQGKPYVFDRVLPPNTTQEQVYNACAKQIVKDVLEGYNGTIFAYGQTSSGKTHTMEGKLHDPQLMGIIPRIAHDIFDHIYSMDENLEFHIKVSYFEIYLDKIRDLLDVSKTNLAVHEDKNRVPYVKGCTERFVSSPEEVMDVIDEGKANRHVAVTNMNEHSSRSHSIFLINIKQENVETEKKLSGKLYLVDLAGSEKVSKTGAEGAVLDEAKNINKSLSALGNVISALAEGTKTHVPYRDSKMTRILQDSLGGNCRTTIVICCSPSVFNEAETKSTLMFGQRAKTIKNTVSVNLELTAEEWKKKYEKEKEKNKTLKNVIQHLEMELNRWRNGEAVPEDEQISAKDQKNLEPCDNTPIIDNIAPVVAGISTEEKEKYDEEISSLYRQLDDKDDEINQQSQLAEKLKQQMLDQDELLASTRRDYEKIQEELTRLQIENEAAKDEVKEVLQALEELAVNYDQKSQEVEDKTRANEQLTDELAQKTTTLTTTQRELSQLQELSNHQKKRATEILNLLLKDLGEIGGIIGTNDVKTLADVNGVIEEEFTMARLYISKMKSEVKSLVNRSKQLESAQMDSNRKMNASERELAACQLLISQHEAKIKSLTDYMQNMEQKRRQLEESQDSLSEELAKLRAQEKMHEVSFQDKEKEHLTRLQDAEEMKKALEQQMESHREAHQKQLSRLRDEIEEKQKIIDEIRDLNQKLQLEQEKLSSDYNKLKIEDQEREMKLEKLLLLNDKREQAREDLKGLEETVSRELQTLHNLRKLFVQDLTTRVKKSVELDNDDGGGSAAQKQKISFLENNLEQLTKVHKQLVRDNADLRCELPKLEKRLRATAERVKALESALKEAKENAMRDRKRYQQEVDRIKEAVRAKNMARRAHSAQIAKPIRPGHYPASSPTAVHAIRGGGGSSSNSTHYQK

SEQ ID NO: 147062 - protein, 860 aa, Artificial Sequence
  derived and/or modified sequence
GKLHDPQLMGIIPRIAHDIFDHIYSMDENLEFHIKVSYFEIYLDKIRDLLDVSKTNLAVHEDKNRVPYVKGCTERFVSSPEEVMDVIDEGKANRHVAVTNMNEHSSRSHSIFLINIKQENVETEKKLSGKLYLVDLAGSEKVSKTGAEGAVLDEAKNINKSLSALGNVISALAEGTKTHVPYRDSKMTRILQDSLGGNCRTTIVICCSPSVFNEAETKSTLMFGQRAKTIKNTVSVNLELTAEEWKKKYEKEKEKNKTLKNVIQHLEMELNRWRNGEAVPEDEQISAKDQKNLEPCDNTPIIDNIAPVVAGISTEEKEKYDEEISSLYRQLDDKDDEINQQSQLAEKLKQQMLDQDELLASTRRDYEKIQEELTRLQIENEAAKDEVKEVLQALEELAVNYDQKSQEVEDKTRANEQLTDELAQKTTTLTTTQRELSQLQELSNHQKKRATEILNLLLKDLGEIGGIIGTNDVKTLADVNGVIEEEFTMARLYISKMKSEVKSLVNRSKQLESAQMDSNRKMNASERELAACQLLISQHEAKIKSLTDYMQNMEQKRRQLEESQDSLSEELAKLRAQEKMHEVSFQDKEKEHLTRLQDAEEMKKALEQQMESHREAHQKQLSRLRDEIEEKQKIIDEIRDLNQKLQLEQEKLSSDYNKLKIEDQEREMKLEKLLLLNDKREQAREDLKGLEETVSRELQTLHNLRKLFVQDLTTRVKKSVELDNDDGGGSAAQKQKISFLENNLEQLTKVHKQLVRDNADLRCELPKLEKRLRATAERVKALESALKEAKENAMRDRKRYQQEVDRIKEAVRAKNMARRAHSAQIAKPIRPGHYPASSPTAVHAIRGGGGSSSNSTHYQK

SEQ ID NO: 147063 - protein, 862 aa, Artificial Sequence
  derived and/or modified sequence
MWGKLHDPQLMGIIPRIAHDIFDHIYSMDENLEFHIKVSYFEIYLDKIRDLLDVSKTNLAVHEDKNRVPYVKGCTERFVSSPEEVMDVIDEGKANRHVAVTNMNEHSSRSHSIFLINIKQENVETEKKLSGKLYLVDLAGSEKVSKTGAEGAVLDEAKNINKSLSALGNVISALAEGTKTHVPYRDSKMTRILQDSLGGNCRTTIVICCSPSVFNEAETKSTLMFGQRAKTIKNTVSVNLELTAEEWKKKYEKEKEKNKTLKNVIQHLEMELNRWRNGEAVPEDEQISAKDQKNLEPCDNTPIIDNIAPVVAGISTEEKEKYDEEISSLYRQLDDKDDEINQQSQLAEKLKQQMLDQDELLASTRRDYEKIQEELTRLQIENEAAKDEVKEVLQALEELAVNYDQKSQEVEDKTRANEQLTDELAQKTTTLTTTQRELSQLQELSNHQKKRATEILNLLLKDLGEIGGIIGTNDVKTLADVNGVIEEEFTMARLYISKMKSEVKSLVNRSKQLESAQMDSNRKMNASERELAACQLLISQHEAKIKSLTDYMQNMEQKRRQLEESQDSLSEELAKLRAQEKMHEVSFQDKEKEHLTRLQDAEEMKKALEQQMESHREAHQKQLSRLRDEIEEKQKIIDEIRDLNQKLQLEQEKLSSDYNKLKIEDQEREMKLEKLLLLNDKREQAREDLKGLEETVSRELQTLHNLRKLFVQDLTTRVKKSVELDNDDGGGSAAQKQKISFLENNLEQLTKVHKQLVRDNADLRCELPKLEKRLRATAERVKALESALKEAKENAMRDRKRYQQEVDRIKEAVRAKNMARRAHSAQIAKPIRPGHYPASSPTAVHAIRGGGGSSSNSTHYQK

SEQ ID NO: 147064 - protein, 72 aa, Artificial Sequence
  derived and/or modified sequence
MADPAECSIKVMCRFRPLNEAEILRGDKFIPKFKGDETVVIGQGKPYVFDRVLPPNTTQEQVYNACAKQIVK

SEQ ID NO: 147065 - DNA, 2874 bp, Artificial Sequence
  derived and/or modified sequence
atggccgaccccgccgagtgcagcatcaaggtgatgtgcagattcagacccctgaacgaggccgagatcctgagaggcgacaagttcatccccaagttcaagggcgacgagaccgtggtgatcggccagggcaagccctacgtgttcgacagagtgctgccccccaacaccacccaggagcaggtgtacaacgcctgcgccaagcagatcgtgaaggacgtgctggagggctacaacggcaccatcttcgcctacggccagaccagcagcggcaagacccacaccatggagggcaagctgcacgacccccagctgatgggcatcatccccagaatcgcccacgacatcttcgaccacatctacagcatggacgagaacctggagttccacatcaaggtgagctacttcgagatctacctggacaagatcagagacctgctggacgtgagcaagaccaacctggccgtgcacgaggacaagaacagagtgccctacgtgaagggctgcaccgagagattcgtgagcagccccgaggaggtgatggacgtgatcgacgagggcaaggccaacagacacgtggccgtgaccaacatgaacgagcacagcagcagaagccacagcatcttcctgatcaacatcaagcaggagaacgtggagaccgagaagaagctgagcggcaagctgtacctggtggacctggccggcagcgagaaggtgagcaagaccggcgccgagggcgccgtgctggacgaggccaagaacatcaacaagagcctgagcgccctgggcaacgtgatcagcgccctggccgagggcaccaagacccacgtgccctacagagacagcaagatgaccagaatcctgcaggacagcctgggcggcaactgcagaaccaccatcgtgatctgctgcagccccagcgtgttcaacgaggccgagaccaagagcaccctgatgttcggccagagagccaagaccatcaagaacaccgtgagcgtgaacctggagctgaccgccgaggagtggaagaagaagtacgagaaggagaaggagaagaacaagaccctgaagaacgtgatccagcacctggagatggagctgaacagatggagaaacggcgaggccgtgcccgaggacgagcagatcagcgccaaggaccagaagaacctggagccctgcgacaacacccccatcatcgacaacatcgcccccgtggtggccggcatcagcaccgaggagaaggagaagtacgacgaggagatcagcagcctgtacagacagctggacgacaaggacgacgagatcaaccagcagagccagctggccgagaagctgaagcagcagatgctggaccaggacgagctgctggccagcaccagaagagactacgagaagatccaggaggagctgaccagactgcagatcgagaacgaggccgccaaggacgaggtgaaggaggtgctgcaggccctggaggagctggccgtgaactacgaccagaagagccaggaggtggaggacaagaccagagccaacgagcagctgaccgacgagctggcccagaagaccaccaccctgaccaccacccagagagagctgagccagctgcaggagctgagcaaccaccagaagaagagagccaccgagatcctgaacctgctgctgaaggacctgggcgagatcggcggcatcatcggcaccaacgacgtgaagaccctggccgacgtgaacggcgtgatcgaggaggagttcaccatggccagactgtacatcagcaagatgaagagcgaggtgaagagcctggtgaacagaagcaagcagctggagagcgcccagatggacagcaacagaaagatgaacgccagcgagagagagctggccgcctgccagctgctgatcagccagcacgaggccaagatcaagagcctgaccgactacatgcagaacatggagcagaagagaagacagctggaggagagccaggacagcctgagcgaggagctggccaagctgagagcccaggagaagatgcacgaggtgagcttccaggacaaggagaaggagcacctgaccagactgcaggacgccgaggagatgaagaaggccctggagcagcagatggagagccacagagaggcccaccagaagcagctgagcagactgagagacgagatcgaggagaagcagaagatcatcgacgagatcagagacctgaaccagaagctgcagctggagcaggagaagctgagcagcgactacaacaagctgaagatcgaggaccaggagagagagatgaagctggagaagctgctgctgctgaacgacaagagagagcaggccagagaggacctgaagggcctggaggagaccgtgagcagagagctgcagaccctgcacaacctgagaaagctgttcgtgcaggacctgaccaccagagtgaagaagagcgtggagctggacaacgacgacggcggcggcagcgccgcccagaagcagaagatcagcttcctggagaacaacctggagcagctgaccaaggtgcacaagcagctggtgagagacaacgccgacctgagatgcgagctgcccaagctggagaagagactgagagccaccgccgagagagtgaaggccctggagagcgccctgaaggaggccaaggagaacgccatgagagacagaaagagataccagcaggaggtggacagaatcaaggaggccgtgagagccaagaacatggccagaagagcccacagcgcccagatcgccaagcccatcagacccggccactaccccgccagcagccccaccgccgtgcacgccatcagaggcggcggcggcagcagcagcaacagcacccactaccagaagtag

SEQ ID NO: 147066 - DNA, 2874 bp, Artificial Sequence
  derived and/or modified sequence
atggccgatcccgctgaatgttctatcaaggtgatgtgtaggtttagacccctgaacgaggcagagattttgcgcggtgataaattcataccgaagtttaagggggacgaaacagttgtgattgggcagggcaaaccatacgttttcgaccgcgtgttgcccccaaatacaactcaggaacaggtttataatgcctgcgccaaacagattgtcaaagatgtgctggaagggtacaatggcaccatatttgcctacggccaaacctcctccggaaaaacccacacaatggagggcaaactccatgatccacagctgatgggcatcattccccgaatcgcccatgatattttcgaccacatttacagtatggatgagaacttggagttccatatcaaagtaagttatttcgaaatttatctggacaagatacgggacctgctcgatgtctctaagactaatctcgccgtccatgaggacaagaacagggtgccctatgtgaagggctgcactgagcgtttcgtcagtagcccagaagaggtgatggatgtgatcgacgaggggaaagccaataggcatgtcgcagtcacaaacatgaacgagcattcctcccgtagccactctatctttcttataaacatcaaacaagagaacgttgaaactgagaagaaattgtcgggaaagttatacttagttgacttggccggaagcgaaaaagtgtctaaaaccggggcagagggagctgtgctggacgaagcgaagaatattaataagtccctgtctgcactggggaacgtcatcagtgcacttgccgagggtactaaaacgcacgtcccttatagagattcaaaaatgacccgaattctgcaggacagcctcggtggaaactgccgcaccacaatcgtgatttgctgtagcccttcggtgtttaatgaggccgaaactaagtccacactgatgtttggccaaagggctaaaactattaaaaacactgtatctgtgaatctggaactcacagccgaagagtggaaaaagaagtacgagaaagagaaagaaaaaaataagaccctgaagaatgtgattcagcacttagagatggagcttaaccgctggcgaaatggagaggctgtgcctgaagacgagcagatcagcgccaaagaccagaaaaacctggagccctgcgataacacacccatcattgataatattgcccctgtagttgcaggcatctccacagaggaaaaggagaagtatgacgaagagatatcaagtctgtaccggcagcttgatgataaggacgacgagattaaccagcagtcacagctcgctgaaaagctcaaacaacaaatgctcgaccaagacgagcttctcgcctctacccgccgcgactatgaaaaaattcaggaggagttgacacgtctgcagattgagaatgaagccgccaaggatgaagtcaaagaggtgctgcaagccctcgaggaactggcggtaaactatgaccagaagtcacaagaggtggaagacaagacacgagcaaatgagcagctgacagacgagttagcgcagaagacaactaccctgacaactacccagagagagttgtctcagctgcaagagctgtcaaaccatcaaaaaaagcgggcgaccgaaattctgaacctcctgctcaaggacttgggcgagatcggcggaatcatcggtactaatgacgtaaagacactcgcagacgttaacggcgtgattgaagaagagtttaccatggctcgcttatacatttccaagatgaagtcggaggtcaaatcactggtgaacaggtcaaaacagctggagtctgcacaaatggactcaaatcgcaaaatgaatgctagcgaacgcgaactcgcggcatgccagcttctcatttcccagcatgaggcgaagatcaagtccttgaccgactatatgcagaatatggagcagaaacggcgacagttagaggagtctcaggattcattatctgaagaactggccaaacttcgggcccaggagaagatgcacgaagtgagctttcaggataaggagaaagagcacctgacaaggctgcaggacgccgaagagatgaagaaagctctagagcaacagatggagagtcaccgcgaggcccatcaaaagcagctttccagactgagggacgaaattgaggaaaaacagaagatcattgacgagatccgggatctaaatcagaaactgcagctcgagcaggagaaactgtccagcgattataacaaactgaaaatcgaagaccaggagagagaaatgaagcttgagaaactgcttctgctgaatgacaagcgggaacaggccagagaagacctcaagggattagaagaaacggtttcaagagagctgcagactctccataatttacgaaagctttttgttcaggatctgaccacccgcgtgaagaagagtgtggagttggacaatgatgacggaggtggctccgccgcccagaagcagaaaatcagcttccttgagaataaccttgaacagctgaccaaggtccataaacagctcgtaagggacaacgccgacttgcgctgtgagctgcccaaactggaaaagaggctgcgagcaactgccgaacgggtgaaagcactcgagagtgcgttgaaggaagctaaggagaatgccatgagagatagaaaacgctaccagcaggaggtggaccgcattaaggaggctgttagagctaagaacatggctcgtagggcacattctgcccaaatcgccaagcccatccgcccaggtcattaccctgcctcttctccgactgctgttcacgccatccgtggcggcggcgggtccagcagcaactcgacccattaccagaaatag

SEQ ID NO: 147067 - DNA, 2874 bp, Artificial Sequence
  derived and/or modified sequence
atggctgaccctgctgagtgcagcatcaaggtgatgtgccgcttccggcccctgaatgaagctgagatcctgcggggggacaagttcatccccaagttcaagggagatgagaccgtggtgattggccagggcaagccctacgtgtttgacagagtgctgccccccaacaccacccaggagcaggtgtacaatgcctgtgccaagcagatcgtgaaggatgtgctggagggctacaacggcaccatctttgcctacggccagaccagcagcggcaagacccacaccatggagggcaagctgcatgacccccagctgatgggcatcatcccccgcatcgcccatgacatctttgaccacatctacagcatggatgagaacctggagttccacatcaaggtgtcctactttgagatctacctggacaagatccgggacctgctggatgtgtccaagaccaacctggccgtgcatgaggacaagaacagagtgccctacgtgaagggctgcacagaaagatttgtgagcagccctgaggaggtgatggatgtgattgatgagggcaaggccaacagacatgtggccgtgaccaacatgaatgagcacagcagccgcagccacagcatcttcctgatcaacatcaagcaggagaatgtggagacagagaagaagctgagcggcaagctgtacctggtggacctggccggcagcgagaaggtgtccaagacaggagctgagggcgctgtgctggatgaggccaagaacatcaacaagagcctgagcgccctgggcaatgtcatcagcgccctggccgagggcaccaagacccacgtgccctacagagacagcaagatgacccgcatcctgcaggacagcctgggcggcaactgcaggaccaccatcgtcatctgctgcagccccagcgtcttcaatgaggccgagaccaagagcaccctgatgtttggccagagggccaagaccatcaagaacacagtgtctgtgaacctggagctgacagctgaggagtggaagaagaagtatgagaaggagaaggagaagaacaagaccctgaagaatgtcatccagcacctggagatggagctgaaccgctggagaaatggagaggccgtgcctgaagatgagcagatcagcgccaaggaccagaagaacctggagccctgtgacaacacccccatcatcgacaacatcgcccctgtggtggccggcatcagcacagaggagaaggagaagtatgatgaggagatcagcagcctgtaccggcagctggatgacaaggatgatgagatcaaccagcagagccagctggccgagaagctgaagcagcagatgctggaccaggatgagctgctggccagcacccggcgggactatgagaagatccaggaggagctgacccggctgcagattgaaaatgaagctgccaaggatgaggtgaaggaggtgctgcaggccctggaggagctggccgtgaactatgaccagaagagccaggaggtggaggacaagacccgggccaatgagcagctgacagatgagctggcccagaagaccaccaccctgaccaccacccagcgggagctgagccagctgcaggagctgagcaaccaccagaagaagagggccacagagatcctgaacctgctgctgaaggacctgggggagattggaggcatcatcggcaccaatgatgtgaagaccctggctgatgtgaatggagtcatcgaggaggagttcaccatggcccggctgtacatcagcaagatgaagtctgaggtgaagagcctggtgaacagaagcaagcagctggagagcgcccagatggacagcaacaggaagatgaatgccagcgagcgggagctggccgcctgccagctgctgatcagccagcacgaggccaagatcaagagcctgacagactacatgcagaacatggagcagaagaggcggcagctggaggagagccaggacagcctgtctgaggagctggccaagctgcgggcccaggagaagatgcatgaggtgtccttccaggacaaggagaaggagcacctgacccggctgcaggatgctgaggagatgaagaaggccctggagcagcagatggagagccaccgggaggcccaccagaagcagctgagccggctgagagatgaaattgaggagaagcagaagatcattgatgagatccgggacctgaaccagaagctgcagctggagcaggagaagctgagcagtgactacaacaagctgaagattgaggaccaggagcgggagatgaagctggagaagctgctgctgctgaatgacaagcgggagcaggcccgggaggacctgaagggcctggaggagaccgtgtcccgggagctgcagaccctgcacaacctgaggaagctgtttgtgcaggacctgaccaccagggtgaagaagtctgtggagctggacaatgatgatggcggcggcagcgctgcccagaagcagaagatctccttcctggagaacaacctggagcagctgaccaaggtgcacaagcagctggtgcgggacaatgctgacctgcgctgtgagctgcccaagctggagaagaggctgcgggccacagctgagcgggtgaaggccctggagagcgccctgaaggaggccaaggaaaatgccatgagggacaggaagcgctaccagcaggaggtggaccgcatcaaggaggccgtgcgggccaagaacatggcccggcgggcccacagcgcccagatcgccaagcccatccggcccggccactacccagccagcagccccacagctgtgcacgccatccggggcggcggcggcagcagcagcaacagcacccactaccagaagtag

SEQ ID NO: 147068 - DNA, 6931 bp, Artificial Sequence
  derived and/or modified sequence
gatggctgagcgcgcaggagcccgggaggtctgagccgggcgaggctcgctccctgcgcatcgcctcctccgcccgccgcgtggtcgcgggcaggtgggccggggggcgctgggcaggggcggggcagggccagggcaggccggtctgcagccggaggggccggagcggagaagctgcccaccttcccgggctcggagcggccggggctgctcagccggccgggctcgcgatgacctgctgagaagcgtcgtcggaggctgcaggaggcggcctagctgtgggcggtgcagctcgcggcctcctccctcgtcgttcccggccccggccccccacccatccccgtgccccctccctaccgccggccgagatggcggatccagccgaatgcagcatcaaagtgatgtgccggttccggcccctcaacgaagcggagatcctccgcggggacaaattcatccccaaatttaaaggcgatgagaccgtggtgatcgggcaagggaagccatatgtcttcgacagagtgctacctcccaacacgacccaagagcaggtttacaatgcatgtgcgaagcaaattgtcaaagatgtccttgaaggttataacgggacgatttttgcgtatgggcagacttcatcaggaaaaacccacaccatggaggggaagctgcatgacccccagctcatggggatcatcccacgaattgcccatgatatctttgaccatatctactccatggatgagaacctggagtttcacataaaggtttcctattttgagatctacttggacaaaataagggacttacttgatgtatccaagaccaacttggctgttcatgaagataaaaacagagtcccgtatgtaaaggggtgcactgagcggtttgtgtcgagccctgaggaagtcatggatgtaatagatgaaggcaaagcaaaccgacacgtggctgtgacaaacatgaatgaacacagctctagaagtcacagtatcttcctgataaatattaaacaagagaatgtagagactgaaaaaaaactcagtgggaaactttatttggttgatttggctgggagcgaaaaggtcagcaaaactggtgccgagggagctgttcttgacgaagctaaaaatatcaataagtctttgtctgctcttggaaatgtgatctctgctttggcagaagggacaaaaacacatgtgccataccgggacagcaagatgactcggattcttcaggactctttgggtgggaactgcagaaccaccatcgtcatttgctgttctccttctgtcttcaatgaggctgagaccaagtccacactgatgttcggacagagagctaagaccatcaagaatacagtctctgtgaacctagaactgacagcagaagaatggaagaagaaatatgaaaaagagaaagagaaaaacaagactttgaagaatgttatccagcatctggagatggagctaaacaggtggaggaatggagaagctgtgcctgaggatgaacagatcagtgccaaggaccagaagaacctggagccttgtgataacacccccatcatagacaatattgctcctgttgttgctggcatctctacagaggagaaagagaagtacgatgaggagatctccagtctctacagacaactggatgacaaggatgatgaaattaaccagcagagccagctggctgaaaagctgaagcaacagatgttggatcaggatgagcttttagcttccacaagaagagactatgagaagatacaggaggagctgacacgtctccagattgaaaatgaggcagccaaggatgaggtgaaagaagttctccaggccctggaggagctggctgtcaattatgaccagaaatcacaggaagtggaggataagacccgggccaatgagcagctgacagacgagctggcccagaaaacgactacattgacaaccacacagagagagctgagccagctacaagagcttagcaaccaccagaagaaaagggcaactgagatcctgaatttgctgttgaaagatctgggggagataggtggaattattggcaccaatgatgtgaaaactttggcagatgtgaatggagtcattgaggaggagtttaccatggcccgcctgtacatcagcaagatgaagtcagaggtcaagtccctggtgaaccgcagcaaacagctcgagagcgcccagatggactccaacaggaagatgaatgccagcgagcgggagctggcagcctgccagctgctcatctcccagcacgaagccaagatcaagtctctgacagactacatgcagaacatggaacagaagaggaggcagctagaagagtcccaggactcgctcagcgaagagctggcaaagctccgagcccaggaaaaaatgcacgaagtcagcttccaggataaggagaaggaacatctgacgcggttgcaggatgctgaagaaatgaagaaggcgctggagcagcagatggagagccaccgggaagctcaccagaagcagctgtccagactccgagacgaaattgaggagaagcagaaaatcattgatgagattcgggatttgaatcagaaactgcaactggaacaggagaagcttagttctgattataacaagctgaaaatagaggaccaagagagagaaatgaagctggaaaagctcttattgctcaacgataaaagggaacaagccagagaagacctcaaagggctggaggagacagtgtctagagaattgcagacactgcacaaccttcggaaactctttgtccaggatctgaccacccgagttaaaaaaagtgtggagttggacaacgatgatggagggggcagtgctgcccagaagcagaaaatttccttcttggagaataacctggagcagctcaccaaagttcacaagcagctggtccgggacaacgcagacctgcgctgtgaactgcccaagctggagaagcggctgcgtgccacggcggagcgcgtcaaggctctggagagcgcgctgaaggaggccaaggagaacgccatgcgggaccgtaagcgctaccagcaggaggtggatcgtatcaaggaggccgtgcgggccaagaacatggccagaagggcccattcagcccagatcgccaagcccatccgccccggacactacccggcctcatctccaacggccgtccatgccattcgagggggaggaggcagctcttcaaattccactcactaccagaaataaatacaaaatatgactccacgtagcatgtcaaggactacattaatcaccaattcctttatttttccccccctacagtttccattttttttttatacttgcttactccagccatctgcagtacaccagtttcaggtcttttgagctgtgtagagtttctgtgtgtacagatgtgtgctcggacttttctctttttgagaaatctgaaggagatggttgcagaagatccacttactactgagaaccattaccaccgactcggcctccggggtgttgggtggtttctgggtggttcctggagcctcctctgggcagtgcactgtcccatctgtacgccctaatgtgccattccctagaggggaacaaccaagtgccgtggaggcagatgatcatggtctgcctcaactgtctggtttcctgtaaaataaacacattgttttatatttttagggaacaaaaagtgctgctatagggttcaaagttttccttctgaacacttttccgaaacaaattaccccaaagacacattttgaatatcctggtcacatctttggatctgtaaaatataccttttagtatggcacctgttaaaatgcaaagcaaatttctttggggcagaaaaacaatctgacagtagcagtgtagaatttgttcattcaaatacatctgtgtaaatgcaaaaagtcataaaattcacctccgagctgcttgcttttgaacctgcagcaactagtcttagccggcccggtttgaacatcgttctttcagaagtgctgaaaatgctgcaaagttggataagtggaaatgtggctgcccctctcctcactacttcctctctgatcgttctgaagcttgcattgggaatggctgctttctctaaccattttcagcttgagtgggtattgctgaagaaatccaacatcattccagcagttgaaaaaggaagccttcgggagaaagtgcttgtcaaaattttgttctttgtgcttgtgtatgagtaagttgccatgaataagttattattttaacccataattggcgactgtttatatgaattctttctttggcaccaaataggtttcatcttcttaggcacaattagaaaaaatccacatagatggatattttacatttagttattgctttatccaaatacatgaatctaaagctgaatcaacccttacttccagttgtgcttattaagaagatcaatttccaagtagtaaagttttcagggaaactgactgtgctgctatttgttttgacaaatttgggggtaagtcaatgacaaccaaaccaatctcggtggaaactcctatcctatcatgttgtgtgcccaagatgagtgagctggcactgtgccctgaagctttcaccactgtaatgaaatatatgccaggggagactttgggcttttctcatgactgtgtgggtcgaaggtagctcaagtgtgtgtgtgtgtgtgtgtgtgtgtgtgtgtgtgtgtgtgtgtgtatgtgtgtaaagtgctaagaactgtgcattgacatccaaacatttcttgtacaaaatttccctagcaaagcaaacctgctttgacttaatttatttgttaaatgttgcactttgtttatgtatgttttgtttttggtggggaataaggagagagaggacgacaaattctattgaagtatttattttgtgaagatggcaattttgcatttgtttaaatttttttcattctttaattttgttatcagtgccagcccaatatacctgctctaccattatttgcggtctgataaaagggtccttgtggggcaggttttgcaaagcttatcaggtaataacatatgccacataaccttgttgatatgtttgcttctgatttgggaagctaaacattggtgtttgagaggattgccaattattaattgtcattaccactactctccattactttttgtttggaaattgaacaaaggtcagtaatggtttttggctcttgttaatatccatcataaaatagattgttttagattctttccagggtgatttttccctgggtaccccgtttctacttctaaagaattgcttggcactttcatgtttcaaagggaaacattcgcttgtagttccattttacttgatctctacaagggactgacaacatttgctttacttttattcacagagaaagttggctttgatgtctcttaaagataattctgctagttgctgatcagccagtcagttcacctagcttcaatctttataggacttctaatctaattttcctatagtgtgactaaaagggaggcaaattattggaacggattattcaaatggatccttaaatattgctatgtataataagccagttattatatcaggaccatgttctctgtaggccactttctaaaaaagccacatatgtgcaattttcaggtttttagactattgctccctgtactttaaatgtaaaaaccacacttctgaacaactaagctcatgaatatgattttggttatatgcagcttttgactagcatgtattgtgtctttttctcctctatgaataattttatatttcatgctacttcttgaaagtttactctttgatgctctaagagaacagccagatggtttatatgaataatctttatctgcaggatggtggattggtaaattaggagaatgttgtttgagatatcaagatttatgtctgggaactaaaatatataatgccaaatgtgtttttgtcaattactagagaattctgtgcaaacatatcatctcttcaaatgctgcacactttgcttttgttaaacagcaggtagtagacagaacaataacagtttcgcgttaagacttttaaaggaaatagaatcgtgattaagaaatcagaatttatagatatattgggataaatgaagaaataaaaatgtttgtctagaatgtagcatctagtgactttttaaagccctaacgtttacataaagaagctctagttcttatagaaataacaaagcaaataaaagttcttaacaatcccctctttcgaagtgcatttttttaaagcagggcaggagacatttggactctagctatatgacatactgggaaaggcagagggtggagggaagatttcacttcattgtctagcccagaatcttgagcaagctaaagaaaccatcataatctaaaattgcttcatttaacactaacaatttagactttttaaaccaagcattgaataatggctggataactgccgaagtaagcgccgctccatgaagtctgcttacttatttaaaaattgtgtatcagttttaaatactgttcattgtgtgcagatataaggggaatagggcattctgtagaattatacatgtctagtttgtaaagtgtgtcctgtgtactgcagatgtgtgttctctgggctttatgtatctgtacagtagctttcacattaaaaaaattgtggacaaacttgtccggggggtttgaggggagaatggtggtttatatcaataacgatgctgtactatagtccatgtaacaaaagatctggaagtcaccctcctctggcccacggaaaattttggtaatcttctaggttctaaaatgaagatgtatgggtactctggcagactgcatgttgtataatttgaaaaatactaaaagtggaaaataaaattgaattaaactttg

SEQ ID NO: 147069 - DNA, 2874 bp, Artificial Sequence
  derived and/or modified sequence
atggccgaccccgccgagtgcagcatcaaggtgatgtgccggttccgacctctcaacgaggcagaaatcttgcggggagacaaattcattcctaagtttaagggggacgagaccgttgtgatcgggcagggtaaaccctacgtgtttgaccgtgtattgccgccaaataccacccaagaacaggtgtataacgcgtgcgcaaaacagatagtaaaggatgtgctagaaggatataacggcaccatctttgcgtacgggcagacgagctccggcaagactcacaccatggagggcaagctacacgacccccagctaatgggcatcatcccccgcatagcgcatgatatcttcgaccatatttattctatggatgagaacctggaattccacattaaagtgtcgtacttcgagatctatctcgacaaaatcagagatttactggatgtaagtaaaactaatctcgccgtgcatgaagataagaatagagtaccttacgtcaagggctgtactgaaagatttgtgtcttcaccggaggaggtgatggatgtgattgatgaaggcaaggccaaccgacatgtggcagtgaccaatatgaacgaacactcctcgagatctcacagtatttttctgattaatatcaaacaggagaacgtggagaccgagaagaagctgagcgggaaactctacctggtggatctggctggctctgaaaaggtttctaaaacaggtgcagagggagctgtgctggacgaggcaaagaatatcaataagagcctgtccgcactggggaacgtcataagcgctctcgccgaaggcaccaagactcacgtgccatacagggactccaagatgacaaggatcctccaggatagtttgggagggaactgtcgcaccaccatagtgatctgctgttctccaagcgtgttcaacgaggccgagactaagagcacattgatgttcggtcaacgcgccaaaactatcaagaataccgtctctgtgaatctcgagctgaccgcagaagagtggaaaaagaagtacgagaaagaaaaggaaaagaacaaaacactgaaaaatgtcatacagcatctagagatggagcttaacagatggagaaacggcgaggccgttcctgaagatgagcaaatttctgccaaggaccaaaaaaacctggaaccttgtgacaacactcctattatcgacaacatcgcccccgtcgtggccggcatcagtacagaagaaaaagagaagtacgacgaagagatctcgtccctctaccgccaactggatgacaaagatgacgagattaaccagcagtcccagcttgctgagaaactcaaacagcagatgctggaccaggatgaactgctggcctctacgcggcgggactatgagaagattcaggaagaattgaccagactgcagatcgaaaacgaagctgctaaagatgaggtgaaagaggttctccaggctttggaggaactcgctgttaactatgaccagaagtctcaagaagtagaagacaaaactcgagcaaatgaacaacttactgacgagttagcccagaaaacaaccaccctcacaacaacgcagcgagagctgtcacaacttcaggagctgtcgaaccatcagaagaaacgtgccaccgaaattctaaatctccttttgaaggatctgggcgagatcggaggcatcattggcacaaacgacgtgaagactctggccgatgtgaacggcgttattgaggaagagtttaccatggcgcggctgtacattagcaagatgaaatctgaagttaaaagtttggtcaacaggtcaaagcagttggagagcgcccagatggattccaaccgcaagatgaatgcctccgaaagggagctcgccgcctgtcagctccttatctcccagcacgaagctaagataaagagtcttactgactatatgcagaacatggagcagaaaagaaggcaactggaggagtcccaagactccctgtcggaagaactagccaagctacgtgcccaagagaagatgcacgaggtgagcttccaagataaggagaaggaacacctgaccaggctgcaggacgccgaggaaatgaagaaggccctggaacaacaaatggaatctcacagggaggcccatcagaaacagctgtcacgcctaagggacgagatcgaggagaagcaaaaaataatcgacgaaatcagagacctcaaccaaaagttacagctggagcaggaaaagctttccagcgactacaataaactcaaaatcgaggatcaggaacgggagatgaaattggagaagctgcttctgctcaacgacaagcgcgagcaggcgcgcgaggatctgaaaggtttagaagagactgtttcaagggagttgcaaactctgcacaacctcaggaagctgttcgtgcaggacctcaccacccgggtaaaaaagtcagtcgaactggataacgatgacgggggaggatcagcagcgcaaaaacagaagatttcgttcttggagaacaacctggaacaactgactaaggtgcacaaacagcttgtcagagataacgccgatctaaggtgcgaactacccaaattggaaaaacggctacgggccaccgctgagagggtgaaagctctggaaagcgctctgaaagaggcaaaggagaatgccatgagggaccgcaagcggtaccagcaggaggtggatcgaattaaagaggctgtgagggcaaaaaacatggcaaggagggcccatagcgcccagatagcgaaaccaatccggcccggtcattatccagctagtagccctacggcggtgcatgctattagaggtggcggaggaagctcctcaaacagtacccattatcagaagtag

SEQ ID NO: 147070 - DNA, 2874 bp, Artificial Sequence
  derived and/or modified sequence
atggcagaccccgctgagtgcagtatcaaggtaatgtgtagatttcggcctctgaacgaagccgagattctgcgaggtgacaagttcattcctaagttcaaaggagatgaaacagtcgtgattgggcagggtaaaccctacgtgttcgacagggttctgccccctaataccacccaagagcaggtgtacaatgcctgcgctaaacagatcgtaaaggacgttctagaagggtacaacgggaccattttcgcctatggccaaacttccagtggcaagactcacacaatggagggtaaattgcacgacccccagctcatgggaatcatcccccgaatcgcccatgacatattcgaccacatttacagcatggatgaaaacctcgagttccacatcaaggtgtcttatttcgaaatttacctggacaagatacgagatcttctggatgtgtctaagacgaatctggcagttcatgaggataagaaccgagtgccctatgttaagggctgtactgaaagatttgtaagtagcccagaagaagtgatggacgttatcgacgaaggcaaagccaatcgccacgtggctgtgactaatatgaacgagcactcatcccggagccacagtatctttctgataaatattaagcaggagaatgtggagactgaaaaaaagcttagcggtaaactatatcttgttgatctggcagggtcagagaaagtctccaagaccggcgctgagggtgccgtgttggacgaagctaaaaatattaacaagtccctgagtgctctaggaaatgttattagtgcgctggctgaaggaaccaagactcatgttccttatcgggattctaagatgacccgcatcctgcaggactccttagggggaaattgccgaaccacaatagtgatttgttgttcgccttcggtatttaatgaagcagagacgaaatcgaccctgatgttcggtcagagggccaagaccataaaaaacactgttagcgtcaatctggaattgaccgccgaggagtggaaaaagaagtacgaaaaagaaaaggaaaagaataagactctgaaaaacgtgattcagcacctggagatggaactgaacaggtggcggaatggcgaggccgtgccggaggacgagcaaatatctgccaaagatcaaaagaaccttgagccttgcgataacacacccatcatcgataacattgcgccagtggtcgcgggaatctccaccgaagagaaagagaagtacgatgaggaaatttcctccctgtataggcagctcgatgacaaggacgacgagattaatcagcagtctcagctcgccgaaaagctgaaacagcagatgctggaccaggacgagctacttgcttccactcgccgtgactatgagaagatccaggaggaattgactcggttacagattgagaacgaagcggctaaagatgaggtgaaggaggtcctccaagcactggaagaactcgccgtaaattatgatcagaaaagccaggaagtcgaagataagaccagagcaaacgagcagcttacagacgagctagcccagaaaaccaccacactgaccaccacccagcgggagttgtcccaactgcaggagcttagtaaccatcaaaaaaagcgagctaccgaaatccttaatttacttctaaaggatctaggggaaataggagggataatcgggaccaacgatgtgaaaactcttgctgatgtgaacggggtgattgaagaagagttcaccatggcgaggctttatataagcaaaatgaagagcgaggtcaaaagtctggtgaataggtccaagcagctcgagtccgcacaaatggattcaaaccgtaagatgaacgccagcgaacgagaactggcagcgtgtcagcttttgatatcccagcatgaagctaagataaaatcgttaaccgactacatgcagaatatggagcagaaacgcaggcagcttgaggagtcccaggattctctgagcgaggaattggctaagctgcgcgcacaagaaaaaatgcatgaagtgagtttccaggacaaagagaaagaacacttaacacgcctccaggacgccgaggaaatgaaaaaagctctcgagcagcagatggagtcccatcgggaagcccaccagaagcagctctctaggcttagagacgaaattgaagagaagcagaagattattgacgaaatccgcgatctcaaccaaaaactccagctagaacaagagaaactgtcatctgattacaataagctgaagatcgaagatcaggaaagggagatgaaactcgaaaaattgctactgcttaacgacaagcgcgagcaggctagagaggacctgaagggactggaagaaacggtgagtcgggagttgcaaacgttgcataacctgcggaaactattcgttcaggatctgacgacgagggtgaagaagagtgtggagctggataatgacgatggtggcggtagcgccgctcagaaacagaagatcagttttctggagaataatcttgagcaactaacaaaggtgcataagcagctggttagagataacgccgatctgcggtgcgaactcccaaagctggaaaaaagacttagggccaccgccgagcgagtgaaagcgctggagtctgcactaaaagaggcaaaggagaacgcaatgcgggacaggaaacgataccaacaagaggtggacagaatcaaagaggccgttcgtgctaaaaacatggccagaagagcccattctgcacagattgccaagccaattcgccctggacactacccagcaagttctcccaccgctgtgcacgccattcgtggtggaggaggcagttcttcaaactcaacgcattaccaaaaatag

SEQ ID NO: 147071 - DNA, 2583 bp, Artificial Sequence
  derived and/or modified sequence
ggaaaactccacgaccctcaactgatgggcattatccctcgcatcgcccacgatatttttgatcatatctactctatggatgaaaacttagagtttcatataaaggtgtcctatttcgaaatttacttggataagatcagggacctgctggatgtgtccaaaacaaatctcgccgtacacgaggataagaaccgggtcccttacgttaaaggctgcaccgaacgctttgtctcatctcctgaagaggtcatggatgttatcgatgagggtaaagctaatagacatgtcgctgtaacgaacatgaatgaacacagctccaggagccactccatatttctgatcaatattaaacaggagaatgtggagaccgagaagaagctttcgggcaaactgtacctggtggatctggcaggctctgaaaaagtgagcaagaccggagccgagggagcagtccttgacgaagcaaagaacatcaacaagagcttgagcgccctcggaaatgtgatttccgccctggctgaagggaccaagactcatgtgccttatagggattctaagatgacacggattttgcaggatagcctcggcgggaactgtcggaccacgatagtgatttgctgttctcccagtgttttcaatgaggcggaaacaaaaagcacactgatgtttgggcaacgggccaagacaattaagaacaccgttagcgttaacttagaactgaccgcggaggagtggaagaaaaagtacgagaaggagaaggagaagaacaagacccttaagaacgtgatccaacatcttgagatggagctgaatcgctggagaaacggcgaagccgttcctgaagatgagcagatcagtgctaaagatcagaaaaacctggaaccttgtgacaatacaccaatcatcgacaatatcgcgcctgtggtggcaggaatcagcaccgaggaaaaagagaagtacgatgaagaaatatcttcactgtataggcagttagacgataaagatgatgagattaaccagcagagtcagcttgccgaaaagcttaagcagcagatgttagaccaagatgagttgctggcttctacacggagagactacgaaaagatacaagaagaattaacacggttgcagattgaaaatgaggcagccaaggacgaggtcaaagaggttctgcaggcgctggaggaactggccgtgaattatgatcaaaaatctcaggaggtagaagataagacaagggctaacgagcaactgaccgacgaactggcccagaagaccactactctgacaactacccagcgggaactgtcacaactccaggagctatcaaaccaccagaaaaagagggccaccgagattttaaatcttcttcttaaggatcttggcgaaattggagggattatcgggaccaacgacgttaaaacactggcagacgtcaatggtgtcatcgaggaagaattcaccatggctagactgtacatctcaaagatgaaaagtgaggtgaagtccctcgtgaatcggtcaaagcagttggagtctgctcagatggactccaaccgcaagatgaacgccagtgagagagaattggccgcttgtcagctgctgataagccagcatgaggccaaaatcaagagcttgacggactacatgcagaacatggagcagaagaggcgccaactggaagaatcgcaggatagcttgtcagaggagctggctaagttgcgcgcccaggaaaagatgcacgaggtctcctttcaggacaaggagaaggaacacctgacacgcctccaagacgcagaggagatgaagaaagctttggaacaacagatggagtcacatcgcgaggcgcatcagaaacagctgagcagactccgcgatgagatcgaagagaagcaaaaaattatagatgagatcagggacctcaatcagaaactccagttggagcaggagaaactttcgagcgattacaataaactgaagatcgaagatcaggagcgtgagatgaaactggagaaactactgttactcaatgacaagagagaacaggcccgggaagatttgaagggattggaggaaacagtttctcgcgagctacagacgctgcacaacctgaggaaattgttcgtccaagaccttactacccgagttaaaaagtctgtggagttggacaatgacgacgggggtggatccgctgcgcagaaacagaagatctctttcctggaaaataatttggagcagttgaccaaagtgcacaagcaactagttagagacaacgcagaccttaggtgtgaattgcccaaactggaaaaacgccttcgcgccacggctgagcgggtgaaggctctggaatctgcactcaaggaggccaaggaaaacgctatgcgggaccgaaagcgctaccagcaagaagtcgacaggattaaggaggcagtacgagccaaaaacatggctcgacgcgcacattctgcacagatcgctaagcccatcaggccgggccactaccccgcaagctctcctacagcagtgcacgcaattaggggagggggaggaagttcctccaacagcacccactatcaaaagtag

SEQ ID NO: 147072 - DNA, 2589 bp, Artificial Sequence
  derived and/or modified sequence
atgtggggaaaattgcacgatcctcaactcatgggtatcattcccaggatcgcacatgatatctttgatcacatttatagcatggatgagaatttagagtttcacattaaggtgagctactttgagatttacctcgacaaaataagggacctgctagatgtctccaagaccaacctggccgtgcatgaggacaaaaacagagttccttatgtcaagggctgcacagagagatttgtttcctcccccgaggaagtcatggacgttattgacgaaggaaaggctaacaggcacgtcgccgtgaccaacatgaacgagcacagctccaggagtcatagcatttttcttatcaacattaagcaggaaaacgtggagacggagaagaaactctccggcaaactgtatttagtggacctggctggttctgagaaagtgagcaaaaccggcgccgaaggagcagtgctagatgaagctaagaacatcaataagagcctctcagctttgggaaatgttatctctgcacttgccgaaggtaccaaaacccacgtaccatatagagatagcaagatgaccaggatcctgcaggacagcttaggcggtaattgtagaacgactatcgtgatctgttgttctccttctgtgttcaacgaggctgagacaaaatccaccttaatgtttgggcagagagccaagaccattaagaacactgtcagtgtgaacctagaactgaccgccgaggagtggaagaaaaagtacgaaaaagagaaagaaaagaataaaaccctcaaaaatgtgatacagcatctggaaatggaactgaaccgctggcgtaacggagaggccgtccctgaggatgagcagatttcagctaaggatcaaaagaatttggagccatgcgacaacacacccatcatcgacaacatcgccccggttgtggccgggataagcactgaagaaaaggaaaaatacgacgaggagatctcttcactctatcggcagctggacgataaggatgacgagatcaatcagcagagccagctggctgagaagttaaagcagcagatgctagatcaagatgaactgcttgctagcactcgccgcgactacgagaagatccaggaagagctgacaagactacagatcgagaacgaggctgccaaagacgaggtaaaagaagttttgcaggctttggaagaactggcggtgaattatgaccagaagagccaagaagtcgaggacaagaccagagccaacgagcagctgactgatgaactagcacaaaagacaacgaccctcactaccacccagagagagttgtcgcagctgcaggagctgagtaaccatcagaagaaacgggccactgagatcctgaatcttctgctcaaggaccttggtgagatcggaggcatcatcggcacgaatgacgtgaagacactggccgatgtgaatggtgtcattgaagaggagttcaccatggcccgcctctatattagcaagatgaagagcgaagtcaagtcactggtgaacaggtctaagcaactagaaagtgcccagatggatagcaatagaaaaatgaatgcttctgaaagagagctggcggcatgtcagttacttatcagccaacacgaagctaagataaagtctctcacagactatatgcagaatatggagcaaaaaaggagacagcttgaggagagtcaggattcactgtcggaagaactggcaaagctccgggcacaagagaaaatgcatgaagtgagtttccaggacaaggagaaagagcacttgactcgactgcaggacgccgaagaaatgaagaaggccttggaacaacaaatggaatcgcatcgcgaagctcaccagaagcagctctcccgactccgggatgagatcgaggaaaaacagaagattatagatgaaataagagatctaaaccagaagctgcaacttgagcaggaaaaactcagctcggattacaacaagctcaaaattgaggatcaggagcgcgagatgaaactagagaaactgcttctcctgaacgataagcgcgagcaagccagagaagatttgaaagggctcgaggagaccgttagcagggagcttcaaactctacataacctgcggaaactgttcgtgcaggacctgactacccgagtaaagaaatcagtggagctggataacgatgacggtgggggatccgcagcacagaaacagaagatttcattcttggagaacaatctggagcagctgaccaaggtgcacaaacagctggtccgagacaacgctgatcttcggtgtgaactgcccaaacttgagaaacgtctgcgggccactgcagagcgcgtgaaagcccttgagtcagcacttaaggaggctaaggagaatgcgatgagggatcgtaaacggtaccagcaggaagttgaccgcatcaaagaagccgtgcgcgcaaaaaacatggcaagaagggctcacagtgcccaaatcgctaaacccattcggcccggccactatccagcatcgagtccgacggccgtacatgcgattcgcggaggcggcggaagcagtagtaattccactcattatcagaaatag

SEQ ID NO: 147073 - DNA, 2874 bp, Artificial Sequence
  derived and/or modified sequence
atggccgaccctgccgaatgtagcattaaggttatgtgccggtttagaccactcaatgaggccgagattctacggggagacaagtttattcctaagtttaagggggacgagacagtggtgattggccagggaaagccctacgtatttgaccgggtgctgccacccaacacgacccaggagcaggtctacaacgcgtgcgccaaacagatcgtgaaggacgtgcttgagggatacaatggcacaatcttcgcttatggccagaccagttctggcaaaactcatactatggagggaaaactccatgaccctcagcttatgggtattatccctaggatagcccacgatatcttcgatcatatctactctatggatgaaaatctggaattccacattaaggtctcatactttgagatctacttggataaaattcgggacctgctggatgtgagtaaaacaaacttagcagtccacgaagataagaatagagtgccctacgtcaaggggtgtacggaacgatttgtgagttcacctgaggaagtgatggacgtaatcgacgaggggaaggcaaaccggcatgtcgctgtgacaaatatgaatgagcacagctcgaggagccactcaatctttttgattaatattaagcaggaaaatgtagagaccgaaaaaaaactgagtggcaaactctacctcgtggacttggccggaagtgaaaaagttagcaaaaccggggccgagggggccgtgttggacgaagcaaagaacatcaacaagagtctgtcagctctagggaacgtgatctctgctttggcagagggaaccaagacgcatgttccctatcgcgacagcaagatgacaaggatactgcaagactcactcggtgggaattgcagaacaaccattgtgatatgctgctcccccagtgtcttcaatgaagcagagactaaaagtactctgatgtttggacagcgggctaagactattaagaatacagtatcagtaaaccttgaactcactgcggaggagtggaagaagaagtatgaaaaagaaaaggagaagaacaaaacgttgaagaacgttatccagcatttagagatggagctgaatagatggcgcaacggcgaggcagttcccgaagatgagcaaattagcgctaaggatcaaaagaatctggagccttgcgataataccccaatcattgataacatcgcaccggtcgtcgccggcatttcaaccgaggagaaggagaagtacgatgaggaaattagctccctctaccggcagttagatgataaggacgatgagattaaccagcagagtcagttagcagagaagcttaagcagcagatgctggaccaggacgagctcctggcttctacccggagggactatgagaaaatccaggaggagctgactaggctccagattgaaaatgaagctgccaaggacgaggttaaagaggtactacaagctctcgaggagcttgcagtcaactacgatcaaaaaagtcaggaggtcgaagacaagacacgtgctaatgagcagctgactgatgagcttgcgcaaaagacaacgaccctgaccactactcagcgagaattgtcccagctgcaggaactaagtaatcaccagaagaagcgtgctactgagattctcaacctcctgctaaaggacctgggcgaaattggaggtattatcgggactaacgatgtgaaaactcttgctgatgttaacggcgtcatcgaggaggaattcactatggcaaggctctacatttctaaaatgaagtccgaagtcaaaagcctggtaaacagatctaaacaactggagtcagcccaaatggatagtaataggaagatgaatgcttctgagcgggagctagcagcatgtcaattattgatctcacagcacgaggcgaagattaaaagcctcactgactacatgcagaacatggagcaaaaacgaagacagctcgaggagagtcaggattccttgtccgaagaactcgctaaattacgagctcaagagaagatgcacgaggtatccttccaggataaagaaaaggagcatctaaccaggcttcaggatgctgaagaaatgaagaaggctctcgagcagcaaatggaatcgcacagggaggcccatcagaaacagctgtcccgactacgggatgaaatcgaggagaagcagaagatcatcgacgaaataagggacctaaaccagaaactacagctggagcaagagaagttgtcttcagattataacaagctcaaaatcgaagaccaagagcgggaaatgaagctcgaaaaactcctccttctcaatgataaaagagagcaggctcgcgaggatctgaaaggcctagaagagactgtgtcccgggagctccagaccttgcacaatctaaggaaactcttcgttcaggatcttacgacccgggtaaaaaagtccgtggaactcgacaatgacgacggcggcggctccgcagcccagaagcaaaagattagtttcctggagaataatcttgagcagctgaccaaggtacacaaacaactagtaagagacaacgccgacttgcggtgcgagttgcccaagttagaaaagcggctgcgagccacagccgaaagggtgaaagctctcgaatctgccctgaaagaggctaaggaaaacgctatgagagatcgcaagagatatcagcaggaagtggaccgaataaaagaggctgtgagggctaaaaatatggctcgacgggcccatagtgcacagatcgcaaaacccattcgaccaggccattatcccgcgtcctcccccactgccgtgcacgctatacgcgggggagggggctcttctagcaactccacgcactaccaaaagtag

SEQ ID NO: 147074 - DNA, 219 bp, Artificial Sequence
  derived and/or modified sequence
atggccgaccctgcagagtgtagcatcaaggtgatgtgccggtttaggccactaaatgaagcagagattcttcgtggcgataaattcatccccaagtttaagggagatgaaacagtagttatcggccagggtaagccctacgtgtttgaccgcgtgcttccgcccaacacgacacaagagcaggtttacaatgcttgtgccaaacagattgtgaaatag

SEQ ID NO: 147075 - DNA, 6272 bp, Artificial Sequence
  derived and/or modified sequence
gggaagctgcatgacccccagctcatggggatcatcccacgaattgcccatgatatctttgaccatatctactccatggatgagaacctggagtttcacataaaggtttcctattttgagatctacttggacaaaataagggacttacttgatgtatccaagaccaacttggctgttcatgaagataaaaacagagtcccgtatgtaaaggggtgcactgagcggtttgtgtcgagccctgaggaagtcatggatgtaatagatgaaggcaaagcaaaccgacacgtggctgtgacaaacatgaatgaacacagctctagaagtcacagtatcttcctgataaatattaaacaagagaatgtagagactgaaaaaaaactcagtgggaaactttatttggttgatttggctgggagcgaaaaggtcagcaaaactggtgccgagggagctgttcttgacgaagctaaaaatatcaataagtctttgtctgctcttggaaatgtgatctctgctttggcagaagggacaaaaacacatgtgccataccgggacagcaagatgactcggattcttcaggactctttgggtgggaactgcagaaccaccatcgtcatttgctgttctccttctgtcttcaatgaggctgagaccaagtccacactgatgttcggacagagagctaagaccatcaagaatacagtctctgtgaacctagaactgacagcagaagaatggaagaagaaatatgaaaaagagaaagagaaaaacaagactttgaagaatgttatccagcatctggagatggagctaaacaggtggaggaatggagaagctgtgcctgaggatgaacagatcagtgccaaggaccagaagaacctggagccttgtgataacacccccatcatagacaatattgctcctgttgttgctggcatctctacagaggagaaagagaagtacgatgaggagatctccagtctctacagacaactggatgacaaggatgatgaaattaaccagcagagccagctggctgaaaagctgaagcaacagatgttggatcaggatgagcttttagcttccacaagaagagactatgagaagatacaggaggagctgacacgtctccagattgaaaatgaggcagccaaggatgaggtgaaagaagttctccaggccctggaggagctggctgtcaattatgaccagaaatcacaggaagtggaggataagacccgggccaatgagcagctgacagacgagctggcccagaaaacgactacattgacaaccacacagagagagctgagccagctacaagagcttagcaaccaccagaagaaaagggcaactgagatcctgaatttgctgttgaaagatctgggggagataggtggaattattggcaccaatgatgtgaaaactttggcagatgtgaatggagtcattgaggaggagtttaccatggcccgcctgtacatcagcaagatgaagtcagaggtcaagtccctggtgaaccgcagcaaacagctcgagagcgcccagatggactccaacaggaagatgaatgccagcgagcgggagctggcagcctgccagctgctcatctcccagcacgaagccaagatcaagtctctgacagactacatgcagaacatggaacagaagaggaggcagctagaagagtcccaggactcgctcagcgaagagctggcaaagctccgagcccaggaaaaaatgcacgaagtcagcttccaggataaggagaaggaacatctgacgcggttgcaggatgctgaagaaatgaagaaggcgctggagcagcagatggagagccaccgggaagctcaccagaagcagctgtccagactccgagacgaaattgaggagaagcagaaaatcattgatgagattcgggatttgaatcagaaactgcaactggaacaggagaagcttagttctgattataacaagctgaaaatagaggaccaagagagagaaatgaagctggaaaagctcttattgctcaacgataaaagggaacaagccagagaagacctcaaagggctggaggagacagtgtctagagaattgcagacactgcacaaccttcggaaactctttgtccaggatctgaccacccgagttaaaaaaagtgtggagttggacaacgatgatggagggggcagtgctgcccagaagcagaaaatttccttcttggagaataacctggagcagctcaccaaagttcacaagcagctggtccgggacaacgcagacctgcgctgtgaactgcccaagctggagaagcggctgcgtgccacggcggagcgcgtcaaggctctggagagcgcgctgaaggaggccaaggagaacgccatgcgggaccgtaagcgctaccagcaggaggtggatcgtatcaaggaggccgtgcgggccaagaacatggccagaagggcccattcagcccagatcgccaagcccatccgccccggacactacccggcctcatctccaacggccgtccatgccattcgagggggaggaggcagctcttcaaattccactcactaccagaaataaatacaaaatatgactccacgtagcatgtcaaggactacattaatcaccaattcctttatttttccccccctacagtttccattttttttttatacttgcttactccagccatctgcagtacaccagtttcaggtcttttgagctgtgtagagtttctgtgtgtacagatgtgtgctcggacttttctctttttgagaaatctgaaggagatggttgcagaagatccacttactactgagaaccattaccaccgactcggcctccggggtgttgggtggtttctgggtggttcctggagcctcctctgggcagtgcactgtcccatctgtacgccctaatgtgccattccctagaggggaacaaccaagtgccgtggaggcagatgatcatggtctgcctcaactgtctggtttcctgtaaaataaacacattgttttatatttttagggaacaaaaagtgctgctatagggttcaaagttttccttctgaacacttttccgaaacaaattaccccaaagacacattttgaatatcctggtcacatctttggatctgtaaaatataccttttagtatggcacctgttaaaatgcaaagcaaatttctttggggcagaaaaacaatctgacagtagcagtgtagaatttgttcattcaaatacatctgtgtaaatgcaaaaagtcataaaattcacctccgagctgcttgcttttgaacctgcagcaactagtcttagccggcccggtttgaacatcgttctttcagaagtgctgaaaatgctgcaaagttggataagtggaaatgtggctgcccctctcctcactacttcctctctgatcgttctgaagcttgcattgggaatggctgctttctctaaccattttcagcttgagtgggtattgctgaagaaatccaacatcattccagcagttgaaaaaggaagccttcgggagaaagtgcttgtcaaaattttgttctttgtgcttgtgtatgagtaagttgccatgaataagttattattttaacccataattggcgactgtttatatgaattctttctttggcaccaaataggtttcatcttcttaggcacaattagaaaaaatccacatagatggatattttacatttagttattgctttatccaaatacatgaatctaaagctgaatcaacccttacttccagttgtgcttattaagaagatcaatttccaagtagtaaagttttcagggaaactgactgtgctgctatttgttttgacaaatttgggggtaagtcaatgacaaccaaaccaatctcggtggaaactcctatcctatcatgttgtgtgcccaagatgagtgagctggcactgtgccctgaagctttcaccactgtaatgaaatatatgccaggggagactttgggcttttctcatgactgtgtgggtcgaaggtagctcaagtgtgtgtgtgtgtgtgtgtgtgtgtgtgtgtgtgtgtgtgtgtgtatgtgtgtaaagtgctaagaactgtgcattgacatccaaacatttcttgtacaaaatttccctagcaaagcaaacctgctttgacttaatttatttgttaaatgttgcactttgtttatgtatgttttgtttttggtggggaataaggagagagaggacgacaaattctattgaagtatttattttgtgaagatggcaattttgcatttgtttaaatttttttcattctttaattttgttatcagtgccagcccaatatacctgctctaccattatttgcggtctgataaaagggtccttgtggggcaggttttgcaaagcttatcaggtaataacatatgccacataaccttgttgatatgtttgcttctgatttgggaagctaaacattggtgtttgagaggattgccaattattaattgtcattaccactactctccattactttttgtttggaaattgaacaaaggtcagtaatggtttttggctcttgttaatatccatcataaaatagattgttttagattctttccagggtgatttttccctgggtaccccgtttctacttctaaagaattgcttggcactttcatgtttcaaagggaaacattcgcttgtagttccattttacttgatctctacaagggactgacaacatttgctttacttttattcacagagaaagttggctttgatgtctcttaaagataattctgctagttgctgatcagccagtcagttcacctagcttcaatctttataggacttctaatctaattttcctatagtgtgactaaaagggaggcaaattattggaacggattattcaaatggatccttaaatattgctatgtataataagccagttattatatcaggaccatgttctctgtaggccactttctaaaaaagccacatatgtgcaattttcaggtttttagactattgctccctgtactttaaatgtaaaaaccacacttctgaacaactaagctcatgaatatgattttggttatatgcagcttttgactagcatgtattgtgtctttttctcctctatgaataattttatatttcatgctacttcttgaaagtttactctttgatgctctaagagaacagccagatggtttatatgaataatctttatctgcaggatggtggattggtaaattaggagaatgttgtttgagatatcaagatttatgtctgggaactaaaatatataatgccaaatgtgtttttgtcaattactagagaattctgtgcaaacatatcatctcttcaaatgctgcacactttgcttttgttaaacagcaggtagtagacagaacaataacagtttcgcgttaagacttttaaaggaaatagaatcgtgattaagaaatcagaatttatagatatattgggataaatgaagaaataaaaatgtttgtctagaatgtagcatctagtgactttttaaagccctaacgtttacataaagaagctctagttcttatagaaataacaaagcaaataaaagttcttaacaatcccctctttcgaagtgcatttttttaaagcagggcaggagacatttggactctagctatatgacatactgggaaaggcagagggtggagggaagatttcacttcattgtctagcccagaatcttgagcaagctaaagaaaccatcataatctaaaattgcttcatttaacactaacaatttagactttttaaaccaagcattgaataatggctggataactgccgaagtaagcgccgctccatgaagtctgcttacttatttaaaaattgtgtatcagttttaaatactgttcattgtgtgcagatataaggggaatagggcattctgtagaattatacatgtctagtttgtaaagtgtgtcctgtgtactgcagatgtgtgttctctgggctttatgtatctgtacagtagctttcacattaaaaaaattgtggacaaacttgtccggggggtttgaggggagaatggtggtttatatcaataacgatgctgtactatagtccatgtaacaaaagatctggaagtcaccctcctctggcccacggaaaattttggtaatcttctaggttctaaaatgaagatgtatgggtactctggcagactgcatgttgtataatttgaaaaatactaaaagtggaaaataaaattgaattaaactttg

SEQ ID NO: 147076 - DNA, 6278 bp, Artificial Sequence
  derived and/or modified sequence
atgtgggggaagctgcatgacccccagctcatggggatcatcccacgaattgcccatgatatctttgaccatatctactccatggatgagaacctggagtttcacataaaggtttcctattttgagatctacttggacaaaataagggacttacttgatgtatccaagaccaacttggctgttcatgaagataaaaacagagtcccgtatgtaaaggggtgcactgagcggtttgtgtcgagccctgaggaagtcatggatgtaatagatgaaggcaaagcaaaccgacacgtggctgtgacaaacatgaatgaacacagctctagaagtcacagtatcttcctgataaatattaaacaagagaatgtagagactgaaaaaaaactcagtgggaaactttatttggttgatttggctgggagcgaaaaggtcagcaaaactggtgccgagggagctgttcttgacgaagctaaaaatatcaataagtctttgtctgctcttggaaatgtgatctctgctttggcagaagggacaaaaacacatgtgccataccgggacagcaagatgactcggattcttcaggactctttgggtgggaactgcagaaccaccatcgtcatttgctgttctccttctgtcttcaatgaggctgagaccaagtccacactgatgttcggacagagagctaagaccatcaagaatacagtctctgtgaacctagaactgacagcagaagaatggaagaagaaatatgaaaaagagaaagagaaaaacaagactttgaagaatgttatccagcatctggagatggagctaaacaggtggaggaatggagaagctgtgcctgaggatgaacagatcagtgccaaggaccagaagaacctggagccttgtgataacacccccatcatagacaatattgctcctgttgttgctggcatctctacagaggagaaagagaagtacgatgaggagatctccagtctctacagacaactggatgacaaggatgatgaaattaaccagcagagccagctggctgaaaagctgaagcaacagatgttggatcaggatgagcttttagcttccacaagaagagactatgagaagatacaggaggagctgacacgtctccagattgaaaatgaggcagccaaggatgaggtgaaagaagttctccaggccctggaggagctggctgtcaattatgaccagaaatcacaggaagtggaggataagacccgggccaatgagcagctgacagacgagctggcccagaaaacgactacattgacaaccacacagagagagctgagccagctacaagagcttagcaaccaccagaagaaaagggcaactgagatcctgaatttgctgttgaaagatctgggggagataggtggaattattggcaccaatgatgtgaaaactttggcagatgtgaatggagtcattgaggaggagtttaccatggcccgcctgtacatcagcaagatgaagtcagaggtcaagtccctggtgaaccgcagcaaacagctcgagagcgcccagatggactccaacaggaagatgaatgccagcgagcgggagctggcagcctgccagctgctcatctcccagcacgaagccaagatcaagtctctgacagactacatgcagaacatggaacagaagaggaggcagctagaagagtcccaggactcgctcagcgaagagctggcaaagctccgagcccaggaaaaaatgcacgaagtcagcttccaggataaggagaaggaacatctgacgcggttgcaggatgctgaagaaatgaagaaggcgctggagcagcagatggagagccaccgggaagctcaccagaagcagctgtccagactccgagacgaaattgaggagaagcagaaaatcattgatgagattcgggatttgaatcagaaactgcaactggaacaggagaagcttagttctgattataacaagctgaaaatagaggaccaagagagagaaatgaagctggaaaagctcttattgctcaacgataaaagggaacaagccagagaagacctcaaagggctggaggagacagtgtctagagaattgcagacactgcacaaccttcggaaactctttgtccaggatctgaccacccgagttaaaaaaagtgtggagttggacaacgatgatggagggggcagtgctgcccagaagcagaaaatttccttcttggagaataacctggagcagctcaccaaagttcacaagcagctggtccgggacaacgcagacctgcgctgtgaactgcccaagctggagaagcggctgcgtgccacggcggagcgcgtcaaggctctggagagcgcgctgaaggaggccaaggagaacgccatgcgggaccgtaagcgctaccagcaggaggtggatcgtatcaaggaggccgtgcgggccaagaacatggccagaagggcccattcagcccagatcgccaagcccatccgccccggacactacccggcctcatctccaacggccgtccatgccattcgagggggaggaggcagctcttcaaattccactcactaccagaaataaatacaaaatatgactccacgtagcatgtcaaggactacattaatcaccaattcctttatttttccccccctacagtttccattttttttttatacttgcttactccagccatctgcagtacaccagtttcaggtcttttgagctgtgtagagtttctgtgtgtacagatgtgtgctcggacttttctctttttgagaaatctgaaggagatggttgcagaagatccacttactactgagaaccattaccaccgactcggcctccggggtgttgggtggtttctgggtggttcctggagcctcctctgggcagtgcactgtcccatctgtacgccctaatgtgccattccctagaggggaacaaccaagtgccgtggaggcagatgatcatggtctgcctcaactgtctggtttcctgtaaaataaacacattgttttatatttttagggaacaaaaagtgctgctatagggttcaaagttttccttctgaacacttttccgaaacaaattaccccaaagacacattttgaatatcctggtcacatctttggatctgtaaaatataccttttagtatggcacctgttaaaatgcaaagcaaatttctttggggcagaaaaacaatctgacagtagcagtgtagaatttgttcattcaaatacatctgtgtaaatgcaaaaagtcataaaattcacctccgagctgcttgcttttgaacctgcagcaactagtcttagccggcccggtttgaacatcgttctttcagaagtgctgaaaatgctgcaaagttggataagtggaaatgtggctgcccctctcctcactacttcctctctgatcgttctgaagcttgcattgggaatggctgctttctctaaccattttcagcttgagtgggtattgctgaagaaatccaacatcattccagcagttgaaaaaggaagccttcgggagaaagtgcttgtcaaaattttgttctttgtgcttgtgtatgagtaagttgccatgaataagttattattttaacccataattggcgactgtttatatgaattctttctttggcaccaaataggtttcatcttcttaggcacaattagaaaaaatccacatagatggatattttacatttagttattgctttatccaaatacatgaatctaaagctgaatcaacccttacttccagttgtgcttattaagaagatcaatttccaagtagtaaagttttcagggaaactgactgtgctgctatttgttttgacaaatttgggggtaagtcaatgacaaccaaaccaatctcggtggaaactcctatcctatcatgttgtgtgcccaagatgagtgagctggcactgtgccctgaagctttcaccactgtaatgaaatatatgccaggggagactttgggcttttctcatgactgtgtgggtcgaaggtagctcaagtgtgtgtgtgtgtgtgtgtgtgtgtgtgtgtgtgtgtgtgtgtgtatgtgtgtaaagtgctaagaactgtgcattgacatccaaacatttcttgtacaaaatttccctagcaaagcaaacctgctttgacttaatttatttgttaaatgttgcactttgtttatgtatgttttgtttttggtggggaataaggagagagaggacgacaaattctattgaagtatttattttgtgaagatggcaattttgcatttgtttaaatttttttcattctttaattttgttatcagtgccagcccaatatacctgctctaccattatttgcggtctgataaaagggtccttgtggggcaggttttgcaaagcttatcaggtaataacatatgccacataaccttgttgatatgtttgcttctgatttgggaagctaaacattggtgtttgagaggattgccaattattaattgtcattaccactactctccattactttttgtttggaaattgaacaaaggtcagtaatggtttttggctcttgttaatatccatcataaaatagattgttttagattctttccagggtgatttttccctgggtaccccgtttctacttctaaagaattgcttggcactttcatgtttcaaagggaaacattcgcttgtagttccattttacttgatctctacaagggactgacaacatttgctttacttttattcacagagaaagttggctttgatgtctcttaaagataattctgctagttgctgatcagccagtcagttcacctagcttcaatctttataggacttctaatctaattttcctatagtgtgactaaaagggaggcaaattattggaacggattattcaaatggatccttaaatattgctatgtataataagccagttattatatcaggaccatgttctctgtaggccactttctaaaaaagccacatatgtgcaattttcaggtttttagactattgctccctgtactttaaatgtaaaaaccacacttctgaacaactaagctcatgaatatgattttggttatatgcagcttttgactagcatgtattgtgtctttttctcctctatgaataattttatatttcatgctacttcttgaaagtttactctttgatgctctaagagaacagccagatggtttatatgaataatctttatctgcaggatggtggattggtaaattaggagaatgttgtttgagatatcaagatttatgtctgggaactaaaatatataatgccaaatgtgtttttgtcaattactagagaattctgtgcaaacatatcatctcttcaaatgctgcacactttgcttttgttaaacagcaggtagtagacagaacaataacagtttcgcgttaagacttttaaaggaaatagaatcgtgattaagaaatcagaatttatagatatattgggataaatgaagaaataaaaatgtttgtctagaatgtagcatctagtgactttttaaagccctaacgtttacataaagaagctctagttcttatagaaataacaaagcaaataaaagttcttaacaatcccctctttcgaagtgcatttttttaaagcagggcaggagacatttggactctagctatatgacatactgggaaaggcagagggtggagggaagatttcacttcattgtctagcccagaatcttgagcaagctaaagaaaccatcataatctaaaattgcttcatttaacactaacaatttagactttttaaaccaagcattgaataatggctggataactgccgaagtaagcgccgctccatgaagtctgcttacttatttaaaaattgtgtatcagttttaaatactgttcattgtgtgcagatataaggggaatagggcattctgtagaattatacatgtctagtttgtaaagtgtgtcctgtgtactgcagatgtgtgttctctgggctttatgtatctgtacagtagctttcacattaaaaaaattgtggacaaacttgtccggggggtttgaggggagaatggtggtttatatcaataacgatgctgtactatagtccatgtaacaaaagatctggaagtcaccctcctctggcccacggaaaattttggtaatcttctaggttctaaaatgaagatgtatgggtactctggcagactgcatgttgtataatttgaaaaatactaaaagtggaaaataaaattgaattaaactttg

SEQ ID NO: 147077 - DNA, 585 bp, Artificial Sequence
  derived and/or modified sequence
gatggctgagcgcgcaggagcccgggaggtctgagccgggcgaggctcgctccctgcgcatcgcctcctccgcccgccgcgtggtcgcgggcaggtgggccggggggcgctgggcaggggcggggcagggccagggcaggccggtctgcagccggaggggccggagcggagaagctgcccaccttcccgggctcggagcggccggggctgctcagccggccgggctcgcgatgacctgctgagaagcgtcgtcggaggctgcaggaggcggcctagctgtgggcggtgcagctcgcggcctcctccctcgtcgttcccggccccggccccccacccatccccgtgccccctccctaccgccggccgagatggcggatccagccgaatgcagcatcaaagtgatgtgccggttccggcccctcaacgaagcggagatcctccgcggggacaaattcatccccaaatttaaaggcgatgagaccgtggtgatcgggcaagggaagccatatgtcttcgacagagtgctacctcccaacacgacccaagagcaggtttacaatgcatgtgcgaagcaaattgtcaaag

SEQ ID NO: 147078 - DNA, 2583 bp, Artificial Sequence
  derived and/or modified sequence
gggaagctgcatgacccccagctgatgggcatcatccccagaattgcccatgacatctttgaccacatctacagcatggatgagaacctggagttccacatcaaggtgtcctactttgagatctacctggacaagatccgggacctgctggatgtgtccaagaccaacctggccgtgcatgaggacaagaacagagtgccctacgtgaagggctgcacagaaagatttgtgagcagccctgaggaggtgatggatgtgattgatgagggcaaggccaacagacatgtggccgtgaccaacatgaatgagcacagcagccgcagccacagcatcttcctgatcaacatcaagcaggagaatgtggagacagagaagaagctgagcggcaagctgtacctggtggacctggccggcagcgagaaggtgtccaagacaggagctgagggcgctgtgctggatgaggccaagaacatcaacaagagcctgagcgccctgggcaatgtcatcagcgccctggccgagggcaccaagacccacgtgccctacagagacagcaagatgacccgcatcctgcaggacagcctgggcggcaactgcaggaccaccatcgtcatctgctgcagccccagcgtcttcaatgaagctgagaccaagagcaccctgatgtttggccagagggccaagaccatcaagaacacagtgtctgtgaacctggagctgacagctgaggagtggaagaagaagtatgagaaggagaaggagaagaacaagaccctgaagaatgtcatccagcacctggagatggagctgaaccgctggagaaatggagaggccgtgcctgaagatgagcagatcagcgccaaggaccagaagaacctggagccctgtgacaacacccccatcatcgacaacatcgcccctgtggtggccggcatcagcacagaggagaaggagaagtatgatgaggagatcagcagcctgtaccggcagctggatgacaaggatgatgagatcaaccagcagagccagctggccgagaagctgaagcagcagatgctggaccaggatgagctgctggccagcacccggcgggactatgagaagatccaggaggagctgacccggctgcagattgaaaatgaggccgccaaggatgaggtgaaggaggtgctgcaggccctggaggagctggccgtgaactatgaccagaagagccaggaggtggaggacaagacccgggccaatgagcagctgacagatgagctggcccagaagaccaccaccctgaccaccacccagcgggagctgagccagctgcaggagctgagcaaccaccagaagaagagggccacagagatcctgaacctgctgctgaaggacctgggggagatcggcggcatcatcggcaccaatgatgtgaagaccctggctgatgtgaatggagtgattgaggaggagttcaccatggcccggctgtacatcagcaagatgaagtctgaggtgaagagcctggtgaacagaagcaagcagctggagagcgcccagatggacagcaacaggaagatgaatgccagcgagcgggagctggccgcctgccagctgctgatcagccagcacgaggccaagatcaagagcctgacagactacatgcagaacatggagcagaagaggcggcagctggaggagagccaggacagcctgtctgaggagctggccaagctgcgggcccaggagaagatgcatgaggtgtccttccaggacaaggagaaggagcacctgacccggctgcaggatgctgaggagatgaagaaggccctggagcagcagatggagagccaccgggaggcccaccagaagcagctgagccggctgagagatgaaattgaggagaagcagaagatcattgatgagatccgggacctgaaccagaagctgcagctggagcaggagaagctgagcagtgactacaacaagctgaagattgaggaccaggagcgggagatgaagctggagaagctgctgctgctgaatgacaagcgggagcaggcccgggaggacctgaagggcctggaggagaccgtgtcccgggagctgcagaccctgcacaacctgaggaagctgtttgtgcaggacctgaccaccagggtgaagaagtctgtggagctggacaatgatgatggcggcggcagcgctgcccagaagcagaagatctccttcctggagaacaacctggagcagctgaccaaggtgcacaagcagctggtgcgggacaatgctgacctgcgctgtgagctgcccaagctggagaagaggctgcgggccacagctgagcgggtgaaggccctggagagcgccctgaaggaggccaaggaaaatgccatgagggacaggaagcgctaccagcaggaggtggaccgcatcaaggaggccgtgcgggccaagaacatggcccggcgggcccacagcgcccagatcgccaagcccatccggcccggccactacccagccagcagccccacagctgtgcacgccatccggggcggcggcggcagcagcagcaacagcacccactaccagaagtag

SEQ ID NO: 147079 - DNA, 2589 bp, Artificial Sequence
  derived and/or modified sequence
atgtggggcaagctgcatgacccccagctgatgggcatcatccccagaattgcccatgacatctttgaccacatctacagcatggatgagaacctggagttccacatcaaggtgtcctactttgagatctacctggacaagatccgggacctgctggatgtgtccaagaccaacctggccgtgcatgaggacaagaacagagtgccctacgtgaagggctgcacagaaagatttgtgagcagccctgaggaggtgatggatgtgattgatgagggcaaggccaacagacatgtggccgtgaccaacatgaatgagcacagcagccgcagccacagcatcttcctgatcaacatcaagcaggagaatgtggagacagagaagaagctgagcggcaagctgtacctggtggacctggccggcagcgagaaggtgtccaagacaggagctgagggcgctgtgctggatgaggccaagaacatcaacaagagcctgagcgccctgggcaatgtcatcagcgccctggccgagggcaccaagacccacgtgccctacagagacagcaagatgacccgcatcctgcaggacagcctgggcggcaactgcaggaccaccatcgtcatctgctgcagccccagcgtcttcaatgaagctgagaccaagagcaccctgatgtttggccagagggccaagaccatcaagaacacagtgtctgtgaacctggagctgacagctgaggagtggaagaagaagtatgagaaggagaaggagaagaacaagaccctgaagaatgtcatccagcacctggagatggagctgaaccgctggagaaatggagaggccgtgcctgaagatgagcagatcagcgccaaggaccagaagaacctggagccctgtgacaacacccccatcatcgacaacatcgcccctgtggtggccggcatcagcacagaggagaaggagaagtatgatgaggagatcagcagcctgtaccggcagctggatgacaaggatgatgagatcaaccagcagagccagctggccgagaagctgaagcagcagatgctggaccaggatgagctgctggccagcacccggcgggactatgagaagatccaggaggagctgacccggctgcagattgaaaatgaggccgccaaggatgaggtgaaggaggtgctgcaggccctggaggagctggccgtgaactatgaccagaagagccaggaggtggaggacaagacccgggccaatgagcagctgacagatgagctggcccagaagaccaccaccctgaccaccacccagcgggagctgagccagctgcaggagctgagcaaccaccagaagaagagggccacagagatcctgaacctgctgctgaaggacctgggggagatcggcggcatcatcggcaccaatgatgtgaagaccctggctgatgtgaatggagtgattgaggaggagttcaccatggcccggctgtacatcagcaagatgaagtctgaggtgaagagcctggtgaacagaagcaagcagctggagagcgcccagatggacagcaacaggaagatgaatgccagcgagcgggagctggccgcctgccagctgctgatcagccagcacgaggccaagatcaagagcctgacagactacatgcagaacatggagcagaagaggcggcagctggaggagagccaggacagcctgtctgaggagctggccaagctgcgggcccaggagaagatgcatgaggtgtccttccaggacaaggagaaggagcacctgacccggctgcaggatgctgaggagatgaagaaggccctggagcagcagatggagagccaccgggaggcccaccagaagcagctgagccggctgagagatgaaattgaggagaagcagaagatcattgatgagatccgggacctgaaccagaagctgcagctggagcaggagaagctgagcagtgactacaacaagctgaagattgaggaccaggagcgggagatgaagctggagaagctgctgctgctgaatgacaagcgggagcaggcccgggaggacctgaagggcctggaggagaccgtgtcccgggagctgcagaccctgcacaacctgaggaagctgtttgtgcaggacctgaccaccagggtgaagaagtctgtggagctggacaatgatgatggcggcggcagcgctgcccagaagcagaagatctccttcctggagaacaacctggagcagctgaccaaggtgcacaagcagctggtgcgggacaatgctgacctgcgctgtgagctgcccaagctggagaagaggctgcgggccacagctgagcgggtgaaggccctggagagcgccctgaaggaggccaaggaaaatgccatgagggacaggaagcgctaccagcaggaggtggaccgcatcaaggaggccgtgcgggccaagaacatggcccggcgggcccacagcgcccagatcgccaagcccatccggcccggccactacccagccagcagccccacagctgtgcacgccatccggggcggcggcggcagcagcagcaacagcacccactaccagaagtag

SEQ ID NO: 147080 - DNA, 219 bp, Artificial Sequence
  derived and/or modified sequence
atggctgaccctgctgagtgcagcatcaaggtgatgtgccgcttccggcccctgaatgaagctgagatcctgcggggggacaagttcatccccaagttcaagggagatgagaccgtggtgattggccagggcaagccctacgtgtttgacagagtgctgccccccaacaccacccaggagcaggtgtacaatgcctgtgccaagcagatcgtgaagtag

SEQ ID NO: 147081 - DNA, 2583 bp, Artificial Sequence
  derived and/or modified sequence
ggcaagctgcacgacccccagctgatgggcatcatcccccggatcgcgcatgatatattcgatcacatttactcgatggacgagaatttagaatttcatattaaggtgtcctacttcgaaatttacttggacaagatacgagaccttcttgatgtgtccaaaaccaatctcgcagttcatgaagacaagaatcgcgttccttacgttaagggatgtacagagagatttgttagctcacccgaggaggtgatggacgtgattgacgaagggaaagcaaacaggcacgtggcggtcacaaatatgaacgagcacagcagcagatctcattcaatcttcttgatcaatataaaacaagaaaacgttgaaaccgagaaaaagcttagcggcaagctctacctggtagatctagccggctcggagaaagtaagtaagacaggtgccgagggagccgtgctggatgaagctaagaatatcaacaaaagtctgagtgctctcgggaacgtgatctccgccctagcagaaggcacaaagactcacgtcccttatcgcgatagtaaaatgaccagaatcctacaggactccctcggaggaaactgtcgcaccacgatcgtgatctgctgctctcctagcgttttcaatgaagccgaaacgaagtccactcttatgtttggtcagcgggcaaagactatcaagaatactgtgagcgtgaatctagagctgactgccgaggagtggaagaagaagtatgaaaaggaaaaggagaagaacaaaaccttgaaaaatgtgattcaacacctggagatggagctcaaccggtggcgcaatggagaggcagtccctgaggacgaacagatttctgctaaagatcagaagaatcttgaaccctgtgacaacactcctattatcgacaacattgccccagtggtggccggaatcagcacagaggaaaaagaaaagtatgatgaagagatctcttctctgtacagacagctagacgacaaggacgacgaaattaaccaacagtcgcagcttgcggagaagttaaagcaacagatgctggatcaggatgagctcctggcttcaaccagacgcgattacgaaaagatccaggaagagctgacaaggttgcagatagagaatgaggcagctaaagatgaagttaaagaggtgctgcaagcgctggaggaattagcagtcaactatgaccagaagtctcaggaggtggaggacaagacaagggcgaatgaacaactgaccgacgagctggcacagaagacgaccacgctgacaaccacccaacgcgagcttagtcagcttcaggaactcagcaaccatcagaagaaaagagctaccgaaattcttaacctcctgctgaaagatctgggagagatcggtggcatcatagggaccaacgacgtgaaaactttggcagacgttaacggcgttatagaggaagaattcacaatggccaggctgtacatatctaagatgaaaagcgaagttaagtctttggtcaataggagcaaacagctggagtccgcccagatggactcgaatcgaaagatgaacgccagtgaacgtgagttagcagcgtgtcaactcctaattagccagcacgaagcaaagattaagtccctgactgactacatgcagaatatggagcagaagcggaggcagctggaggagtcccaggattctctgagtgaggaactggccaagcttcgtgcccaggaaaaaatgcatgaggtttccttccaggataaagagaaggagcatctgactaggctgcaggatgccgaggagatgaaaaaggccctggagcaacagatggaaagccacagagaagctcatcagaagcaattgtctagactgagagatgaaattgaagagaaacagaagatcatcgatgagattcgagacttgaaccagaagctacaactggaacaggagaagttatctagtgactacaacaaactaaaaatagaggatcaggagcgcgagatgaagctggagaaattgctgttacttaatgacaagagagagcaggccagggaggatctgaaaggactggaggagacggtctccagagaactccagactctgcacaacctgcgtaaactatttgtccaagacttgacaacgagggtgaagaaaagtgtggagcttgataatgatgacgggggcggaagtgcagcgcaaaagcaaaagatttcctttctagaaaataacctcgaacagctgaccaaagtccacaagcagctggtgcgggacaatgccgatctgaggtgtgagctgcctaagttggagaagcgactccgggccactgctgaacgggtgaaagccctagagagtgctctgaaggaggccaaggaaaacgcaatgagagatcgaaaaagatatcagcaggaggttgaccggattaaagaggccgtgcgcgccaagaatatggcaaggagagctcactcagcccagatcgcaaagccaatcaggccaggacattatccagcctctagtcccaccgccgtgcacgctattcggggtgggggaggatcgtcctccaatagcacacattatcagaaatag

SEQ ID NO: 147082 - DNA, 2589 bp, Artificial Sequence
  derived and/or modified sequence
atgtggggcaagctgcacgacccccagctgatgggcatcatccccagaatcgcacacgacatatttgaccacatttattctatggatgagaatttggagtttcacattaaggtttcttacttcgaaatataccttgataagataagggatctgctcgatgtcagcaagactaacttggcagtccacgaggacaaaaatagagtcccttacgtcaagggctgtactgagcggtttgtgagcagtccagaagaggttatggatgttatagatgaaggaaaagctaaccgacacgtcgccgttacaaacatgaatgaacactcctctcgtagccacagcattttcctcattaatatcaagcaggagaacgtggaaaccgaaaagaaactcagcggaaaactatatcttgtggatttggctggaagtgaaaaagtctcaaagacaggggccgaaggcgctgtcctggacgaagcgaagaatatcaacaagagcctgtcggctctcggcaatgtaattagcgctttggccgaggggacaaagactcacgtcccttacagagattcaaaaatgactcgcattcttcaagactcccttgggggcaattgccggacgacaatcgtcatctgctgtagtccaagcgtgtttaatgaagctgagacaaaatcaacactcatgtttggtcagcgggccaaaaccatcaaaaatacagtgtctgttaacctcgagttgacagctgaagaatggaaaaagaaatacgaaaaggagaaggagaagaacaaaacattgaagaacgttattcagcacctggaaatggaactgaaccggtggcgtaatggtgaggccgttcccgaggacgaacaaatttcagctaaggaccagaagaacctggagccatgcgacaacactccaattattgacaacatcgccccagtcgtggcgggcatcagtaccgaagaaaaggaaaagtatgatgaggaaattagctcgttgtacaggcaactggatgataaggacgacgaaatcaaccaacaatcgcagctcgccgaaaagctcaagcagcaaatgcttgatcaagatgaactcctggccagtacaaggagggattatgagaagatccaggaagagttgactagactccagatcgagaacgaggcagcaaaggacgaggttaaagaggttctgcaggccctggaagagttagccgttaactacgaccagaagagccaggaagtggaggacaagacccgggcaaacgaacaacttacagatgagctcgcccagaagacgaccacactgacaaccacacagagggaactcagccaactccaagaactctccaaccaccagaaaaaacgtgccactgagatcttaaacctccttctgaaagacctcggagaaatcggggggattattgggaccaatgacgtgaaaacgctcgccgatgtcaatggtgtgattgaagaggaattcacaatggcccgcctctatatcagcaagatgaagtctgaggttaagtccctggtcaatcgcagtaaacagttggaaagcgcgcagatggactcaaatcggaagatgaatgccagtgaaagggaactcgctgcatgtcagctgctgatctcccagcacgaagcaaagattaagagtctgacggattacatgcaaaacatggagcagaagagaagacaacttgaggagagtcaagactcactgagcgaggagctcgcaaagttgagagcccaagaaaaaatgcatgaggtatctttccaagacaaagagaaagaacacctgactcgtctgcaggatgcagaagaaatgaaaaaggcgctggagcagcagatggaaagccaccgagaggctcaccaaaagcagctctccaggcttagggacgagattgaggagaagcagaaaatcatagacgagattagggatctcaatcagaagctgcagttagagcaggagaagctctctagtgactacaacaagctcaagatagaagatcaggagagagagatgaagctcgagaagctactccttctgaacgataaaagggagcaggcaagagaagatctgaaggggcttgaggaaaccgtgtccagggaactccagactctgcacaatctgagaaagctattcgttcaagacctgaccacccgcgtaaaaaaaagcgtcgagctggataatgacgacggcggaggcagtgctgcacagaagcagaagatctctttcttagaaaacaatctcgaacagctgactaaagtgcacaagcaactggtgagggacaatgcagacctgcgctgcgagctgcccaaattggagaagagactgagagccaccgctgagagagttaaagcacttgagtctgcactcaaggaggctaaagaaaacgccatgagggaccgcaagcggtaccaacaggaggtggatcggatcaaggaagccgtgcgggcaaaaaatatggcccgccgtgcacacagcgcacagatcgctaagccaatccgtcccggtcactaccctgcgagttctcccaccgcagtacacgctatcaggggcgggggggggagctccagcaatagcacccactaccaaaaatag

SEQ ID NO: 147083 - DNA, 2874 bp, Artificial Sequence
  derived and/or modified sequence
atggccgaccccgccgagtgcagcatcaaggtgatgtgccggttcagaccactaaacgaggcagaaattcttaggggggacaagtttatcccgaagttcaagggagatgagacagtggtgattggtcaggggaaaccttatgtgtttgaccgggtgcttcctccgaataccacgcaggagcaggtgtacaacgcctgcgctaagcagattgtcaaagacgtacttgagggttataacgggaccattttcgcctacgggcagaccagctctggcaagactcacaccatggagggcaagttacacgacccgcagctgatgggcatcataccccgtatcgcccacgatatctttgaccatatttattctatggacgaaaacttggagttccacataaaggtatcctactttgagatatacctcgacaagatcagagatctgttggacgtcagcaagacaaacctggccgtgcacgaagacaaaaatagagtgccatacgtaaagggctgtaccgaaagatttgtaagttcacccgaagaggttatggacgtgattgatgagggtaaggcgaacagacacgtcgccgtgactaatatgaacgaacacagcagccgctcacactctatatttctgataaacattaaacaggaaaacgtagaaacagaaaaaaaactcagtggcaagctctacttggtggaccttgcgggctccgaaaaagtctcaaagaccggtgccgaaggggctgtcctcgacgaggcaaagaatatcaataagagccttagcgctcttggtaatgtgattagtgctttggcggaaggaactaaaacacatgttccctatcgcgattccaagatgacccgcatattgcaggatagcctcggggggaactgcagaacgacaatcgttatatgttgctcacctagtgtgtttaacgaggcagaaaccaaaagcacgctaatgttcgggcagcgcgctaagacaatcaaaaacaccgtctcagttaacctggaactcacagctgaagagtggaaaaagaagtacgagaaggagaaggagaagaacaagactctgaagaacgtgatccagcacctggagatggagctgaacagatggcgcaacggtgaggccgtacctgaagacgagcaaatttccgctaaagatcaaaagaacttggaaccatgtgataacacaccaatcattgacaacatagcaccagtcgtagcaggaatttccacagaagaaaaggaaaagtatgatgaggaaatttcctcactttacagacagttagatgataaagatgacgagattaatcaacagtcccagttggccgagaagctcaagcagcagatgttagaccaggacgagctgttagcttcaactcggagggactatgagaaaatccaggaggagctcacacgtttgcagatagagaacgaagccgccaaggacgaagtcaaagaggttctacaggccctggaagaactcgctgtgaattatgaccagaaaagccaagaagtggaagacaaaacccgagcaaatgaacagctcacagacgagttggctcagaaaaccaccaccttaaccactacccagagagaattaagccagctgcaggagctcagtaatcaccagaaaaaacgggccaccgagatactgaacctgctcctgaaagatttaggggagattggcggaatcatcggcactaacgacgtaaaaacacttgctgacgtaaatggagtaatcgaagaggaatttaccatggcccggctctacatctctaagatgaagtctgaagtgaaaagcctggtcaatagatccaagcaactcgagagcgcccaaatggattctaaccgcaagatgaacgccagcgagcgcgaactggcagcgtgccagctgctgatctcacaacatgaagcaaagatcaagagcctcaccgattacatgcaaaatatggaacagaaacgtagacaactcgaggagtcacaagacagtctatctgaagagctagccaagctccgggcccaagagaaaatgcacgaggtgagtttccaggataaggaaaaagagcatctaacaaggctccaggatgctgaggaaatgaaaaaggcactagaacagcagatggagtcacatagagaagcacatcaaaagcagcttagccggctgagggatgaaatagaggaaaagcaaaagattatcgatgaaatccgggacttaaaccaaaagcttcagttagagcaggaaaagctaagcagcgactataataagctgaagattgaggaccaggagagagagatgaaacttgagaagctgcttttgttgaacgacaaaagggagcaggcacgggaggatttgaaggggctggaagagaccgtgtctcgggaactgcagactttacacaatctacggaagctgtttgtgcaagatttaacaacaagagtcaaaaaatcagtcgagctggataacgacgatggaggcggctccgctgcccaaaagcagaagatctccttcctggagaacaatctagagcaactgaccaaagtacataagcagctagtacgcgataacgcagatctccgctgtgaacttcccaagttggaaaaaagactacgcgctacagcagagcgggtgaaagccctggagtctgccttgaaggaagctaaagagaacgctatgcgggaccggaaaagatatcaacaggaagtcgacagaatcaaagaagccgtccgcgcaaaaaacatggcccgccgcgcccactcggcacagatagcaaagccgatcaggcccggccactatccagcttcctccccaacggctgtacatgcaatccgcggcggcggtggctcaagttctaatagtacccattaccaaaaatag

SEQ ID NO: 147084 - DNA, 219 bp, Artificial Sequence
  derived and/or modified sequence
atggccgaccccgccgagtgcagcatcaaggtgatgtgccggttcagacctttgaatgaggccgaaatcctacgcggcgacaaattcatccccaagttcaaaggcgatgagacagttgtgattggccagggcaagccctacgtctttgaccgcgtcttaccacccaacacaacccaggagcaggtgtataatgcctgcgccaaacagatagtcaaatag

SEQ ID NO: 147085 - DNA, 2583 bp, Artificial Sequence
  derived and/or modified sequence
ggcaaattgcatgatccacagctgatgggcattatccccagaattgcacatgacatcttcgaccacatctattcaatggatgaaaatttagaattccatatcaaggtctcatacttcgaaatttatctcgataaaattcgagatttgttggacgtgtccaaaacaaatctcgcagttcacgaagacaagaacagggtaccatatgttaaaggctgtactgagcgctttgtcagttcccccgaagaggtgatggacgttattgacgaaggtaaagccaaccgacacgttgccgtcacaaacatgaatgagcacagcagtaggtcacatagcatattcttgattaatattaaacaggagaatgtggagactgagaagaagctgtcagggaaactgtacctggtggaccttgccggttcagaaaaggtcagtaagacgggtgcggagggtgccgtgctggacgaagccaaaaacatcaataaaagtctgtcagccctgggcaacgtcataagcgcgcttgctgaaggtactaagacccatgttccatatcgcgactcgaaaatgaccagaatactccaggacagtttaggcggaaactgccggaccactatagttatctgctgctcaccaagcgtattcaacgaagctgaaactaaatcaaccctcatgtttgggcagagagctaaaaccatcaagaatactgtgtcagtgaatctggaactaacggctgaggaatggaaaaaaaagtatgagaaggaaaaggagaagaacaagacgctgaaaaatgtaattcagcacttggaaatggagcttaatcgctggaggaatggcgaggctgttcccgaggacgaacaaataagcgctaaggaccagaaaaacttagagccttgtgacaacactcccattatcgacaacatcgccccagtggttgccggaatctccacagaggagaaggagaaatacgacgaagagatctcaagcctgtacagacagctggacgataaagacgacgaaattaaccaacagagccagctggctgagaagctgaagcagcagatgctagatcaggatgagctgctagccagcacccggcgagactacgagaagatacaggaggaactaacccgcctccaaattgagaacgaggccgcaaaagatgaagttaaggaagttctacaggctctcgaagagctggccgtgaattatgaccagaagagccaggaagtcgaggataagacccgggctaatgaacagcttaccgacgagctcgctcaaaagaccaccaccctgacaaccacacagagggagctgtcccagctccaagagctcagtaatcaccaaaaaaagcgtgctacagaaattctgaatctgctacttaaggatctcggtgagatcgggggtatcattggaacaaatgatgtgaaaacactggcagacgttaacggcgtgattgaagaggaatttaccatggcacggctctatatctcaaagatgaaaagtgaagttaagagtctggtcaataggtctaagcagctagagagcgctcagatggattcaaaccgaaaaatgaatgcatccgagagagaactggctgcttgccagttactcatttcacagcatgaggccaaaataaagagcctgaccgactatatgcagaatatggagcagaagagacgccagctcgaagaatctcaagacagtctgagcgaagagctggctaagctgagggcacaggaaaaaatgcacgaagttagcttccaggacaaggagaaagaacacctgacgagactgcaggacgccgaggagatgaagaaggcgttggagcagcagatggaatcacatcgcgaagcacatcaaaagcagttgtcccgcttgcgcgacgaaatcgaggagaaacagaaaatcattgacgaaattcgtgacctgaatcagaagctgcagcttgaacaggagaaactgagtagtgactacaacaagttgaagatcgaggaccaggagcgcgaaatgaagctggaaaagctcttgctcctcaacgataaaagagaacaagctcgcgaggacctcaaggggctggaggagaccgtgagcagggaattgcagaccttgcacaacctgcgcaagctctttgtccaagatctaactacacgggtgaaaaaaagcgtggagctggataatgacgacggtggtggttctgcagctcagaagcagaagatatccttccttgagaataatctcgaacagttaaccaaagtgcacaagcagcttgtaagggataacgctgatttgcgttgtgaactgcccaagctagaaaagcgactgcgagccaccgccgagcgggtcaaagccctagagtctgcactgaaggaggcaaaggaaaatgcaatgcgggaccgaaagcgatatcagcaggaagttgataggataaaagaggcagtgagagctaaaaacatggctcggagggctcatagtgcccagattgccaagcccatccggcctggacattacccagcctcatcgcctaccgcagtacacgccattaggggaggaggcggttcaagctctaactcaactcattatcagaaatag

SEQ ID NO: 147086 - DNA, 2589 bp, Artificial Sequence
  derived and/or modified sequence
atgtgggggaaactgcacgacccccaactgatgggaattatccccagaatagcacacgatatattcgaccatatctacagcatggacgagaaccttgagtttcacatcaaggtgagctactttgaaatctatctggataagatcagagatctcctcgacgtctctaaaaccaatctcgccgtgcacgaggataagaaccgagtgccctatgtgaaaggatgcactgagaggtttgtgtcttcgcctgaagaagtcatggatgtgatcgatgagggaaaagccaatcggcacgtcgccgttacaaacatgaatgaacattcttccaggtctcattcaattttccttatcaacataaagcaggagaacgtagagacagaaaagaagctaagcggaaaactctatctcgtggatctcgctggaagcgagaaagtttctaaaacaggcgctgagggtgccgtgttggacgaggcaaagaacatcaacaaatcactgtctgcactgggaaacgtgatcagcgccctggcagaaggaactaaaacacatgttccctatcgggacagcaaaatgacacggatcctccaagatagccttggtggtaactgtagaacaaccatcgtgatttgctgctcacctagtgtcttcaacgaagccgagaccaagagcacgcttatgttcggacaacgtgcaaaaaccattaaaaatacagtctcagtcaatttagagctgaccgcagaagaatggaagaagaagtacgaaaaagagaaagagaagaacaagacactgaagaatgttattcagcacctcgagatggagctcaatcggtggcgaaacggcgaggctgtgcccgaagacgagcagatttccgcgaaagatcagaaaaaccttgagccatgcgataacacccctatcattgataatatcgccccagtggtggctggaatcagtactgaggagaaagagaagtacgatgaggagataagtagcctgtatcgccagctagatgacaaggatgacgagataaatcaacaaagccagcttgccgagaagctgaagcagcagatgttggaccaagacgagctgctggctagtacgcgcagagactatgagaaaattcaggaggaactcacgaggcttcagattgaaaatgaggctgccaaagatgaggtcaaggaggtgctccaagcactagaggagctggcagtgaactatgaccagaagagccaggaagtcgaggataagactagggccaacgagcaattaaccgacgagttggcgcagaagacaactactctgactacgacccaaagagagttgagccaacttcaagagttaagcaaccaccagaagaaaagggctactgagatactaaacctgctcctgaaggatctgggggagatcggcggtattataggaaccaacgacgtaaaaactctggctgacgtgaatggtgtcatcgaagaggaatttacaatggctcgcctgtacatcagtaaaatgaaatctgaggtaaagtcgctagtaaacaggtcaaaacagttggaaagtgcccaaatggattctaaccggaagatgaatgcctccgaacgagagctggcagcttgtcagctgttaattagccaacacgaggctaaaatcaagtccctgacggattatatgcagaatatggaacagaagcggaggcaattggaggaaagtcaggatagcttgtctgaagaacttgctaagctgagggcccaggaaaagatgcatgaagtttcatttcaagataaggaaaaagagcatttgaccaggctgcaggatgcagaggaaatgaagaaggcccttgaacagcagatggagtctcacagggaggcgcaccagaagcagctctccagactaagagacgagattgaagaaaagcagaagataatagatgagattagggacctgaatcagaaactgcagcttgagcaagaaaaactgtcatcagattataacaagctgaagatcgaggaccaggaaagggagatgaagttagagaaactcctgctcctgaatgataagcgggagcaagctagggaagacctgaaaggacttgaggaaacagtcagccgagagctgcaaaccctccataacttacggaagttgtttgtacaggacctgaccactcgggtgaagaagtcagtggagctggacaacgacgatggagggggttcagcagcccagaagcagaaaatttcattcctagagaataacctcgaacaactgaccaaagtccacaaacaactcgtgagggacaacgctgatcttcgatgtgaactcccaaagctcgaaaaacgccttcgtgccacagcagagagggtcaaagctctcgaatcagcgctgaaagaagccaaggagaacgccatgcgcgatcggaaaagataccagcaagaggtggatcgtatcaaggaggccgtgcgcgcaaaaaacatggcacgccgtgctcactcagcacagatcgccaaaccaatcagaccagggcactatccagccagcagtcctactgcggttcatgccattcgaggaggcggaggaagtagctcaaacagcacgcactatcagaaatag

SEQ ID NO: 147087 - DNA, 2874 bp, Artificial Sequence
  derived and/or modified sequence
atggccgatcccgctgagtgcagcattaaggttatgtgtcgatttaggcccctgaatgaggccgaaatactgcgtggcgataagtttatccctaaattcaagggcgacgaaacagtggtgataggccaaggcaagccttatgtgttcgaccgtgtcctgccgcctaacactacccaggaacaagtgtataatgcctgcgccaaacagattgtgaaggacgtgttggagggctataatggaactatctttgcctatggacagacctcgtctgggaaaactcacactatggagggaaagctacacgatccccagctcatggggattatcccaagaatcgctcatgacatatttgaccacatttacagtatggacgaaaacctcgagttccatatcaaagtctcctacttcgaaatatacctggacaagattcgagatctgctagacgtgtccaaaactaacctcgctgtacatgaagacaaaaaccgtgtgccctatgtgaagggatgtaccgagcgttttgtgagcagcccagaagaggttatggacgttatcgacgaggggaaagccaataggcacgtagccgttaccaacatgaacgagcacagcagtcgcagccatagcatcttcctcattaacatcaagcaggaaaacgtcgaaaccgaaaaaaagctaagcgggaaactgtatctagttgacctggccggatccgagaaggtgagcaagactggagccgaaggagcagtactggatgaggccaagaacatcaacaaatccctttcagccctcggtaacgtgattagcgcactcgctgaaggaacgaaaacccatgttccttacagggattctaaaatgactcgaatcctgcaagactctctgggcggaaattgtcgcacgacaattgtgatttgctgtagccccagtgttttcaatgaggccgagactaagagcacgctcatgttcgggcagagagccaaaactataaaaaatactgtgtctgtaaacctggaactcacggcagaggagtggaaaaaaaaatatgaaaaagaaaaagagaaaaataaaacactgaaaaacgtgatccagcacctcgaaatggaactgaataggtggagaaacggcgaagccgtccccgaggatgagcagatcagtgccaaagatcagaagaatttagaaccctgtgataacacacccataatcgataatatcgccccagtggttgccggaatctccacagaggaaaaagaaaagtatgacgaagagatttcctccctgtaccggcagctagacgacaaggacgacgagatcaatcagcaatctcagctggctgagaaactgaagcagcagatgctggatcaggacgagttgctcgcttctaccaggcgggattacgaaaaaatccaggaagagctcactcggctgcagatcgagaacgaagctgcaaaggacgaggttaaggaggtactgcaggccctggaggaacttgctgtcaattacgatcagaagtcccaggaagtggaagacaaaactcgagctaacgagcaactcaccgacgaactggcccagaagaccaccactctcaccacgacacagcgcgaattgtcacagctccaggagctcagcaatcaccaaaagaagcgtgcaactgagatcttgaaccttcttctgaaagatctgggggagataggaggaattataggaacgaatgatgtgaagacactcgcggacgtaaacggagtgatcgaggaagaattcacgatggcaagactgtatatctccaagatgaagagcgaagtgaagtcgctggtgaaccggtcgaagcaactggaaagcgcccagatggattcaaatcggaaaatgaatgcctcagagcgtgagttagccgcatgtcagttgctcatcagtcagcacgaagccaaaattaagagcctgacagactacatgcagaacatggaacagaagcggcgtcagctcgaagagtcccaagatagcctctctgaagagttggccaagctccgcgcacaggagaagatgcatgaagtgagttttcaggataaggaaaaggagcacttaacacgccttcaggacgccgaggagatgaagaaggcccttgagcagcagatggagtcacaccgtgaggctcaccagaagcagctatcgcgactacgggatgaaatagaggagaagcagaagatcatcgacgaaatacgggatctgaaccagaagctgcagctcgagcaggaaaagctgagcagcgactataataaactgaaaatcgaggaccaggagagagagatgaaactagagaaactgctcctgctgaacgacaagcgggagcaggctagagaggatctgaaggggcttgaggagactgtttctagggagctccagacccttcataacctcagaaagctcttcgtccaagacctgactactcgcgtgaagaagtcagtcgagctggacaatgacgacggtggaggctctgccgctcagaagcagaaaatttcttttcttgaaaacaacttggagcagttgaccaaggtacataaacagctggtgcgcgataatgcagatctcagatgtgagctgccaaaactcgaaaagcgtctgcgcgcaaccgccgagcgcgttaaagccctggaatctgctctgaaggaggccaaagaaaacgcaatgagagataggaagcgctaccagcaggaagtggatagaattaaggaagcggtccgtgcaaaaaatatggctaggcgggcacacagcgcccaaattgcaaagccaatcaggcctggacattaccccgcttccagccccaccgctgtacacgcgattcgaggaggcggagggagctctagcaactccacccactatcagaagtag

SEQ ID NO: 147088 - DNA, 219 bp, Artificial Sequence
  derived and/or modified sequence
atggccgatcccgcagagtgtagcattaaagtgatgtgtcggttccgcccactgaatgaggctgaaatactccgtggtgataaattcattccaaaatttaagggcgatgaaactgtggtaataggacagggaaaaccatatgttttcgacagggtgctcccccctaatacaacccaagaacaggtctataatgcatgtgctaaacagattgtgaagtag

SEQ ID NO: 147089 - DNA, 2583 bp, Artificial Sequence
  derived and/or modified sequence
ggcaagctgcacgacccccagctgatgggcatcatccccagaatcgcccacgacatcttcgaccacatctacagcatggacgagaacctggagttccacatcaaggtgagctacttcgagatctacctggacaagatcagagacctgctggacgtgagcaagaccaacctggccgtgcacgaggacaagaacagagtgccctacgtgaagggctgcaccgagagattcgtgagcagccccgaggaggtgatggacgtgatcgacgagggcaaggccaacagacacgtggccgtgaccaacatgaacgagcacagcagcagaagccacagcatcttcctgatcaacatcaagcaggagaacgtggagaccgagaagaagctgagcggcaagctgtacctggtggacctggccggcagcgagaaggtgagcaagaccggcgccgagggcgccgtgctggacgaggccaagaacatcaacaagagcctgagcgccctgggcaacgtgatcagcgccctggccgagggcaccaagacccacgtgccctacagagacagcaagatgaccagaatcctgcaggacagcctgggcggcaactgcagaaccaccatcgtgatctgctgcagccccagcgtgttcaacgaggccgagaccaagagcaccctgatgttcggccagagagccaagaccatcaagaacaccgtgagcgtgaacctggagctgaccgccgaggagtggaagaagaagtacgagaaggagaaggagaagaacaagaccctgaagaacgtgatccagcacctggagatggagctgaacagatggagaaacggcgaggccgtgcccgaggacgagcagatcagcgccaaggaccagaagaacctggagccctgcgacaacacccccatcatcgacaacatcgcccccgtggtggccggcatcagcaccgaggagaaggagaagtacgacgaggagatcagcagcctgtacagacagctggacgacaaggacgacgagatcaaccagcagagccagctggccgagaagctgaagcagcagatgctggaccaggacgagctgctggccagcaccagaagagactacgagaagatccaggaggagctgaccagactgcagatcgagaacgaggccgccaaggacgaggtgaaggaggtgctgcaggccctggaggagctggccgtgaactacgaccagaagagccaggaggtggaggacaagaccagagccaacgagcagctgaccgacgagctggcccagaagaccaccaccctgaccaccacccagagagagctgagccagctgcaggagctgagcaaccaccagaagaagagagccaccgagatcctgaacctgctgctgaaggacctgggcgagatcggcggcatcatcggcaccaacgacgtgaagaccctggccgacgtgaacggcgtgatcgaggaggagttcaccatggccagactgtacatcagcaagatgaagagcgaggtgaagagcctggtgaacagaagcaagcagctggagagcgcccagatggacagcaacagaaagatgaacgccagcgagagagagctggccgcctgccagctgctgatcagccagcacgaggccaagatcaagagcctgaccgactacatgcagaacatggagcagaagagaagacagctggaggagagccaggacagcctgagcgaggagctggccaagctgagagcccaggagaagatgcacgaggtgagcttccaggacaaggagaaggagcacctgaccagactgcaggacgccgaggagatgaagaaggccctggagcagcagatggagagccacagagaggcccaccagaagcagctgagcagactgagagacgagatcgaggagaagcagaagatcatcgacgagatcagagacctgaaccagaagctgcagctggagcaggagaagctgagcagcgactacaacaagctgaagatcgaggaccaggagagagagatgaagctggagaagctgctgctgctgaacgacaagagagagcaggccagagaggacctgaagggcctggaggagaccgtgagcagagagctgcagaccctgcacaacctgagaaagctgttcgtgcaggacctgaccaccagagtgaagaagagcgtggagctggacaacgacgacggcggcggcagcgccgcccagaagcagaagatcagcttcctggagaacaacctggagcagctgaccaaggtgcacaagcagctggtgagagacaacgccgacctgagatgcgagctgcccaagctggagaagagactgagagccaccgccgagagagtgaaggccctggagagcgccctgaaggaggccaaggagaacgccatgagagacagaaagagataccagcaggaggtggacagaatcaaggaggccgtgagagccaagaacatggccagaagagcccacagcgcccagatcgccaagcccatcagacccggccactaccccgccagcagccccaccgccgtgcacgccatcagaggcggcggcggcagcagcagcaacagcacccactaccagaagtag

SEQ ID NO: 147090 - DNA, 2589 bp, Artificial Sequence
  derived and/or modified sequence
atgtggggcaagctgcacgacccccagctgatgggcatcatccccagaatcgcccacgacatcttcgaccacatctacagcatggacgagaacctggagttccacatcaaggtgagctacttcgagatctacctggacaagatcagagacctgctggacgtgagcaagaccaacctggccgtgcacgaggacaagaacagagtgccctacgtgaagggctgcaccgagagattcgtgagcagccccgaggaggtgatggacgtgatcgacgagggcaaggccaacagacacgtggccgtgaccaacatgaacgagcacagcagcagaagccacagcatcttcctgatcaacatcaagcaggagaacgtggagaccgagaagaagctgagcggcaagctgtacctggtggacctggccggcagcgagaaggtgagcaagaccggcgccgagggcgccgtgctggacgaggccaagaacatcaacaagagcctgagcgccctgggcaacgtgatcagcgccctggccgagggcaccaagacccacgtgccctacagagacagcaagatgaccagaatcctgcaggacagcctgggcggcaactgcagaaccaccatcgtgatctgctgcagccccagcgtgttcaacgaggccgagaccaagagcaccctgatgttcggccagagagccaagaccatcaagaacaccgtgagcgtgaacctggagctgaccgccgaggagtggaagaagaagtacgagaaggagaaggagaagaacaagaccctgaagaacgtgatccagcacctggagatggagctgaacagatggagaaacggcgaggccgtgcccgaggacgagcagatcagcgccaaggaccagaagaacctggagccctgcgacaacacccccatcatcgacaacatcgcccccgtggtggccggcatcagcaccgaggagaaggagaagtacgacgaggagatcagcagcctgtacagacagctggacgacaaggacgacgagatcaaccagcagagccagctggccgagaagctgaagcagcagatgctggaccaggacgagctgctggccagcaccagaagagactacgagaagatccaggaggagctgaccagactgcagatcgagaacgaggccgccaaggacgaggtgaaggaggtgctgcaggccctggaggagctggccgtgaactacgaccagaagagccaggaggtggaggacaagaccagagccaacgagcagctgaccgacgagctggcccagaagaccaccaccctgaccaccacccagagagagctgagccagctgcaggagctgagcaaccaccagaagaagagagccaccgagatcctgaacctgctgctgaaggacctgggcgagatcggcggcatcatcggcaccaacgacgtgaagaccctggccgacgtgaacggcgtgatcgaggaggagttcaccatggccagactgtacatcagcaagatgaagagcgaggtgaagagcctggtgaacagaagcaagcagctggagagcgcccagatggacagcaacagaaagatgaacgccagcgagagagagctggccgcctgccagctgctgatcagccagcacgaggccaagatcaagagcctgaccgactacatgcagaacatggagcagaagagaagacagctggaggagagccaggacagcctgagcgaggagctggccaagctgagagcccaggagaagatgcacgaggtgagcttccaggacaaggagaaggagcacctgaccagactgcaggacgccgaggagatgaagaaggccctggagcagcagatggagagccacagagaggcccaccagaagcagctgagcagactgagagacgagatcgaggagaagcagaagatcatcgacgagatcagagacctgaaccagaagctgcagctggagcaggagaagctgagcagcgactacaacaagctgaagatcgaggaccaggagagagagatgaagctggagaagctgctgctgctgaacgacaagagagagcaggccagagaggacctgaagggcctggaggagaccgtgagcagagagctgcagaccctgcacaacctgagaaagctgttcgtgcaggacctgaccaccagagtgaagaagagcgtggagctggacaacgacgacggcggcggcagcgccgcccagaagcagaagatcagcttcctggagaacaacctggagcagctgaccaaggtgcacaagcagctggtgagagacaacgccgacctgagatgcgagctgcccaagctggagaagagactgagagccaccgccgagagagtgaaggccctggagagcgccctgaaggaggccaaggagaacgccatgagagacagaaagagataccagcaggaggtggacagaatcaaggaggccgtgagagccaagaacatggccagaagagcccacagcgcccagatcgccaagcccatcagacccggccactaccccgccagcagccccaccgccgtgcacgccatcagaggcggcggcggcagcagcagcaacagcacccactaccagaagtag

SEQ ID NO: 147091 - DNA, 219 bp, Artificial Sequence
  derived and/or modified sequence
atggccgaccccgccgagtgcagcatcaaggtgatgtgcagattcagacccctgaacgaggccgagatcctgagaggcgacaagttcatccccaagttcaagggcgacgagaccgtggtgatcggccagggcaagccctacgtgttcgacagagtgctgccccccaacaccacccaggagcaggtgtacaacgcctgcgccaagcagatcgtgaagtag

SEQ ID NO: 147092 - protein, 1056 aa, Artificial Sequence
  derived and/or modified sequence
MASQPNSSAKKKEEKGKNIQVVVRCRPFNLAERKASAHSIVECDPVRKEVSVRTGGLADKSSRKTYTFDMVFGASTKQIDVYRSVVCPILDEVIMGYNCTIFAYGQTGTGKTFTMEGERSPNEEYTWEEDPLAGIIPRTLHQIFEKLTDNGTEFSVKVSLLEIYNEELFDLLNPSSDVSERLQMFDDPRNKRGVIIKGLEEITVHNKDEVYQILEKGAAKRTTAATLMNAYSSRSHSVFSVTIHMKETTIDGEELVKIGKLNLVDLAGSENIGRSGAVDKRAREAGNINQSLLTLGRVITALVERTPHVPYRESKLTRILQDSLGGRTRTSIIATISPASLNLEETLSTLEYAHRAKNILNKPEVNQKLTKKALIKEYTEEIERLKRDLAAAREKNGVYISEENFRVMSGKLTVQEEQIVELIEKIGAVEEELNRVTELFMDNKNELDQCKSDLQNKTQELETTQKHLQETKLQLVKEEYITSALESTEEKLHDAASKLLNTVEETTKDVSGLHSKLDRKKAVDQHNAEAQDIFGKNLNSLFNNMEELIKDGSSKQKAMLEVHKTLFGNLLSSSVSALDTITTVALGSLTSIPENVSTHVSQIFNMILKEQSLAAESKTVLQELINVLKTDLLSSLEMILSPTVVSILKINSQLKHIFKTSLTVADKIEDQKKELDGFLSILCNNLHELQENTICSLVESQKQCGNLTEDLKTIKQTHSQELCKLMNLWTERFCALEEKCENIQKPLSSVQENIQQKSKDIVNKMTFHSQKFCADSDGFSQELRNFNQEGTKLVEESVKHSDKLNGNLEKISQETEQRCESLNTRTVYFSEQWVSSLNEREQELHNLLEVVSQCCEASSSDITEKSDGRKAAHEKQHNIFLDQMTIDEDKLIAQNLELNETIKIGLTKLNCFLEQDLKLDIPTGTTPQRKSYLYPSTLVRTEPREHLLDQLKRKQPELLMMLNCSENNKEETIPDVDVEEAVLGQYTEEPLSQEPSVDAGVDCSSIGGVPFFQHKKSHGKDKENRGINTLERSKVEETTEHLVTKSRLPLRAQINL

SEQ ID NO: 147093 - DNA, 3171 bp, Artificial Sequence
  derived and/or modified sequence
atggcctcacagcctaatagcagcgctaagaaaaaggaggaaaagggaaaaaacatccaggtggtcgtcagatgtagaccttttaacctggccgaaaggaaagcaagcgcccatagtatcgtagaatgcgatcccgtgcgtaaagaggtgagtgtgagaaccggaggcctcgctgataaaagttcacgaaagacctatacatttgacatggttttcggcgcatctactaaacaaatcgacgtgtacagatcagtggtgtgtcccatactggatgaggtgatcatggggtacaattgcaccatctttgcatatggtcaaaccgggactgggaagacctttaccatggagggtgagagatcacctaacgaggagtatacttgggaggaggatcccttggctggaatcatacccaggactctccaccagattttcgagaaattaaccgacaatggtacagaattctcagttaaggtgagcttgctggagatatacaacgaagagctcttcgacctgctcaatccttccagtgatgtctcagagcggctgcagatgttcgatgatcctaggaacaagaggggcgtgatcatcaagggcctggaggaaatcactgtgcacaacaaggacgaagtataccagattctggaaaaaggggcagctaagcgtactaccgcagccactctaatgaacgcatacagctcacgtagccatagcgtgtttagcgtcaccatacacatgaaggaaacaaccatcgatggcgaagagttggtgaagatcggtaagctgaacctggtcgatctggccggatcagagaacattggcagaagcggagctgtcgacaagcgggcccgagaggctggaaatattaatcaatcgctgctgacactaggtagggtaattactgcactggtagagcggacgccacacgttccctaccgggaatctaagcttacgaggattttgcaggacagcctgggaggacggactcgcactagtattatcgcgacaatatctcccgcttccctgaacctggaagagactctatccactcttgaatatgcccatcgcgccaaaaatatcctgaacaagccagaggtcaaccagaagcttaccaagaaggccttaatcaaggagtataccgaggaaatcgagaggctcaaaagggacctggctgcagcgcgcgagaagaacggcgtgtacatttctgaagagaactttcgtgtgatgagcggaaagctgacagtgcaggaagagcagatcgtcgaacttattgagaagatcggagccgtggaggaagagctcaaccgcgtgacagaactgtttatggacaataagaatgagcttgatcagtgcaaatctgatctgcaaaacaaaacacaggaactcgagacaactcaaaaacacttacaggagaccaagctgcagttagtgaaggaggagtatatcacgtctgctctcgagtcaaccgaagagaaactccatgacgcagcgtcaaagctgctaaatacagtcgaagagaccaccaaggacgtgtccggtctacatagtaagctggaccgcaagaaggctgtggaccagcacaacgccgaagcacaggacatctttggcaaaaacctcaattctctgttcaacaatatggaggagttaattaaagatggaagtagcaaacagaaagcgatgttggaggtgcataagacactgttcggaaatctgctgtcaagcagcgtgtccgcattggataccataactactgtcgcactggggtccctgacttcaatcccggagaatgtgagtactcacgtctctcaaatcttcaatatgattttgaaagagcagagcttggcagctgagtctaaaacagtcctgcaggagctaattaatgtgctcaagaccgacctgctgtcttcactcgaaatgatactctcacccacagtggtgtccatcctcaaaattaactctcaactgaagcacatttttaaaacatcgctaacagtggcagacaaaatcgaggatcagaaaaaggaactggatggcttcctgagtatcctgtgtaataatctgcacgaactgcaagagaacactatatgtagtcttgtagaatcccagaagcagtgtggaaatctgacagaggatctcaagactataaagcagacccatagccaggaactctgcaaactcatgaatctctggacagaaaggttctgcgcactggaagaaaagtgcgagaacatacagaagcctctgtcctccgtgcaggagaacatacagcagaagtcaaaggacattgtgaacaagatgacatttcatagtcagaaattttgcgctgattctgacgggttctcacaggaactgagaaattttaatcaggaggggacaaagctggtcgaagaaagtgtgaagcactcggacaagctgaacggtaacctggagaaaatctctcaggagaccgaacagcgttgcgagtcacttaatactagaacagtctactttagcgaacaatgggttagttcacttaacgagagggaacaggagctgcacaatctgctggaggtagtgagtcagtgctgcgaagcgtcctctagcgatattactgaaaagagcgacggtcgcaaagccgctcacgaaaaacagcacaatatctttttggaccagatgaccattgatgaggataagctgatcgcccagaatctcgagctcaacgaaactattaaaatcggcctgactaagttgaattgctttttggaacaggatctgaaactagatatccctacagggaccacccctcagagaaaatcatatctgtatccaagcaccctcgtgagaacggagcccagagagcatttactagaccaactgaagaggaagcagccagagctgttaatgatgctcaactgtagcgagaataacaaggaggaaacaatccccgatgtagacgtcgaggaggccgtgctgggccaatataccgaagaacctctctcacaggaaccttctgtggacgcgggagtagactgctcatctatcgggggcgtgcccttttttcagcacaagaaaagccacgggaaggacaaggagaatagaggtataaatacactggagcgctcaaaagttgaggaaaccacggagcacttggtaaccaaatcccgcctgcccctcagagcacagattaacctgtag

SEQ ID NO: 147094 - DNA, 4858 bp, Artificial Sequence
  derived and/or modified sequence
agactccggcccctgtcggccgccaagcccctccgcccctcacagcgcccaggtccgcggccgggccttgattttttggcggggaccgtcatggcgtcgcagccaaattcgtctgcgaagaagaaagaggagaaggggaagaacatccaggtggtggtgagatgcagaccatttaatttggcagagcggaaagctagcgcccattcaatagtagaatgtgatcctgtacgaaaagaagttagtgtacgaactggaggattggctgacaagagctcaaggaaaacatacacttttgatatggtgtttggagcatctactaaacagattgatgtttaccgaagtgttgtttgtccaattctggatgaagttattatgggctataattgcactatctttgcgtatggccaaactggcactggaaaaacttttacaatggaaggtgaaaggtcacctaatgaagagtatacctgggaagaggatcccttggctggtataattccacgtacccttcatcaaatttttgagaaacttactgataatggtactgaattttcagtcaaagtgtctctgttggagatctataatgaagagctttttgatcttcttaatccatcatctgatgtttctgagagactacagatgtttgatgatccccgtaacaagagaggagtgataattaaaggtttagaagaaattacagtacacaacaaggatgaagtctatcaaattttagaaaagggggcagcaaaaaggacaactgcagctactctgatgaatgcatactctagtcgttcccactcagttttctctgttacaatacatatgaaagaaactacgattgatggagaagagcttgttaaaatcggaaagttgaacttggttgatcttgcaggaagtgaaaacattggccgttctggagctgttgataagagagctcgggaagctggaaatataaatcaatccctgttgactttgggaagggtcattactgcccttgtagaaagaacacctcatgttccttatcgagaatctaaactaactagaatcctccaggattctcttggagggcgtacaagaacatctataattgcaacaatttctcctgcatctctcaatcttgaggaaactctgagtacattggaatatgctcatagagcaaagaacatattgaataagcctgaagtgaatcagaaactcaccaaaaaagctcttattaaggagtatacggaggagatagaacgtttaaaacgagatcttgctgcagcccgtgagaaaaatggagtgtatatttctgaagaaaattttagagtcatgagtggaaaattaactgttcaagaagagcagattgtagaattgattgaaaaaattggtgctgttgaggaggagctgaatagggttacagagttgtttatggataataaaaatgaacttgaccagtgtaaatctgacctgcaaaataaaacacaagaacttgaaaccactcaaaaacatttgcaagaaactaaattacaacttgttaaagaagaatatatcacatcagctttggaaagtactgaggagaaacttcatgatgctgccagcaagctgcttaacacagttgaagaaactacaaaagatgtatctggtctccattccaaactggatcgtaagaaggcagttgaccaacacaatgcagaagctcaggatatttttggcaaaaacctgaatagtctgtttaataatatggaagaattaattaaggatggcagctcaaagcaaaaggccatgctagaagtacataagaccttatttggtaatctgctgtcttccagtgtctctgcattagataccattactacagtagcacttggatctctcacatctattccagaaaatgtgtctactcatgtttctcagatttttaatatgatactaaaagaacaatcattagcagcagaaagtaaaactgtactacaggaattgattaatgtactcaagactgatcttctaagttcactggaaatgattttatccccaactgtggtgtctatactgaaaatcaatagtcaactaaagcatattttcaagacttcattgacagtggccgataagatagaagatcaaaaaaaggaactagatggctttctcagtatactgtgtaacaatctacatgaactacaagaaaataccatttgttccttggttgagtcacaaaagcaatgtggaaacctaactgaagacctgaagacaataaagcagacccattcccaggaactttgcaagttaatgaatctttggacagagagattctgtgctttggaggaaaagtgtgaaaatatacagaaaccacttagtagtgtccaggaaaatatacagcagaaatctaaggatatagtcaacaaaatgacttttcacagtcaaaaattttgtgctgattctgatggcttctcacaggaactcagaaattttaaccaagaaggtacaaaattggttgaagaatctgtgaaacactctgataaactcaatggcaacctggaaaaaatatctcaagagactgaacagagatgtgaatctctgaacacaagaacagtttatttttctgaacagtgggtatcttccttaaatgaaagggaacaggaacttcacaacttattggaggttgtaagccaatgttgtgaggcttcaagttcagacatcactgagaaatcagatggacgtaaggcagctcatgagaaacagcataacatttttcttgatcagatgactattgatgaagataaattgatagcacaaaatctagaacttaatgaaaccataaaaattggtttgactaagcttaattgctttctggaacaggatctgaaactggatatcccaacaggtacgacaccacagaggaaaagttatttatacccatcaacactggtaagaactgaaccacgtgaacatctccttgatcagctgaaaaggaaacagcctgagctgttaatgatgctaaactgttcagaaaacaacaaagaagagacaattccggatgtggatgtagaagaggcagttctggggcagtatactgaagaacctctaagtcaagagccatctgtagatgctggtgtggattgttcatcaattggcggggttccatttttccagcataaaaaatcacatggaaaagacaaagaaaacagaggcattaacacactggagaggtctaaagtggaagaaactacagagcacttggttacaaagagcagattacctctgcgagcccagatcaacctttaattcacttgggggttggcaattttatttttaaagaaaacttaaaaataaaacctgaaaccccagaacttgagccttgtgtatagattttaaaagaatatatatatcagccgggcgcggtggctcatgcctgtaatcccagcactttgggaggctgaggcgggtggattgcttgagcccaggagtttgagaccagcctggccaacgtggcaaaacctcgtctctgttaaaaattagccgggcgtggtggcacactcctgtaatcccagctactggggaggctgaggcacgagaatcacttgaacccaggaagcggggttgcagtgagccaaaggtacaccactacactccagcctgggcaacagagcaagactcggtctcaaaaacaaaatttaaaaaagatataaggcagtactgtaaattcagttgaattttgatatctacccatttttctgtcatccctatagttcactttgtattaaattgggtttcatttgggatttgcaatgtaaatacgtatttctagttttcatataaagtagttcttttataacaaatgaaaagtatttttcttgtatattattaagtaatgaatatataagaactgtactcttctcagcttgagcttacataggtaaatatcaccaacatctgtccttagaaaggaccatctcatgttttttttcttgctatgacttgtgtattttcttgcatcctccctagacttccctatttcgctttctcctcggctcactttctccctttttatttttcaccaaaccatttgtagagctacaaaaggtatcctttcttattttcagtagtcagaattttatctagaaatcttttaacacctttttagtggttatttctaaaatcactgtcaacaataaatctaaccctagttgtatccctcctttcagtatttttcacttgttgccccaaatgtgaaagcatttcattcctttaagaggcctaactcattcaccctgacagagttcacaaaaagcccacttaagagtatacattgctattatgggagaccacccagacatctgactaatggctctgtgcccacactccaagacctgtgccttttagagaagctcacaatgatttaaggactgtttgaaacttccaattatgtctataatttatattcttttgtttacatgatgaaactttttgttgttgcttgtttgtatataatacaatgtgtacatgtatctttttctcgattcaaatcttaacccttaggactctggtatttttgatctggcaaccatatttctggaagttgagatgtttcagcttgaagaaccaaaacagaaggaatatgtacaaagaataaattttctgctcacgatgagtttagtgtgtaaagtttagagacatctgactttgatagctaaattaaaccaaaccctattgaagaattgaatatatgctacttcaagaaactaaattgatctcgtagaattatcttaataaaataatggctataatttctctgcaaaatcagatgtcagcataagcgatggataatacctaataaactgccctcagtaaatccatggttaataaatgtggtttctacatt

SEQ ID NO: 147095 - DNA, 3171 bp, Artificial Sequence
  derived and/or modified sequence
atggccagccagcccaacagcagcgccaagaagaaggaggagaagggcaagaacatccaggtggtggtgcgctgccggcccttcaacctggccgagaggaaggccagcgcccacagcatcgtggagtgtgaccctgtgaggaaggaggtgtctgtgaggactggaggcctggccgacaagagcagcaggaagacctacacctttgacatggtgtttggagccagcaccaagcagattgatgtgtacagatctgtggtgtgccccatcctggatgaagtcatcatgggctacaactgcaccatctttgcctacggccagacaggaacaggcaagaccttcaccatggagggggagaggagccccaatgaggagtacacctgggaggaggaccccctggccggcatcatccccaggaccctgcaccagatctttgagaagctgacagacaatggaacagagttctctgtgaaggtgtccctgctggagatctacaatgaggagctgtttgacctgctgaaccccagcagtgatgtgtctgagcggctgcagatgtttgatgaccccaggaacaagaggggcgtcatcatcaagggcctggaggagatcaccgtgcacaacaaggatgaggtgtaccagatcctggagaagggggccgccaagaggaccacagctgccaccctgatgaatgcctacagcagccgcagccacagcgtcttctctgtgaccatccacatgaaggagaccaccattgatggagaggagctggtgaagattggcaagctgaacctggtggacctggccggcagcgagaacatcggccgctctggagctgtggacaagagggcccgggaggccggcaacatcaaccagagcctgctgaccctgggccgggtcatcacagccctggtggagaggaccccccacgtgccctaccgggagagcaagctgacccgcatcctgcaggacagcctgggcggccgcaccaggaccagcatcatcgccaccatcagccctgccagcctgaacctggaggagaccctgagcaccctggagtatgcccaccgggccaagaacatcctgaacaagccagaggtgaaccagaagctgaccaagaaggccctgatcaaggagtacacagaggagattgaaaggctgaagagggacctggccgccgcccgggagaagaatggagtgtacatcagcgaggagaacttccgggtgatgtctgggaagctgactgtgcaggaggagcagatcgtggagctgattgagaagatcggggctgtggaggaggagctgaacagagtgacagagctgttcatggacaacaagaatgagctggaccagtgcaagagtgacctgcagaacaagacccaggagctggagaccacccagaagcacctgcaggagaccaagctgcagctggtgaaggaggagtacatcaccagcgccctggagagcacagaggagaagctgcatgatgctgccagcaagctgctgaacacagtggaggagaccaccaaggatgtgtctggcctgcacagcaagctggacaggaagaaggctgtggaccagcacaatgctgaggcccaggacatctttgggaagaacctgaacagcctcttcaacaacatggaggagctgatcaaggatggcagcagcaagcagaaggccatgctggaggtgcacaagaccctgtttggaaacctgctgagcagctctgtgtctgccctggacaccatcaccaccgtggccctgggcagcctgaccagcatcccagaaaatgtgtccacccacgtgtcccagatcttcaacatgatcctgaaggagcagagcctggccgctgagagcaagacagtgctgcaggagctgatcaacgtgctgaagacagacctgctgagcagcctggagatgatcctgagccccaccgtggtgtccatcctgaagatcaacagccagctgaagcacatcttcaagaccagcctgactgtggccgacaagattgaggaccagaagaaggagctggatggcttcctgagcatcctgtgcaacaacctgcacgagctgcaggagaacaccatctgcagcctggtggagagccagaagcagtgtggcaacctgacagaggacctgaagaccatcaagcagacccacagccaggagctgtgcaagctgatgaacctgtggacagagcgcttctgtgccctggaggagaagtgtgagaacatccagaagcccctgagctctgtgcaggagaacatccagcagaagagcaaggacatcgtgaacaagatgaccttccacagccagaagttctgtgccgacagtgatggcttcagccaggagctgaggaacttcaaccaggagggcaccaagctggtggaggagagcgtgaagcacagcgacaagctgaatggaaacctggagaagatcagccaggagacagagcagagatgtgagagcctgaacaccaggacagtgtacttcagcgagcagtgggtgagcagcctgaatgaaagagagcaggagctgcacaacctgctggaggtggtgtcccagtgctgtgaggccagcagcagtgacatcacagagaagagtgatggcaggaaggccgcccacgagaagcagcacaacatcttcctggaccagatgaccattgatgaggacaagctgattgcccagaacctggagctgaatgagaccatcaagattggcctgaccaagctgaactgcttcctggagcaggacctgaagctggacatccccaccggcaccaccccccagaggaagagctacctgtaccccagcaccctggtgaggacagagccccgggagcacctgctggaccagctgaagaggaagcagcctgagctgctgatgatgctgaactgcagcgagaacaacaaggaggagaccatcccagatgtggatgtggaggaggccgtgctgggccagtacacagaggagcccctgagccaggagcccagcgtggatgctggggtggactgcagcagcatcggcggcgtgcccttcttccagcacaagaagagccacggcaaggacaaggaaaatagaggcatcaacaccctggagaggagcaaggtggaggagaccacagagcacctggtgaccaagagccggctgcccctgcgggcccagatcaacctgtag

SEQ ID NO: 147096 - DNA, 3171 bp, Artificial Sequence
  derived and/or modified sequence
atggccagccagcccaacagcagcgccaagaagaaggaggagaagggaaagaatattcaggtggtcgttcggtgcaggcccttcaacctcgccgagcgtaaggcatcagcccattcaattgttgagtgcgaccctgtccggaaggaggtgagcgtgcgcactggtggcctcgcggacaagagttctaggaagacatatacctttgacatggtgttcggggcttcaaccaaacaaattgatgtgtaccgcagtgttgtctgtccgatcctcgacgaagtgataatgggctacaattgtactatttttgcatacggacagactggcacaggaaaaactttcactatggaaggcgaacgaagtcctaacgaggaatatacatgggaggaggatcccctggctggtatcattccacggacattacatcagattttcgagaaacttacagacaatggcaccgagtttagcgtcaaggtttctttgctcgaaatttataatgaggaactatttgacctgctaaaccctagctcagacgtgagcgaaagattgcagatgttcgacgacccacgaaacaagaggggcgttatcatcaaggggttagaggagatcactgtgcataataaagacgaagtgtatcagatattagaaaagggagctgcgaagaggacaacggctgccacactgatgaacgcttattccagcagatcccattctgtattctccgtgactattcacatgaaagagactactatcgatggggaagaattggtcaagatagggaaactgaacttggtggacctggcgggatctgagaatatcgggaggtctggggcagtggataaaagagctcgagaggccgggaacattaaccagtctttgttgacgttgggaagggtgattaccgccctggtggagaggacaccacacgtcccctatcgggagagtaaattaacaagaatcctgcaagattctctgggtggacgaaccagaacctctataatcgccacaatatcacccgccagcttaaacctagaagaaacgctctcgactttggagtacgcccacagagctaagaatatcctgaataagccagaggtaaaccaaaagcttacaaaaaaagccttaattaaagagtataccgaggagatcgagcgcttaaaaagggatttggccgctgctagagagaaaaacggggtctatattagcgaggaaaattttagggtcatgtctgggaagcttaccgtacaggaagagcagatcgtggagctcatagaaaagattggcgcagtcgaagaagaattgaacagagttaccgagttgtttatggacaataaaaatgagctagaccagtgtaagtcagatttgcaaaacaagacccaagaacttgagacaacccagaagcacctgcaggagacaaagctgcaactggtgaaggaagagtacattaccagcgccttggagtccacggaggagaaacttcatgacgccgccagtaagctactgaacaccgtcgaggagacaactaaggatgtgtcgggccttcactcaaaactggataggaaaaaggcagtagaccagcacaatgcagaggcgcaggacatctttggtaagaacttaaactcactgtttaacaacatggaggaactaatcaaggacggatctagcaagcagaaggccatgttagaggttcacaaaactctctttggaaatctactgtcctctagtgtgtctgccctcgatacaattactacagtggctcttggctctctgacaagcatccccgagaatgtgtcaacccacgtgagccagatctttaacatgatcctgaaggagcagagtctcgccgcagagagcaaaacagttcttcaggagctgatcaatgttctgaaaacagaccttctgagttccttggagatgattctatctccaactgtggtatccatacttaaaatcaatagccaactcaagcatattttcaagacctccctaactgttgctgataagattgaggaccagaagaaagaactggacgggtttctgtccatactctgcaacaatctgcacgaactgcaagagaacactatatgtagcctggtggagtcgcagaaacaatgtggcaacctcaccgaggacttgaagactatcaaacagactcactctcaggagctttgcaagctgatgaatctctggacagagagattctgcgccttagaagaaaagtgcgaaaacatacagaaacccctctctagtgtacaggaaaacattcagcagaagtctaaggatatcgtgaataaaatgacattccactctcaaaaattttgtgcagattctgatggcttttctcaagaacttaggaatttcaatcaggagggtactaagctggttgaggagtctgtgaagcacagcgacaagttgaacggtaacttagaaaaaatctcacaagaaacggagcagaggtgcgagtctctcaatacacgaacggtttatttttcagagcagtgggtctcctctctcaatgaacgggaacaggaactccataacctgctggaagtagtgagtcagtgctgtgaggccagttcgagcgacatcactgaaaaatcagatggaaggaaggccgcccacgaaaaacagcacaatatcttcctggaccagatgacaatcgatgaggataagctgatcgcccaaaatctcgaacttaacgaaaccatcaaaattgggctaacgaagttgaattgcttcctcgagcaagatctcaagctcgatatccccactggcacaaccccacagaggaaaagttacctgtatccttcaactcttgttcgcacagagccaagagagcatctgctcgaccagctgaaaaggaaacaacccgagcttctaatgatgctgaattgtagcgagaacaacaaggaggagacaattcctgacgtcgatgtggaagaagccgtcctggggcagtatactgaagagcccctgtcccaggagccatcagtggatgcaggggtagactgcagcagcataggtggcgtcccgttttttcagcataaaaagtctcatgggaaggacaaagagaatagaggcattaataccttggagcggtccaaggtggaggagacaactgagcatctggttacaaagtcccggttaccccttagggcacaaataaacctgtag

SEQ ID NO: 147097 - DNA, 3171 bp, Artificial Sequence
  derived and/or modified sequence
atggctagccagccaaactcttctgcaaagaagaaagaggagaagggaaaaaacatccaggtggtggtcaggtgtcggccatttaacctggcagaacgtaaagcaagcgcacacagcattgtggaatgtgacccggtgaggaaggaggtgtccgtgagaaccgggggtttagcggataagtcgtccagaaaaacttacacatttgatatggtgttcggggctagtactaaacagatagacgtgtataggtcagtcgtgtgtcccattttggacgaagtcattatgggatataattgcaccatatttgcctatggccagaccggcaccggcaaaactttcactatggagggagagagatctcctaatgaagaatatacctgggaggaggatccgctcgctggcataattccaagaacccttcaccaaatttttgagaaactgaccgacaatggtaccgaatttagtgtgaaggttagtctgctcgagatctacaatgaggaactctttgatctcctgaatccaagttccgacgtgtctgaacggcttcagatgttcgatgatccacgcaataagaggggagtcattattaagggtttggaggagattaccgttcacaacaaggatgaggtatatcagatactggagaaaggtgctgccaaaaggacaaccgcagccacactgatgaatgcctatagctcccgtagccatagtgtgttcagtgttacaattcacatgaaagagactacgatcgacggggaggagctcgtaaaaattggcaaattgaatctggtcgacctggccggaagtgaaaacatcggacggagtggagccgtagacaagcgagcgagagaggccggaaacataaaccagtccctgctgaccctcggcagagtcattactgcacttgtggaacgtacacctcacgttccatatagagagagcaagcttactcgcatactgcaagattccctgggtggtcggacaaggaccagcattatcgcaaccattagtccagcttcactgaatctagaggaaactctgtccactctcgaatatgcccaccgggctaaaaacatactgaacaagccggaagtcaatcagaaactgactaagaaggccctgatcaaagaatatacagaagagatcgaacggttaaagagggatctggcagccgcacgcgaaaaaaacggcgtatatattagcgaggaaaacttcagagtgatgagtggcaagctgacagtccaggaagagcagatcgtggagttgatcgaaaaaattggcgcagttgaagaggaactgaaccgagtgactgaattgttcatggacaacaagaatgaactcgatcagtgcaagtctgacctgcagaataaaacccaggagctcgagaccacacagaaacatttgcaggaaactaaactgcagcttgtgaaggaggaatatatcacatccgctttagagagcactgaggagaagctacacgacgccgctagcaaactgttaaatacggttgaggaaacaacgaaggatgtgtccggcctgcactctaagctggatagaaagaaggccgtggaccaacataacgctgaagctcaggatatattcggaaagaaccttaacagcctgtttaataacatggaagagcttatcaaggatggtagctccaagcagaaggccatgcttgaggtccataagacactctttggcaatttgctctcgtcgtccgtgtcggcattggacaccatcacaacggtggcactgggctcccttactagcattcctgaaaatgtgtctactcatgtttctcagatattcaacatgatcctaaaagagcaatcacttgccgcagagagcaaaaccgtcttacaggagctgattaacgtcctgaaaaccgacctgctttcgtccctagagatgatactctcacctaccgtggtcagtatcttgaaaatcaactctcagctaaagcatatcttcaaaacctcgctgaccgtggccgacaagattgaggaccagaaaaaagagttggacgggtttctgtctattttgtgtaacaacctgcatgagctgcaggagaacaccatttgttctcttgtggaaagtcagaagcagtgcgggaatctgaccgaagacctgaagacgataaagcaaacacatagtcaggaactctgcaagcttatgaacctgtggacagagcgcttttgcgctttagaagagaagtgtgagaacatccagaagcccctgtcatccgtgcaggagaatattcagcaaaagtccaaagatatagtaaacaagatgactttccatagccagaaattctgcgcagattccgatgggttctcccaggaattgcgaaatttcaatcaggaagggacaaaactggtagaagaatctgtgaagcacagcgataaacttaacggcaaccttgaaaagataagccaagaaacagagcagaggtgcgaaagcctgaatacgagaacggtgtacttcagcgaacagtgggtgagttcactcaatgagcgcgaacaggagctacataatttgctggaggtggttagtcaatgctgtgaggcctcctccagtgacattaccgaaaagtctgatgggcgaaaggccgcacatgagaagcagcataacattttcctggaccaaatgacaatcgacgaagacaagctgatagcccaaaatctggagctcaacgagactatcaagattggtctcacaaagctgaattgcttcctggaacaagacctgaagctggacatcccgaccggtaccacacctcagagaaaatcatacttgtatcccagcaccctggtccgaaccgaacctcgggagcatctcctggaccagcttaagagaaaacagcccgaattgctgatgatgctcaactgcagtgaaaacaataaggaagagaccattcctgacgttgacgtcgaggaagcagtcttggggcagtacaccgaggaaccactgtcccaggagccgtcggtcgacgccggagtggactgctctagcattgggggtgtaccattctttcagcacaagaagtcacatgggaaagacaaagagaatagaggtataaataccctcgagcgaagcaaagtggaggagacgacagaacatctcgtgaccaagtcccgactgccactgcgtgcccagattaacctttag

SEQ ID NO: 147098 - DNA, 3171 bp, Artificial Sequence
  derived and/or modified sequence
atggccagccagcccaacagcagcgccaagaagaaggaggagaagggcaagaacatccaggtggtggtgagatgcagacccttcaacctggccgagagaaaggccagcgcccacagcatcgtggagtgcgaccccgtgagaaaggaggtgagcgtgagaaccggcggcctggccgacaagagcagcagaaagacctacaccttcgacatggtgttcggcgccagcaccaagcagatcgacgtgtacagaagcgtggtgtgccccatcctggacgaggtgatcatgggctacaactgcaccatcttcgcctacggccagaccggcaccggcaagaccttcaccatggagggcgagagaagccccaacgaggagtacacctgggaggaggaccccctggccggcatcatccccagaaccctgcaccagatcttcgagaagctgaccgacaacggcaccgagttcagcgtgaaggtgagcctgctggagatctacaacgaggagctgttcgacctgctgaaccccagcagcgacgtgagcgagagactgcagatgttcgacgaccccagaaacaagagaggcgtgatcatcaagggcctggaggagatcaccgtgcacaacaaggacgaggtgtaccagatcctggagaagggcgccgccaagagaaccaccgccgccaccctgatgaacgcctacagcagcagaagccacagcgtgttcagcgtgaccatccacatgaaggagaccaccatcgacggcgaggagctggtgaagatcggcaagctgaacctggtggacctggccggcagcgagaacatcggcagaagcggcgccgtggacaagagagccagagaggccggcaacatcaaccagagcctgctgaccctgggcagagtgatcaccgccctggtggagagaaccccccacgtgccctacagagagagcaagctgaccagaatcctgcaggacagcctgggcggcagaaccagaaccagcatcatcgccaccatcagccccgccagcctgaacctggaggagaccctgagcaccctggagtacgcccacagagccaagaacatcctgaacaagcccgaggtgaaccagaagctgaccaagaaggccctgatcaaggagtacaccgaggagatcgagagactgaagagagacctggccgccgccagagagaagaacggcgtgtacatcagcgaggagaacttcagagtgatgagcggcaagctgaccgtgcaggaggagcagatcgtggagctgatcgagaagatcggcgccgtggaggaggagctgaacagagtgaccgagctgttcatggacaacaagaacgagctggaccagtgcaagagcgacctgcagaacaagacccaggagctggagaccacccagaagcacctgcaggagaccaagctgcagctggtgaaggaggagtacatcaccagcgccctggagagcaccgaggagaagctgcacgacgccgccagcaagctgctgaacaccgtggaggagaccaccaaggacgtgagcggcctgcacagcaagctggacagaaagaaggccgtggaccagcacaacgccgaggcccaggacatcttcggcaagaacctgaacagcctgttcaacaacatggaggagctgatcaaggacggcagcagcaagcagaaggccatgctggaggtgcacaagaccctgttcggcaacctgctgagcagcagcgtgagcgccctggacaccatcaccaccgtggccctgggcagcctgaccagcatccccgagaacgtgagcacccacgtgagccagatcttcaacatgatcctgaaggagcagagcctggccgccgagagcaagaccgtgctgcaggagctgatcaacgtgctgaagaccgacctgctgagcagcctggagatgatcctgagccccaccgtggtgagcatcctgaagatcaacagccagctgaagcacatcttcaagaccagcctgaccgtggccgacaagatcgaggaccagaagaaggagctggacggcttcctgagcatcctgtgcaacaacctgcacgagctgcaggagaacaccatctgcagcctggtggagagccagaagcagtgcggcaacctgaccgaggacctgaagaccatcaagcagacccacagccaggagctgtgcaagctgatgaacctgtggaccgagagattctgcgccctggaggagaagtgcgagaacatccagaagcccctgagcagcgtgcaggagaacatccagcagaagagcaaggacatcgtgaacaagatgaccttccacagccagaagttctgcgccgacagcgacggcttcagccaggagctgagaaacttcaaccaggagggcaccaagctggtggaggagagcgtgaagcacagcgacaagctgaacggcaacctggagaagatcagccaggagaccgagcagagatgcgagagcctgaacaccagaaccgtgtacttcagcgagcagtgggtgagcagcctgaacgagagagagcaggagctgcacaacctgctggaggtggtgagccagtgctgcgaggccagcagcagcgacatcaccgagaagagcgacggcagaaaggccgcccacgagaagcagcacaacatcttcctggaccagatgaccatcgacgaggacaagctgatcgcccagaacctggagctgaacgagaccatcaagatcggcctgaccaagctgaactgcttcctggagcaggacctgaagctggacatccccaccggcaccaccccccagagaaagagctacctgtaccccagcaccctggtgagaaccgagcccagagagcacctgctggaccagctgaagagaaagcagcccgagctgctgatgatgctgaactgcagcgagaacaacaaggaggagaccatccccgacgtggacgtggaggaggccgtgctgggccagtacaccgaggagcccctgagccaggagcccagcgtggacgccggcgtggactgcagcagcatcggcggcgtgcccttcttccagcacaagaagagccacggcaaggacaaggagaacagaggcatcaacaccctggagagaagcaaggtggaggagaccaccgagcacctggtgaccaagagcagactgcccctgagagcccagatcaacctgtag

SEQ ID NO: 147099 - protein, 1015 aa, Artificial Sequence
  derived and/or modified sequence
MRRFLRPGHDPVRERLKRDLFQFNKTVEHGFPHQPSALGYSPSLRILAIGTRSGAIKLYGAPGVEFMGLHQENNAVTQIHLLPGQCQLVTLLDDNSLHLWSLKVKGGASELQEDESFTLRGPPGAAPSATQITVVLPHSSCELLYLGTESGNVFVVQLPAFRALEDRTISSDAVLQRLPEEARHRRVFEMVEALQEHPRDPNQILIGYSRGLVVIWDLQGSRVLYHFLSSQQLENIWWQRDGRLLVSCHSDGSYCQWPVSSEAQQPEPLRSLVPYGPFPCKAITRILWLTTRQGLPFTIFQGGMPRASYGDRHCISVIHDGQQTAFDFTSRVIGFTVLTEADPAATFDDPYALVVLAEEELVVIDLQTAGWPPVQLPYLASLHCSAITCSHHVSNIPLKLWERIIAAGSRQNAHFSTMEWPIDGGTSLTPAPPQRDLLLTGHEDGTVRFWDASGVCLRLLYKLSTVRVFLTDTDPNENFSAQGEDEWPPLRKVGSFDPYSDDPRLGIQKIFLCKYSGYLAVAGTAGQVLVLELNDEAAEQAVEQVEADLLQDQEGYRWKGHERLAARSGPVRFEPGFQPFVLVQCQPPAVVTSLALHSEWRLVAFGTSHGFGLFDHQQRRQVFVKCTLHPSDQLALEGPLSRVKSLKKSLRQSFRRMRRSRVSSRKRHPAGPPGEAQEGSAKAERPGLQNMELAPVQRKIEARSAEDSFTGFVRTLYFADTYLKDSSRHCPSLWAGTNGGTIYAFSLRVPPAERRMDEPVRAEQAKEIQLMHRAPVVGILVLDGHSVPLPEPLEVAHDLSKSPDMQGSHQLLVVSEEQFKVFTLPKVSAKLKLKLTALEGSRVRRVSVAHFGSRRAEDYGEHHLAVLTNLGDIQVVSLPLLKPQVRYSCIRREDVSGIASCVFTKYGQGFYLISPSEFERFSLSTKWLVEPRCLVDSAETKNHRPGNGAGPKKAPSRARNSGTQSDGEEKQPGLVMERALLSDERAATGVHIEPPWGAASAMAEQSEWLSVQAAR

SEQ ID NO: 147100 - protein, 1004 aa, Artificial Sequence
  derived and/or modified sequence
MHGSCCLGGGQPLSVFASLHMGPEGLALKAGRGWCPTFQSFPEPTPSYGAPGVEFMGLHQENNAVTQIHLLPGQCQLVTLLDDNSLHLWSLKVKGGASELQEDESFTLRGPPGAAPSATQITVVLPHSSCELLYLGTESGNVFVVQLPAFRALEDRTISSDAVLQRLPEEARHRRVFEMVEALQEHPRDPNQILIGYSRGLVVIWDLQGSRVLYHFLSSQQLENIWWQRDGRLLVSCHSDGSYCQWPVSSEAQQPEPLRSLVPYGPFPCKAITRILWLTTRQGLPFTIFQGGMPRASYGDRHCISVIHDGQQTAFDFTSRVIGFTVLTEADPAATFDDPYALVVLAEEELVVIDLQTAGWPPVQLPYLASLHCSAITCSHHVSNIPLKLWERIIAAGSRQNAHFSTMEWPIDGGTSLTPAPPQRDLLLTGHEDGTVRFWDASGVCLRLLYKLSTVRVFLTDTDPNENFSAQGEDEWPPLRKVGSFDPYSDDPRLGIQKIFLCKYSGYLAVAGTAGQVLVLELNDEAAEQAVEQVEADLLQDQEGYRWKGHERLAARSGPVRFEPGFQPFVLVQCQPPAVVTSLALHSEWRLVAFGTSHGFGLFDHQQRRQVFVKCTLHPSDQLALEGPLSRVKSLKKSLRQSFRRMRRSRVSSRKRHPAGPPGEAQEGSAKAERPGLQNMELAPVQRKIEARSAEDSFTGFVRTLYFADTYLKDSSRHCPSLWAGTNGGTIYAFSLRVPPAERRMDEPVRAEQAKEIQLMHRAPVVGILVLDGHSVPLPEPLEVAHDLSKSPDMQGSHQLLVVSEEQFKVFTLPKVSAKLKLKLTALEGSRVRRVSVAHFGSRRAEDYGEHHLAVLTNLGDIQVVSLPLLKPQVRYSCIRREDVSGIASCVFTKYGQGFYLISPSEFERFSLSTKWLVEPRCLVDSAETKNHRPGNGAGPKKAPSRARNSGTQSDGEEKQPGLVMERALLSDERAATGVHIEPPWGAASAMAEQSEWLSVQAAR

SEQ ID NO: 147101 - DNA, 3048 bp, Artificial Sequence
  derived and/or modified sequence
atgagacggtttctcagacctggccatgatcctgttcgcgaacgcctgaagcgagacctgttccaattcaataaaactgtggaacacggtttcccccaccagccatctgctcttgggtacagtcctagcctccgaatactcgccatcggaacaagaagtggcgcgattaagctctacggagctcctggggtggaattcatgggtctccatcaagaaaataacgcagtgacacagatccatctgttgccgggacagtgccagttagtgacgctgctggacgataacagcctgcacctatggtcactgaaggtcaaaggtggtgcgtccgaactccaggaagacgaatcatttaccctgagaggccctcctggcgccgcaccctccgcgacccagataacagtggtattaccccactcctcttgcgagctactgtatttgggcactgagtctggtaacgtgttcgtggtccaactcccggctttccgggcactagaggacaggacaatctcatcagacgctgtgctgcaacggctgcctgaggaagcacggcaccgaagagtttttgaaatggtcgaggctcttcaggaacaccctcgggacccgaaccagatccttattggctattccagaggactcgtggtcatttgggacctgcaaggcagccgggtgttgtatcacttccttagcagtcagcagctagagaacatttggtggcagcgcgacggcagactactcgtttcatgccacagcgatggcagttactgccaatggcctgtttctagcgaggcgcaacagcctgagccactgcggagtctggtcccatatggtcctttcccttgcaaggctattacccgcatcctgtggttgaccaccaggcagggtctccccttcaccatcttccaggggggtatgccccgagcttcctacggcgatagacattgcatttccgtgatccacgatggtcaacagactgcctttgacttcaccagccgggtgattggtttcaccgtcctgacggaagccgaccctgccgctacttttgacgatccatacgcactggtggtgctagcagaggaggaactagtcgtcatcgatctccagacagccggctggccgcccgtgcagttgccatatctggcctccctgcactgctccgcgatcacctgttctcaccacgtgagcaatatccctcttaagttgtgggagaggattatcgctgcaggctctcgccagaacgctcatttctctactatggaatggcctattgatggaggcactagtcttacccccgcgccaccccagagagacctactgctgacaggacatgaggacggaaccgttcggttttgggacgcctcaggagtgtgcctacgtctcctgtataagctctccactgtgcgagttttcctaaccgataccgacccaaacgagaattttagcgcccagggcgaagacgagtggccccctttgcgaaaagtcggctcatttgatccctatagcgatgatccgcgtcttggaattcagaagatttttctttgcaaatatagtggttatctcgctgtggcggggaccgccggccaagttctggtgctcgaactcaacgacgaggcggcagagcaggctgtggagcaggtggaagccgatctcctccaagaccaagaagggtaccgctggaaaggtcacgaaaggctggccgccagatcaggacccgtcaggttcgagccaggcttccaaccattcgttctggtccaatgccagcccccagctgttgtcacaagcctggcgcttcattctgaatggcgtctcgtcgcttttggaaccagccacgggttcggcctcttcgaccatcagcagcggcgccaagtctttgttaaatgtacactacatccctccgaccagctggccctcgagggccccctttcaagagtgaaatctcttaagaagtcactgcgacaatcattcaggcggatgaggagatccagggtgagctcacggaagcggcacccagcgggacctcccggcgaagcccaggagggatccgctaaagccgagcggccaggtctgcagaatatggagcttgccccagtccagaggaagatcgaagcccgaagcgcagaagattccttcactgggttcgtgcgcactctctacttcgcggacacttacctcaaagatagcagtaggcactgcccaagcctctgggccgggacgaatggtgggacaatctatgctttctcgctcagagtacctccagcggagcgccgcatggacgagcctgtgagagcagagcaggcgaaagagattcagctcatgcacagagcacccgttgtcggaatcctcgttttggacggacacagcgtgcccttgcctgaacccctcgaggttgcacatgacctatccaagtcgccggatatgcagggcagtcatcagctactggtagtctcagaagagcagtttaaggtctttactctgcctaaggtctcagccaagctcaagctcaaactcacggccctagaggggtcacgagtgaggagggtcagcgttgcgcattttggcagcaggcgggccgaggattacggagagcaccacctcgccgtgttgaccaatttgggcgatatccaggtagtgagtctccctctgcttaaacctcaagtcagatactcctgtattaggagggaggacgtttccggcatagccagctgtgtgttcaccaagtatggacagggattctacctgatcagcccctcggagttcgagagatttagcctctcaaccaagtggttggtagagccgaggtgccttgtggacagtgcagagacaaaaaaccaccggcccgggaacggagctggccctaaaaaggctccctctagggcgcggaattctgggacacagtctgatggagaggaaaaacagcccgggctggtcatggagagggccttgctgagcgacgaaagagccgccaccggcgttcacatcgagcccccatggggagccgccagtgccatggctgagcagagtgagtggctgtctgtccaggctgcccgatag

SEQ ID NO: 147102 - DNA, 3504 bp, Artificial Sequence
  derived and/or modified sequence
ggaggtgagcaggaaggagacggccgcccagcagcccgtgggcaggcgcggcggagcgagcggggccggcggcgggcgccgagggacgccgaggcctcgggcgggggctggcccggggttccaggtctccagtgggggctgcagactaagcaaaatgaggcggttcctgaggccagggcatgaccctgtgcgggagaggctcaagcgggacctgttccagtttaacaagacggtggagcatggcttcccgcaccagcccagcgccctcggctacagcccgtccctgcgcatcctggccatcggcacccgttctggagccatcaagctctacggagccccaggcgtggagttcatggggctgcaccaggagaacaacgctgtgacgcagatccacctcctgcccggccagtgccagctggtcaccctgctggatgacaacagcctgcacctttggagcctgaaggtcaagggcggggcatcggagctgcaggaggatgagagcttcacactgcgtggacccccaggggctgcccccagtgccacacagatcaccgtggtcctgccacattcctcctgcgagctgctctacctgggcaccgagagtggcaacgtgtttgtggtgcagctgccagcttttcgtgcgctggaggaccggaccatcagctcggacgcggtgctgcagcggttgccagaggaggcccgccaccggcgtgtgttcgagatggtggaggcactgcaggagcaccctcgagaccccaaccagatcctgatcggctacagccgaggcctcgttgtcatctgggacctacagggcagccgcgtgctctaccacttcctcagcagccagcaactggagaacatctggtggcagcgggacggccgcctgctcgtcagctgtcactctgacggcagctactgccagtggcccgtgtccagcgaagcccagcaaccagagcccctccgcagcctcgtgccttacggtccctttccttgcaaagcgattaccagaatcctctggctgaccactaggcaggggttgcccttcaccatcttccagggtggcatgccacgggccagctacggggaccgccactgcatctcagtgatccacgatggccagcagacggccttcgacttcacctcccgtgtcatcggcttcactgtcctcacagaggcagaccctgcagccacctttgacgacccctatgccctggtggtgctggctgaggaggagctggtggtgattgacctgcagacagcaggctggccaccggtccagctgccctacctggcttctctgcactgttccgccatcacctgctctcaccacgtctccaacatcccgctgaagctgtgggagcggatcattgccgccggcagccggcagaacgcacacttctccaccatggagtggccaattgatggtggcaccagcctgaccccagccccaccccagagggacctgctgctcacagggcacgaggacggcacggtgcggttctgggatgcctcgggtgtctgcctgcggctgctctacaaactcagcactgtgcgcgtgttcctcaccgacacggaccccaacgagaacttcagtgcccagggcgaggacgagtggcccccactccgcaaggtgggctcctttgacccctacagtgatgacccccggctgggcatccagaagatcttcctctgcaagtacagcggctacctggctgtggcaggcacggcagggcaggtgctggtactggaactgaatgacgaggcagcggagcaggctgtggagcaggtggaggccgacctgctgcaggaccaagagggctaccgctggaaggggcacgagcgcctggcagcccgctcagggcccgtgcgctttgagcctggctttcagcccttcgtgttggtgcagtgtcagcccccggctgtggtcacctccttggccctgcactctgagtggcggctcgtggccttcggcaccagccatggctttggcctctttgaccaccagcagcggcggcaggtctttgttaagtgcacactgcaccccagtgaccagctggccttggagggcccactctcccgcgtcaagtccctcaagaagtccttgcgtcagtcattccgccggatgcgtcggagccgggtgtccagccggaagcggcacccggctggccccccaggagaggcacaggaggggagtgccaaggctgagcggccaggcctccagaacatggagctggcgcctgtgcagcgcaagatcgaggctcgctcggcagaggactccttcacaggcttcgtccggaccctgtactttgctgacacctacctgaaggacagctcccggcactgcccctcgctgtgggctggcaccaatgggggcaccatctatgccttctccctgcgtgtgcctcccgccgagcggagaatggatgagcctgtgcgggcagagcaggccaaggagatccagctgatgcaccgggcgccggtggtgggcatcctggtgctcgacggacacagcgtaccccttcccgagcccctcgaagtggcccatgatctgtcgaagagccctgacatgcagggaagccaccagctgctcgtcgtatcagaggagcagttcaaggtgttcacgctgcccaaggtgagtgccaagctgaagttgaagctgacggccctggagggctcaagagtgcggcgggtcagcgtggcccacttcggcagtcgtcgagccgaggactacggggagcaccacctggcagtccttaccaacctgggcgacatccaggtggtctcgctgcccctgctcaagccccaggtgcgctacagctgcatccgccgggaggacgtcagtggcatcgcctcctgcgtcttcaccaaatatggccaaggcttctacctgatctcaccctcggagtttgagcgcttctctctctccaccaagtggctggtggagccccggtgtctggtggattcagcagaaaccaagaaccaccgccctggtaacggtgcgggccccaagaaggccccgagccgagccaggaactcagggactcagagtgatggcgaggagaagcagcccggcctggtgatggagcgcgctctgctcagtgatgagagagcggcaactggcgttcacatcgagccgccgtggggtgcagcctcagcaatggcggagcagagtgagtggctgagcgtccaggctgcgcgatgagcacacactactactgatggcctttcgggggtccctgccccaaccggagaggccggtgcacagggccccgccaggggctgggggcatcccggcttccacaatgcagctgctctgggcctcgggagaggagagaccccagtcccctgggctgcccttcccgggcctcgtctgtctgggtcctttggtcaatgttgcacagtttttattgctcccatccctttttgtagtgggctgggttttaagttataaatgttaactgcctctgggtgaaaaagtttttaataaacacctattacctcttg

SEQ ID NO: 147103 - DNA, 3048 bp, Artificial Sequence
  derived and/or modified sequence
atgaggcgcttcctgcggcccggccatgaccctgtgcgggagcggctgaagagggacctcttccagttcaacaagacagtggagcacggcttcccccaccagcccagcgccctgggctacagccccagcctgcgcatcctggccatcggcaccaggtctggggccatcaagctgtatggagcccctggggtggagttcatgggcctgcaccaggagaacaatgctgtgacccagatccacctgctgcccggccagtgccagctggtgaccctgctggatgacaacagcctgcacctgtggagcctgaaggtgaagggcggggccagcgagctgcaggaggatgagagcttcaccctgcggggccccccaggagctgcccccagcgccacccagatcaccgtggtgctgccccacagcagctgtgagctgctgtacctgggcacagagagcggaaatgtgtttgtggtgcagctgcctgccttccgggccctggaggacaggaccatcagcagtgatgctgtgctgcagaggctgcctgaggaggcccggcacagaagagtgtttgagatggtggaggccctgcaggagcacccccgggaccccaaccagatcctgattggctacagccggggcctggtggtgatctgggacctgcagggcagccgggtgctgtaccacttcctgagcagccagcagctggagaacatctggtggcagagagatggccgcctgctggtgtcctgccacagtgatggcagctactgccagtggcctgtgtcctctgaggcccagcagcctgagcccctgcggagcctggtgccctacggccccttcccctgcaaggccatcacccgcatcctgtggctgaccacccggcagggcctgcccttcaccatcttccagggcggcatgccccgggccagctatggagacagacactgcatcagcgtcatccatgatggccagcagacagcctttgacttcaccagccgggtgattggcttcaccgtgctgacagaagctgaccctgctgccacctttgatgacccctatgccctggtggtgctggccgaggaggagctggtggtgattgacctgcagacagctggctggccccctgtgcagctgccctacctggccagcctgcactgcagcgccatcacctgcagccaccacgtgagcaacatccccctgaagctgtgggagcgcatcatcgctgctggcagccggcagaatgcccacttcagcaccatggagtggcccattgatggcggcaccagcctgaccccagccccaccccagagggacctgctgctgaccggccatgaagatggcaccgtgcgcttctgggatgccagcggcgtgtgcctgcggctgctgtacaagctgagcacagtgcgggtcttcctgacagacacagaccccaatgaaaacttcagcgcccagggagaagatgagtggccacccctgaggaaggtgggcagctttgacccctacagtgatgacccccggctgggcatccagaagatcttcctgtgcaagtacagcggctacctggccgtggccggcacagctggccaggtgctggtgctggagctgaatgatgaagctgctgagcaggccgtggagcaggtggaggccgacctgctgcaggaccaggagggctaccgctggaagggccacgagcggctggccgcccggagcggccctgtgcgctttgagcccggcttccagccctttgtgctggtgcagtgccagcccccagctgtggtgaccagcctggccctgcacagcgagtggaggctggtggccttcggcaccagccacggcttcggcctgtttgaccaccagcagaggcggcaggtgtttgtgaagtgcaccctgcaccccagcgaccagctggccctggagggccccctgagccgggtgaagagcctgaagaagagcctgcggcagagcttccggaggatgaggaggagccgggtgagcagcaggaagaggcaccctgctggccccccaggagaggcccaggagggcagcgccaaggccgagcggcccggcctgcagaacatggagctggcccctgtgcagaggaagattgaggcccggtctgctgaggacagcttcaccggctttgtgaggaccctgtactttgctgacacctacctgaaggacagcagccgccactgccccagcctgtgggccggcaccaacggcggcaccatctatgccttcagcctgcgggtgcccccagctgagaggaggatggatgagcctgtgcgggcagagcaggccaaggagatccagctgatgcaccgggcccctgtggtgggcatcctggtgctggatggccacagcgtgcccctgcctgagcccctggaggtggcccatgacctgagcaagagcccagacatgcagggcagccaccagctgctggtggtgtctgaggagcagttcaaggtgttcaccctgcccaaggtgtctgccaagctgaagctgaagctgacagccctggagggcagccgggtgcggcgggtgtctgtggcccacttcggcagccggcgggcagaagattatggagagcaccacctggccgtgctgaccaacctgggggacatccaggtggtgtccctgcccctgctgaagccccaggtgcgctacagctgcatcagaagagaagatgtgtctggcatcgccagctgtgtgttcaccaagtatggccagggcttctacctgatcagccccagcgagtttgagcgcttcagcctgagcaccaagtggctggtggagccccgctgcctggtggacagcgctgagaccaagaaccacaggcctggaaatggagctggccccaagaaggcccccagccgggccagaaattctggcacccagagtgatggagaggagaagcagcccggcctggtgatggagcgggccctgctgagtgatgagcgggccgccaccggggtgcacatcgagcccccctggggcgccgccagcgccatggccgagcagagcgagtggctgtctgtgcaggccgccaggtag

SEQ ID NO: 147104 - DNA, 3048 bp, Artificial Sequence
  derived and/or modified sequence
atgcggcggttcctgcggcccggccacgaccccgtgcgggagcggcttaagagagacctgttccaatttaacaagacagttgagcacggctttcctcaccaaccatctgccctgggatactcaccatctctgagaatcctcgcaattggtacccgtagcggagccataaaactatacggagcgccgggggtcgagtttatggggttgcaccaggaaaacaatgcagtgacccagatccacctcctgccaggtcagtgccagcttgtgactctgctggatgataacagcctgcatctgtggagtctgaaggtgaaagggggagccagcgaactccaagaggacgagtccttcacactgcggggcccacccggtgctgcaccctccgccacccagatcacagtcgtcctgccccactccagctgcgagctgctttatctcgggacggaaagtgggaacgtgttcgttgtgcagctgcctgcgtttcgcgccctggaagatagaaccattagcagtgatgcagtgctccagaggctgcccgaagaagcccggcatcgcagagttttcgagatggttgaagccctgcaggagcaccctagagaccccaatcagatcctcatcgggtattcacgcggcctcgttgtcatctgggacctgcaggggagcagggttctctaccattttttgagcagccagcagttggagaacatttggtggcaacgcgacggcagactgcttgttagttgccactccgacgggagctactgccagtggcccgtatccagtgaggcacaacagcccgaacctttgcgaagcctggtcccatatggtccgtttccatgcaaggcaatcaccaggattctctggttaactacccgtcaggggcttcccttcaccatctttcagggagggatgccccgggccagttacggagatcgccactgcatcagcgttatacatgatgggcaacagaccgctttcgatttcaccagtagggtcattggatttactgtgctcaccgaggcggatccggctgcaaccttcgacgatccttatgccctggtcgtgttggctgaagaggagctcgttgtaatcgacctccagaccgccgggtggccccccgtgcaacttccatatctggccagcctgcactgctccgctataacttgctctcaccacgtgtctaacattccacttaaattgtgggaacgtataatagctgctggtagcagacagaatgctcacttttctactatggagtggcctatcgacggcgggactagtctgaccccagcccccccccagcgggacctgttattaaccgggcatgaggacggtactgtgcggttctgggatgcctccggagtctgtctaaggctcctctacaaactttcaaccgttagagtgttcctgaccgacaccgatccaaatgagaacttttcggcacagggtgaagacgagtggccgcccttgagaaaggtgggtagctttgacccatacagcgacgatcccagattgggcatccagaaaatattcctatgtaagtattccggatacctggcagtcgctggaacagccggccaggtcctcgttctggagcttaatgatgaggctgccgaacaggctgtcgagcaggtagaggccgatttgctccaggatcaggagggttacagatggaaagggcatgagcgcctggccgcgagaagcggacctgtgagatttgaaccagggttccaaccattcgtgctggtgcagtgccagcccccagcagtcgtcaccagtctggccctccacagtgaatggcgcttggttgcctttggcacatcccacggctttggactgttcgaccaccagcaaagaaggcaggtcttcgtcaagtgcacgctgcacccctcagaccaattagcccttgaaggccccctgagtagggtaaaaagccttaagaagtcgttgagacagtcctttagacggatgcgacgtagccgggtgtcgagtaggaagcggcatcccgcggggccgccgggggaagcccaggagggctccgctaaagccgagaggccaggtctgcaaaatatggagcttgctccggtccagcggaagattgaagctcgaagcgcggaggattccttcaccggatttgtaagaaccctgtactttgccgacacatacctaaaagatagtagccgccattgtcctagcctatgggccggaactaatgggggcacaatatatgcattttctctgcgtgtcccaccagccgaacgacggatggatgagcccgtgagagccgagcaggctaaggagatccaactgatgcacagggcaccagttgttggtatactggtccttgatggccatagcgtccccttacctgagcccctggaggtggcccacgacttatctaagtcccccgacatgcagggatcccaccaactgctggttgtcagcgaagagcagttcaaggtcttcactctgcctaaagtttccgccaagcttaagcttaaactcaccgcattggaaggctcccgagtccgccgggtttctgtggcccatttcggaagcaggcgtgctgaggattacggtgaacatcatcttgcggtgttgactaacctgggggacatccaagtggtctcactaccactcctaaagccccaggttcgctatagctgtattcgaagggaggatgtcagcggcatcgcgtcgtgtgtattcacaaaatatggtcaggggttctacctgatcagtcccagcgagtttgagcgattttcacttagcactaaatggctggttgaacctcgatgtctggtcgattcggctgagacaaagaatcacaggccaggtaacggagccggaccgaagaaagcgcccagcagggctagaaattccgggacacaaagcgacggcgaagagaagcagcccggcctggtaatggagcgcgccttactgagcgatgagagagcagctaccggcgttcacatcgagccaccttggggggccgcttcagctatggccgaacagtccgaatggctgagcgtccaggccgctcggtag

SEQ ID NO: 147105 - DNA, 3048 bp, Artificial Sequence
  derived and/or modified sequence
atgcgtcggtttctgcgacctggccacgatccagtgcgagaaagacttaagagagatctgttccaatttaacaagactgtggaacacggtttcccacaccaaccgtcagccttaggctactcccctagtctgcgtattctagccattggaacccgtagcggggcaataaagctttacggtgcccctggggtcgaattcatgggattgcaccaagagaataatgccgttacacagatccatctgctgccaggtcagtgccagctggtaacgctgctggatgacaacagcctccatctgtggtccttaaaggtgaaaggaggggctagtgaactgcaggaagatgagtcttttacactacgaggaccacctggggcagcgccatcagcgactcagataacggtggttctccctcatagctcgtgtgagctcctatacttgggtacagagtctggcaatgtatttgtagtgcagcttcccgcattcagggcactcgaggacaggacaatcagttccgacgccgtcctccagagattacccgaagaggcccgacaccgccgagtgttcgaaatggtcgaggcgcttcaagaacacccgagagatccaaaccagattctgatcgggtacagcagagggctggtggtgatctgggatctccagggaagccgcgtcctgtatcactttctttcttcacaacagctagaaaacatctggtggcaaagggacggaagacttcttgtgagttgccattccgatggctcgtactgccagtggccggtgtcttctgaagcccaacagcctgagcccctcagatccttagtgccttacgggccttttccttgcaaggctatcaccaggattctgtggctgacaaccaggcagggactgccatttactatctttcagggcggaatgccccgagcctcctacggcgataggcactgcattagcgtgattcatgacggtcagcagacagccttcgacttcacttctcgggtgatcgggttcactgtactcactgaagcagatccggctgccactttcgacgacccctatgccctcgtcgtgttggccgaggaagagctagtcgtgattgacctgcagactgccggttggccgccagtccagctcccgtatctggcctctctccactgtagcgcgatcacctgctcccaccatgtgtccaatattcctctcaaactctgggagagaattattgccgctggcagcaggcaaaacgcgcatttttctaccatggagtggcctatcgacgggggaacaagtctgacccctgcacctccccaacgcgacctcctgcttactgggcatgaggacggcaccgtgaggttctgggatgcatctggtgtctgcctgaggctcctttacaagctgagtaccgttcgcgtttttctgacagacacagacccaaatgagaattttagcgcacagggcgaggatgagtggcctccattacgtaaagttggtagttttgacccctattccgatgatccaagactgggcattcagaagattttcctttgcaaatacagtggttacctcgctgtcgccggaaccgccggtcaggtgttagtgctcgaactgaatgacgaggcagctgagcaagctgttgaacaggtggaggcagatctcctgcaggatcaagagggttaccgttggaaaggccatgagagacttgccgcaagatcaggacccgtgcgtttcgagccgggttttcagcctttcgtgctggtgcagtgccagcctccggctgttgtcaccagcctggccttgcattctgaatggcgtttagttgcattcgggacctcacacgggtttgggctctttgaccatcaacagagaagacaggtctttgtcaagtgtaccctgcacccgagcgatcaattggctctggaagggccactgtctcgcgtgaagtcccttaagaagtccctaaggcagagcttcaggagaatgcggagatccagggtatcctctcgtaagagacaccccgcaggccctccaggagaggcacaggaaggctcagccaaggcagagcgccctggtctgcagaatatggagctggcgcctgtccagaggaagatagaagctaggtcagccgaagactcgttcactgggtttgtccgcactttatacttcgctgacacctacctaaaggactctagtcgtcactgccccagcctgtgggctggaaccaacggaggaacaatatacgctttttccctgagagttccccctgctgaaagaaggatggatgagccagtgagagcggagcaggcaaaggagatccagttaatgcaccgtgcacccgtggtcggcatcctagtgctcgacggacattcagtgccactgcccgagcctctcgaggtagcccatgatctttccaagtctcctgacatgcagggaagtcaccagctgctagttgtttcagaagagcagttcaaggtcttcacacttcccaaggtttccgccaagttgaagctaaaactgactgctcttgagggaagtagggtacgaagggtttcggtggcccactttggctcccgcagagctgaggattacggtgagcaccacctggccgtactcaccaatttgggagatattcaggttgtgagcctgcccctgcttaaacctcaggtaagatattcctgtatacgcagggaagatgtaagcgggatcgcttcctgtgtgtttaccaagtacggccagggattctacctcatctcgccctccgagttcgagaggttcagccttagtactaagtggctcgttgaacctaggtgtctagtggatagtgctgagacaaagaaccatcgacccggtaatggagcaggacccaaaaaagccccaagtagggcgcgaaattctggaacacagagtgacggcgaggagaagcaacctgggttggtcatggaacgcgctttactttccgatgagcgcgcagcaacaggcgtccacatcgaaccaccatggggagccgcttcagccatggccgagcagtccgagtggttgagcgttcaagccgctagatag

SEQ ID NO: 147106 - DNA, 3048 bp, Artificial Sequence
  derived and/or modified sequence
atgcgacgctttttaaggccgggccacgatccggtgcgggagcgcttgaagagagacttgtttcaatttaacaagacagtagaacacggtttccctcatcagcccagcgctctaggctatagcccctcgctgcggatcctcgccatcgggacccgcagtggagcaattaagttatatggagcaccaggcgtggagtttatgggattacatcaggaaaacaatgccgtcactcaaatccacctcctccccgggcagtgtcagctcgtcaccctgctggacgacaatagcttgcatctctggtctctaaaggtgaagggaggcgctagcgagctgcaagaggacgagtctttcaccttgaggggacctcccggcgcagctccatctgcgacacaaataaccgttgtgttgccgcatagttcctgtgaactgctgtatctcgggaccgagagcggcaacgtttttgtggtccaacttccagcatttcgcgcccttgaggatagaacgatttcatccgatgctgtgctgcaacgcctgcctgaggaagcaaggcatcgtagagtttttgaaatggttgaagctctccaggaacatcctcgcgatcccaatcaaatcttgatagggtactcaaggggactcgtggtcatttgggacttgcaggggtctagggtcctgtatcactttctctcttctcagcagctggagaatatctggtggcagcgcgatgggcggctcctggtgagctgtcactcagatggctcttattgtcagtggcccgtgtcttcagaggctcagcagccagagcctcttcggtcattggttccttacggcccattcccttgcaaagcgattacaagaatcctttggctcaccacacgccagggtctgccctttacaatttttcagggtggcatgcccagagccagttacggcgacaggcattgtatcagcgtgatccatgacggccagcaaacagctttcgactttaccagccgcgtaatcggcttcacagtgttaactgaagctgaccccgctgcaacctttgacgacccctatgcactcgtagttctggccgaagaggagctggtggtcattgacctccagaccgctggctggcctccagtgcaactgccatacctcgccagcctgcactgcagtgccattacctgctcacaccatgtctccaacatccctcttaagctctgggaacgaatcatcgccgccggctcaaggcaaaatgcccatttctccaccatggaatggcccattgacgggggaacctcgcttactcctgctccaccgcagcgcgatcttctccttactggacacgaggatgggacagtccgattttgggatgcctcaggcgtctgcctccgcttgttgtataagctgtcaactgtgagagtgttcttgactgataccgatcctaatgaaaacttcagcgctcagggcgaagacgagtggccgccattgaggaaggtcggatctttcgacccctactcagatgatcctagactcgggatccagaagatcttcttgtgtaaatactctggttatctcgcagtggcagggaccgcaggccaggtgcttgtgcttgagctgaatgacgaagctgctgaacaggctgtggaacaggtagaggctgaccttctgcaggatcaagaagggtacagatggaaggggcacgaaagactggcagcccgctctgggccagtgcgatttgagccaggattccaaccttttgtgctcgtgcagtgccagccccccgccgtagttaccagcttagctttacattccgaatggcgactggttgccttcggtacctcccatggatttggactgttcgaccaccaacaacgacgccaggttttcgtgaaatgcaccctccacccttcagatcagttagctcttgaaggtccactgagcagagtcaaatccctgaaaaaaagcttgagacaatcgttccgacggatgcgcagaagcagggtatcaagccgtaagagacatcctgccgggccgccaggtgaagcccaggagggtagcgccaaagcagagcggcctgggctccagaacatggaacttgccccagtgcagagaaaaatcgaggccagaagcgcagaagatagcttcaccggattcgtgcggaccctgtatttcgccgatacctatcttaaagattcaagtcgacattgtccctctctttgggctggcactaacggcgggaccatatacgcattctccctgagggttcctcccgcagaacggagaatggatgaacctgtgcgggcagagcaagccaaggaaatccagctcatgcatcgggcgcccgttgtcggcatcctggtcctcgacgggcactcggtcccccttccagagcccctggaagtggcgcacgacctttccaagtcccccgacatgcaagggagtcaccagctgctcgttgtctcggaggagcagtttaaagttttcactttgcccaaggtaagtgccaaacttaagctgaagctcaccgccctggaaggcagtcgcgtccgaagagtgtccgtcgcccacttcgggtctaggcgcgcagaagattacggggagcatcatcttgccgtgctgaccaacctgggcgacattcaggtggtgagcctgccacttctcaaaccacaagttcgctactcatgtatacgcagggaagacgtgtcaggcatcgcgtcctgtgtgtttactaaatacgggcagggattctatcttattagtccatctgagtttgagagatttagccttagcacaaaatggttggttgaaccccgatgcctcgtcgattcagctgaaacgaagaaccacagacccggaaacggtgcaggccccaagaaggccccctcacgggctcggaacagcggcacccagtctgacggcgaggagaaacagcccggactcgttatggagagggcattgctcagcgatgagcgcgccgctaccggcgtgcatatcgaaccaccgtggggtgcggccagcgccatggccgagcagtcggagtggctgtcagttcaggctgcccgctag

SEQ ID NO: 147107 - DNA, 3048 bp, Artificial Sequence
  derived and/or modified sequence
atgcgccgcttcttgagacccggccacgatcccgtgcgtgagcggctcaagagagatctatttcagtttaacaagacagtggaacatggctttccccaccagccctctgctctcggctattctccttctctccggatccttgcgataggtacgcgtagtggtgcgatcaagctctacggcgcgccaggcgtggagtttatgggccttcatcaggaaaacaatgctgtgactcagatccacctgctccccggtcagtgccaattggtgactcttctggacgataattccttgcatctttggtcattgaaggtgaaggggggagcgtcagagctccaagaggatgagtctttcacccttaggggccctcccggagccgcccctagcgccacccagatcaccgtagttctacctcattcctcctgcgaattgctgtacctgggcacagaatccggaaacgtcttcgtggttcaacttcctgcattccgcgcgcttgaagaccgcaccatcagtagtgatgcagtgcttcagcgccttccagaagaagcaagacaccggagagttttcgaaatggttgaggctctacaggagcatcctcgggatccgaaccagattctaatcggctactctaggggactggtcgtgatctgggaccttcagggttcacgcgtgctgtaccattttctttcttcccagcaattggaaaacatatggtggcagagggatggacgacttctggtgtcgtgccacagtgatggcagttattgtcagtggccagttagttccgaggcacagcagcctgagccactccgttccctggtaccctatggcccatttccttgcaaagctattacacggatcctatggctaaccacacgacaaggcttgcccttcactatcttccagggaggaatgccccgggctagttatggtgacagacattgcatctctgtgatccacgatggtcagcagaccgcgttcgattttacatccagagttattggcttcacagttctaaccgaagccgatccagctgccacatttgatgacccttacgctctggtggtgctcgccgaggaagaattagttgtaattgacctgcagactgctgggtggccccccgtgcagttgccttatctagcatcactgcattgctcagctattacctgctctcaccacgtcagtaatatcccactgaaattgtgggaacgcatcatcgctgccggctctcggcagaacgctcatttctccacaatggaatggccgattgacggaggtaccagtcttactcctgcccccccacagcgcgacctgctgctgaccggacacgaggatgggaccgtgagattttgggacgctagtggggtatgcctgcgactcttgtataagctctctaccgtcagagtttttctgaccgataccgatcccaacgaaaacttttctgcccaaggtgaggacgaatggccaccccttcgtaaggtaggaagcttcgacccctattctgacgatccacgactgggcattcagaaaatttttttatgtaagtatagtggttatcttgcagtcgccggaaccgcaggacaggtgctggtgttagagttaaacgatgaggctgccgaacaggctgtggaacaagtcgaagccgaccttttacaggatcaagagggataccgatggaagggccacgagcgtctggctgccagatctggaccagtgagattcgaaccaggcttccaacccttcgtcttagttcagtgtcagcccccagccgtggtgacctccctagccttgcactctgaatggcgactggttgccttcggtacctcccatggatttggactgttcgaccaccaacaacgacgccaggttttcgtgaaatgcaccctccacccttcagatcagttagctcttgaaggtccactgagcagagtcaaatccctgaaaaaaagcttgagacaatcgttccgacggatgcgcagaagcagggtatcaagccgtaagagacatcctgccgggccgccaggtgaagcccaggagggtagcgccaaagcagagcggcctgggctccagaacatggaacttgccccagtgcagagaaaaatcgaggctcgttccgcagaggattcattcaccggttttgtccgcaccctgtatttcgccgatacttatctcaaggattccagcaggcattgtcccagtctatgggccggaaccaatggcggtacaatctacgcctttagtctgagagttcccccagccgagcggagaatggacgagccagttagggctgaacaggcgaaagaaatccagctgatgcacagagcccccgtggtcggaatacttgtgctggacggccacagcgtgcctctccccgaacctctggaagtcgcgcacgatctgagtaaaagtcctgacatgcagggttcccatcaactattggtcgtgagtgaggagcaatttaaggtgttcacactgccaaaagtgtctgcaaaactaaaactaaaattaaccgcactggaaggaagccgcgtcagacgagtctcagtcgcacactttggctcccggagggccgaggactacggtgaacaccacctcgcagtgctcactaatctgggcgacatccaggttgttagccttccgttactgaaaccccaggtacgatactcatgcataagacgggaggatgtgagcggtattgctagttgtgtgtttaccaaatacggccagggcttctatctgatcagtccctcagaattcgagagatttagtctcagcaccaagtggttggtagagccaagatgtctcgtggactcagcggagaccaagaaccacaggccagggaacggtgccgggcccaaaaaagccccttcaagagccaggaacagtggaactcagtctgatggcgaagagaagcagcctggtttagttatggagagagccttactatctgacgaacgagccgcaacgggcgtgcacattgaacctccttggggagctgctagtgctatggccgaacagagcgaatggttaagcgtccaagcagcccggtag

SEQ ID NO: 147108 - DNA, 3048 bp, Artificial Sequence
  derived and/or modified sequence
atgagaagattcctgagacccggccacgaccccgtgagagagagactgaagagagacctgttccagttcaacaagaccgtggagcacggcttcccccaccagcccagcgccctgggctacagccccagcctgagaatcctggccatcggcaccagaagcggcgccatcaagctgtacggcgcccccggcgtggagttcatgggcctgcaccaggagaacaacgccgtgacccagatccacctgctgcccggccagtgccagctggtgaccctgctggacgacaacagcctgcacctgtggagcctgaaggtgaagggcggcgccagcgagctgcaggaggacgagagcttcaccctgagaggcccccccggcgccgcccccagcgccacccagatcaccgtggtgctgccccacagcagctgcgagctgctgtacctgggcaccgagagcggcaacgtgttcgtggtgcagctgcccgccttcagagccctggaggacagaaccatcagcagcgacgccgtgctgcagagactgcccgaggaggccagacacagaagagtgttcgagatggtggaggccctgcaggagcaccccagagaccccaaccagatcctgatcggctacagcagaggcctggtggtgatctgggacctgcagggcagcagagtgctgtaccacttcctgagcagccagcagctggagaacatctggtggcagagagacggcagactgctggtgagctgccacagcgacggcagctactgccagtggcccgtgagcagcgaggcccagcagcccgagcccctgagaagcctggtgccctacggccccttcccctgcaaggccatcaccagaatcctgtggctgaccaccagacagggcctgcccttcaccatcttccagggcggcatgcccagagccagctacggcgacagacactgcatcagcgtgatccacgacggccagcagaccgccttcgacttcaccagcagagtgatcggcttcaccgtgctgaccgaggccgaccccgccgccaccttcgacgacccctacgccctggtggtgctggccgaggaggagctggtggtgatcgacctgcagaccgccggctggccccccgtgcagctgccctacctggccagcctgcactgcagcgccatcacctgcagccaccacgtgagcaacatccccctgaagctgtgggagagaatcatcgccgccggcagcagacagaacgcccacttcagcaccatggagtggcccatcgacggcggcaccagcctgacccccgcccccccccagagagacctgctgctgaccggccacgaggacggcaccgtgagattctgggacgccagcggcgtgtgcctgagactgctgtacaagctgagcaccgtgagagtgttcctgaccgacaccgaccccaacgagaacttcagcgcccagggcgaggacgagtggccccccctgagaaaggtgggcagcttcgacccctacagcgacgaccccagactgggcatccagaagatcttcctgtgcaagtacagcggctacctggccgtggccggcaccgccggccaggtgctggtgctggagctgaacgacgaggccgccgagcaggccgtggagcaggtggaggccgacctgctgcaggaccaggagggctacagatggaagggccacgagagactggccgccagaagcggccccgtgagattcgagcccggcttccagcccttcgtgctggtgcagtgccagccccccgccgtggtgaccagcctggccctgcacagcgagtggagactggtggccttcggcaccagccacggcttcggcctgttcgaccaccagcagagaagacaggtgttcgtgaagtgcaccctgcaccccagcgaccagctggccctggagggccccctgagcagagtgaagagcctgaagaagagcctgagacagagcttcagaagaatgagaagaagcagagtgagcagcagaaagagacaccccgccggcccccccggcgaggcccaggagggcagcgccaaggccgagagacccggcctgcagaacatggagctggcccccgtgcagagaaagatcgaggccagaagcgccgaggacagcttcaccggcttcgtgagaaccctgtacttcgccgacacctacctgaaggacagcagcagacactgccccagcctgtgggccggcaccaacggcggcaccatctacgccttcagcctgagagtgccccccgccgagagaagaatggacgagcccgtgagagccgagcaggccaaggagatccagctgatgcacagagcccccgtggtgggcatcctggtgctggacggccacagcgtgcccctgcccgagcccctggaggtggcccacgacctgagcaagagccccgacatgcagggcagccaccagctgctggtggtgagcgaggagcagttcaaggtgttcaccctgcccaaggtgagcgccaagctgaagctgaagctgaccgccctggagggcagcagagtgagaagagtgagcgtggcccacttcggcagcagaagagccgaggactacggcgagcaccacctggccgtgctgaccaacctgggcgacatccaggtggtgagcctgcccctgctgaagccccaggtgagatacagctgcatcagaagagaggacgtgagcggcatcgccagctgcgtgttcaccaagtacggccagggcttctacctgatcagccccagcgagttcgagagattcagcctgagcaccaagtggctggtggagcccagatgcctggtggacagcgccgagaccaagaaccacagacccggcaacggcgccggccccaagaaggcccccagcagagccagaaacagcggcacccagagcgacggcgaggagaagcagcccggcctggtgatggagagagccctgctgagcgacgagagagccgccaccggcgtgcacatcgagcccccctggggcgccgccagcgccatggccgagcagagcgagtggctgagcgtgcaggccgccagatag

SEQ ID NO: 147109 - DNA, 3015 bp, Artificial Sequence
  derived and/or modified sequence
atgcacggcagctgctgcctgggcggcggccagcccctgagcgtgttcgccagcctgcacatgggccccgagggcctggccctgaaggccggcagaggctggtgccccaccttccagagcttccccgagcccacccccagctacggcgcccccggcgtggagttcatgggcctgcaccaggagaacaacgccgtgacccagatccacctgctgcccggccagtgccagctggtgaccctgctggacgacaacagcctgcacctgtggagcctgaaggtgaagggcggcgccagcgagctgcaggaggacgagagcttcaccctgagaggcccccccggcgccgcccccagcgccacccagatcaccgtggtgctgccccacagcagctgcgagctgctgtacctgggcaccgagagcggcaacgtgttcgtggtgcagctgcccgccttcagagccctggaggacagaaccatcagcagcgacgccgtgctgcagagactgcccgaggaggccagacacagaagagtgttcgagatggtggaggccctgcaggagcaccccagagaccccaaccagatcctgatcggctacagcagaggcctggtggtgatctgggacctgcagggcagcagagtgctgtaccacttcctgagcagccagcagctggagaacatctggtggcagagagacggcagactgctggtgagctgccacagcgacggcagctactgccagtggcccgtgagcagcgaggcccagcagcccgagcccctgagaagcctggtgccctacggccccttcccctgcaaggccatcaccagaatcctgtggctgaccaccagacagggcctgcccttcaccatcttccagggcggcatgcccagagccagctacggcgacagacactgcatcagcgtgatccacgacggccagcagaccgccttcgacttcaccagcagagtgatcggcttcaccgtgctgaccgaggccgaccccgccgccaccttcgacgacccctacgccctggtggtgctggccgaggaggagctggtggtgatcgacctgcagaccgccggctggccccccgtgcagctgccctacctggccagcctgcactgcagcgccatcacctgcagccaccacgtgagcaacatccccctgaagctgtgggagagaatcatcgccgccggcagcagacagaacgcccacttcagcaccatggagtggcccatcgacggcggcaccagcctgacccccgcccccccccagagagacctgctgctgaccggccacgaggacggcaccgtgagattctgggacgccagcggcgtgtgcctgagactgctgtacaagctgagcaccgtgagagtgttcctgaccgacaccgaccccaacgagaacttcagcgcccagggcgaggacgagtggccccccctgagaaaggtgggcagcttcgacccctacagcgacgaccccagactgggcatccagaagatcttcctgtgcaagtacagcggctacctggccgtggccggcaccgccggccaggtgctggtgctggagctgaacgacgaggccgccgagcaggccgtggagcaggtggaggccgacctgctgcaggaccaggagggctacagatggaagggccacgagagactggccgccagaagcggccccgtgagattcgagcccggcttccagcccttcgtgctggtgcagtgccagccccccgccgtggtgaccagcctggccctgcacagcgagtggagactggtggccttcggcaccagccacggcttcggcctgttcgaccaccagcagagaagacaggtgttcgtgaagtgcaccctgcaccccagcgaccagctggccctggagggccccctgagcagagtgaagagcctgaagaagagcctgagacagagcttcagaagaatgagaagaagcagagtgagcagcagaaagagacaccccgccggcccccccggcgaggcccaggagggcagcgccaaggccgagagacccggcctgcagaacatggagctggcccccgtgcagagaaagatcgaggccagaagcgccgaggacagcttcaccggcttcgtgagaaccctgtacttcgccgacacctacctgaaggacagcagcagacactgccccagcctgtgggccggcaccaacggcggcaccatctacgccttcagcctgagagtgccccccgccgagagaagaatggacgagcccgtgagagccgagcaggccaaggagatccagctgatgcacagagcccccgtggtgggcatcctggtgctggacggccacagcgtgcccctgcccgagcccctggaggtggcccacgacctgagcaagagccccgacatgcagggcagccaccagctgctggtggtgagcgaggagcagttcaaggtgttcaccctgcccaaggtgagcgccaagctgaagctgaagctgaccgccctggagggcagcagagtgagaagagtgagcgtggcccacttcggcagcagaagagccgaggactacggcgagcaccacctggccgtgctgaccaacctgggcgacatccaggtggtgagcctgcccctgctgaagccccaggtgagatacagctgcatcagaagagaggacgtgagcggcatcgccagctgcgtgttcaccaagtacggccagggcttctacctgatcagccccagcgagttcgagagattcagcctgagcaccaagtggctggtggagcccagatgcctggtggacagcgccgagaccaagaaccacagacccggcaacggcgccggccccaagaaggcccccagcagagccagaaacagcggcacccagagcgacggcgaggagaagcagcccggcctggtgatggagagagccctgctgagcgacgagagagccgccaccggcgtgcacatcgagcccccctggggcgccgccagcgccatggccgagcagagcgagtggctgagcgtgcaggccgccagatag

SEQ ID NO: 147110 - DNA, 3015 bp, Artificial Sequence
  derived and/or modified sequence
atgcatggctcatgctgcctgggcggcggccaacccttaagtgtctttgctagcctccacatgggccccgagggtttggccctgaaggccgggcgaggctggtgcccaacttttcaatcattccctgagcccacacccagttatggggccccaggcgtagagttcatgggtttacatcaggaaaataatgcggttacccagatccatttgttacccgggcagtgccagctggtcactctcttagatgataattcactgcacttatggagtctgaaggtgaagggcggcgcttccgaattgcaggaggacgagagtttcactctcagagggcctcccggtgctgctccctccgcgactcaaatcacagtggtattaccccacagctcttgcgaattgctgtacttagggaccgagagcggtaatgtgtttgtagtccagcttcccgcgtttcgggccttggaagatcgtacaataagctccgatgctgttttacaaaggctccccgaagaggccagacaccggagggtgttcgaaatggtcgaggccctgcaagagcaccctagagacccaaatcagatccttatcggctattcacgcggcttggtggtcatttgggacctgcaaggctcacgcgttctctaccactttctgagctcacaacaactagaaaacatctggtggcagcgggacggaagactcttggtatcttgccactcagatggctcttattgccaatggcctgtcagcagtgaggcccagcagcctgaacctttgcggtcgttggtaccatacggtcctttcccatgcaaggcaatcacacggatactgtggctgacaacacgccaaggtctgcccttcacaattttccagggtgggatgcccagggcctcctatggcgaccgacattgcataagcgtaattcacgacggtcagcaaactgcctttgacttcacatctcgggttatcgggttcacggtactgactgaggctgatccagcagcaacatttgatgatccttatgccctcgtggtgctcgccgaagaggagctcgttgtgatcgacctccagaccgctggctggcccccggtgcagctgccctatctcgcctctctccactgttccgccatcacgtgttctcaccatgtgtctaatatacccttaaaactgtgggaacgcattatcgctgctggatcgcgtcagaacgcacatttttccacaatggaatggcccatagacggcggaacatccttgacccccgcccccccccagagggacttattactgacaggccacgaggatggtaccgtgcggttctgggacgcctctggagtgtgcctacggttactttacaaattgagcaccgtccgcgtattcttgaccgacactgatcccaacgaaaatttctccgctcaaggtgaggacgaatggcctcccttaagaaaggtggggtcttttgatccatactccgatgacccccgcctcggcattcagaagattttcctctgtaagtatagcggctacctagctgttgctgggacagccggtcaggtgttggtactggagttgaacgatgaagcagcagaacaagcggtggaacaagtggaggccgatcttctccaggaccaagagggatacagatggaagggccacgagcggttagcagcccggtcgggtcctgttcggttcgaacctggctttcagccatttgtcttagtgcagtgccagccaccagctgtagtgacatcattggcacttcacagtgaatggagattggttgctttcggaaccagtcatggtttcggactattcgatcatcaacagcgaagacaggtgttcgtaaagtgcactctccatccctccgatcagctagcccttgaggggccactgtcgagggtgaaaagccttaagaagagtctgcgacagagctttaggagaatgaggaggtctcgtgtttcctcacgcaagcgccaccccgcagggcctcccggcgaggcacaggagggttccgctaaagccgagcgacccggactgcagaatatggaattggctccagtccagaggaagattgaggctcggagcgccgaagactctttcaccggcttcgtccgcactctgtatttcgctgatacctatcttaaggattcaagcagacactgtccttccttgtgggcaggcacgaacggcgggactatttacgcattcagtcttcgcgtgccacccgcagagaggaggatggacgagcctgtgagggctgagcaggctaaggagattcaattgatgcatcgcgccccagtggtgggtatcctggttctcgatggccactccgttcccctgcctgagcctctggaggtggcccacgatctgagtaagtccccggatatgcaagggagccaccagctcctcgttgtgtctgaagaacagttcaaagtcttcacgttgcctaaggtgagtgctaaattaaaattgaagttgacagccctggagggctcccgggtaaggcgagtgagcgtggctcacttcggaagccggagggccgaagattacggcgaacatcatctggccgtgttaacaaacctcggtgatatacaggtagtgagtttgcccttgctgaagccacaggttaggtattcatgtattagacgggaggatgtgagtggtattgcctcatgtgtatttacaaaatatggtcaggggttctacctcatctcgccctccgaattcgagaggttctcgctatctacaaaatggctcgtcgagccaaggtgtctcgtggacagcgcagaaacaaaaaaccatcgcccaggcaacggggcggggccaaaaaaggcaccatcccgggccagaaattccggaactcagagtgacggtgaagagaaacagcctggcttagtcatggagagggcacttctgtctgatgaacgcgccgcaacaggagtgcatatcgaacctccatggggtgctgcctctgcaatggcagaacaatcagaatggctgagcgttcaggcagcgcgttag

SEQ ID NO: 147111 - DNA, 3015 bp, Artificial Sequence
  derived and/or modified sequence
atgcacggcagctgctgcctgggcggcggccagcccctgtctgtgtttgccagcctgcacatgggccctgagggcctggccctgaaggccggccggggctggtgccccaccttccagagcttccctgagcccacccccagctatggagcccctggggtggagttcatgggcctgcaccaggagaacaatgctgtgacccagatccacctgctgcccggccagtgccagctggtgaccctgctggatgacaacagcctgcacctgtggagcctgaaggtgaagggcggggccagcgagctgcaggaggatgagagcttcaccctgcggggccccccaggggccgcccccagcgccacccagatcaccgtggtgctgccccacagcagctgtgagctgctgtacctgggcacagaaagtggaaatgtgtttgtggtgcagctgcctgccttccgggccctggaggacaggaccatcagcagtgatgctgtgctgcagaggctgcctgaggaggcccggcaccggcgggtgtttgagatggtggaggccctgcaggagcacccccgggaccccaaccagatcctgattggctacagccggggcctggtggtgatctgggacctgcagggcagccgggtgctgtaccacttcctgagcagccagcagctggagaacatctggtggcagagagatggccgcctgctggtgtcctgccacagtgatggcagctactgccagtggcctgtgagcagcgaggcccagcagcctgagcccctgcggagcctggtgccctacggccccttcccctgcaaggccatcacccgcatcctgtggctgaccacccggcagggcctgcccttcaccatcttccagggcggcatgccccgggccagctatggagacagacactgcatcagcgtcatccatgatggccagcagacagcctttgacttcaccagcagggtcatcggcttcaccgtgctgacagaggccgaccctgctgccacctttgatgacccctatgccctggtggtgctggccgaggaggagctggtggtgattgacctgcagacagctggctggccccctgtgcagctgccctacctggccagcctgcactgcagcgccatcacctgcagccaccacgtgagcaacatccccctgaagctgtgggagcgcatcatcgccgccggcagccggcagaatgcccacttcagcaccatggagtggcccattgatggcggcaccagcctgaccccagccccaccccagagggacctgctgctgactggacatgaagatggcaccgtgcgcttctgggatgccagcggcgtgtgcctgcggctgctgtacaagctgagcacagtgcgggtcttcctgacagacacagaccccaatgaaaacttcagcgcccagggagaagatgagtggccacccctgaggaaggtgggcagctttgacccctacagtgatgacccccggctgggcatccagaagatcttcctgtgcaagtacagcggctacctggccgtggccggcacagctggccaggtgctggtgctggagctgaatgatgaggccgctgagcaggccgtggagcaggtggaggccgacctgctgcaggaccaggagggctaccgctggaagggccacgagcggctggccgcccggagcggccctgtgcgctttgagcccggcttccagccctttgtgctggtgcagtgccagcccccagctgtggtgaccagcctggccctgcacagcgagtggaggctggtggccttcggcaccagccacggcttcggcctgtttgaccaccagcagaggcggcaggtgtttgtgaagtgcaccctgcaccccagcgaccagctggccctggagggccccctgagccgggtgaagagcctgaagaagagcctgcggcagagcttccggaggatgagaagaagccgggtgagcagcaggaagaggcaccctgctggccccccaggagaggcccaggagggcagcgccaaggccgagaggcctggcctgcagaacatggagctggcccctgtgcagaggaagattgaggcccggtctgcagaagattccttcaccggctttgtgaggaccctgtactttgctgacacctacctgaaggacagcagccgccactgccccagcctgtgggccggcaccaatggaggcaccatctatgccttcagcctgcgggtgcccccagctgagaggaggatggatgagcctgtgcgggcagagcaggccaaggagatccagctgatgcaccgggcccctgtggtgggcatcctggtgctggatggccacagcgtgcccctgcctgagcccctggaggtggcccatgacctgagcaagagcccagacatgcagggcagccaccagctgctggtggtgtctgaggagcagttcaaggtgttcaccctgcccaaggtgtctgccaagctgaagctgaagctgacagccctggagggcagccgggtgagaagagtgtctgtggcccacttcggcagcagaagagctgaggactatggagagcaccacctggccgtgctgaccaacctgggggacatccaggtggtgtccctgcccctgctgaagccccaggtgcgctacagctgcatccggcgggaggatgtgtctggaattgccagctgtgtgttcaccaagtatggccagggcttctacctgatcagccccagcgagtttgagcgcttcagcctgagcaccaagtggctggtggagccccgctgcctggtggacagcgctgagaccaagaaccacaggcctggaaatggagctggccccaagaaggcccccagccgggccaggaacagcggcacccagagtgatggagaggagaagcagcccggcctggtgatggagcgggccctgctgagtgatgaaagagctgccactggagtgcacatcgagcccccctggggcgccgccagcgccatggccgagcagagcgagtggctgtctgtgcaggccgccaggtag

SEQ ID NO: 147112 - DNA, 3518 bp, Artificial Sequence
  derived and/or modified sequence
cacaggtgctaccaagcgacagccaacatgtcttttgcagctcaggatcagggtggcagcctgacagttgccagggtagggcttcgcctttctatggagttgctcccaccggcctgactgggaaaaatctcccagggatcaggtcactggcctggtgccccagggccagggctgctgtgtctcctccccaccctaggctccatgcatgggtcctgctgcctcgggggagggcagcccctctctgtgtttgcatcattgcacatgggccccgagggcctggcactcaaggcaggcaggggatggtgtccgaccttccagagctttcctgagcctactcctagctacggagccccaggcgtggagttcatggggctgcaccaggagaacaacgctgtgacgcagatccacctcctgcccggccagtgccagctggtcaccctgctggatgacaacagcctgcacctttggagcctgaaggtcaagggcggggcatcggagctgcaggaggatgagagcttcacactgcgtggacccccaggggctgcccccagtgccacacagatcaccgtggtcctgccacattcctcctgcgagctgctctacctgggcaccgagagtggcaacgtgtttgtggtgcagctgccagcttttcgtgcgctggaggaccggaccatcagctcggacgcggtgctgcagcggttgccagaggaggcccgccaccggcgtgtgttcgagatggtggaggcactgcaggagcaccctcgagaccccaaccagatcctgatcggctacagccgaggcctcgttgtcatctgggacctacagggcagccgcgtgctctaccacttcctcagcagccagcaactggagaacatctggtggcagcgggacggccgcctgctcgtcagctgtcactctgacggcagctactgccagtggcccgtgtccagcgaagcccagcaaccagagcccctccgcagcctcgtgccttacggtccctttccttgcaaagcgattaccagaatcctctggctgaccactaggcaggggttgcccttcaccatcttccagggtggcatgccacgggccagctacggggaccgccactgcatctcagtgatccacgatggccagcagacggccttcgacttcacctcccgtgtcatcggcttcactgtcctcacagaggcagaccctgcagccacctttgacgacccctatgccctggtggtgctggctgaggaggagctggtggtgattgacctgcagacagcaggctggccaccggtccagctgccctacctggcttctctgcactgttccgccatcacctgctctcaccacgtctccaacatcccgctgaagctgtgggagcggatcattgccgccggcagccggcagaacgcacacttctccaccatggagtggccaattgatggtggcaccagcctgaccccagccccaccccagagggacctgctgctcacagggcacgaggacggcacggtgcggttctgggatgcctcgggtgtctgcctgcggctgctctacaaactcagcactgtgcgcgtgttcctcaccgacacggaccccaacgagaacttcagtgcccagggcgaggacgagtggcccccactccgcaaggtgggctcctttgacccctacagtgatgacccccggctgggcatccagaagatcttcctctgcaagtacagcggctacctggctgtggcaggcacggcagggcaggtgctggtactggaactgaatgacgaggcagcggagcaggctgtggagcaggtggaggccgacctgctgcaggaccaagagggctaccgctggaaggggcacgagcgcctggcagcccgctcagggcccgtgcgctttgagcctggctttcagcccttcgtgttggtgcagtgtcagcccccggctgtggtcacctccttggccctgcactctgagtggcggctcgtggccttcggcaccagccatggctttggcctctttgaccaccagcagcggcggcaggtctttgttaagtgcacactgcaccccagtgaccagctggccttggagggcccactctcccgcgtcaagtccctcaagaagtccttgcgtcagtcattccgccggatgcgtcggagccgggtgtccagccggaagcggcacccggctggccccccaggagaggcacaggaggggagtgccaaggctgagcggccaggcctccagaacatggagctggcgcctgtgcagcgcaagatcgaggctcgctcggcagaggactccttcacaggcttcgtccggaccctgtactttgctgacacctacctgaaggacagctcccggcactgcccctcgctgtgggctggcaccaatgggggcaccatctatgccttctccctgcgtgtgcctcccgccgagcggagaatggatgagcctgtgcgggcagagcaggccaaggagatccagctgatgcaccgggcgccggtggtgggcatcctggtgctcgacggacacagcgtaccccttcccgagcccctcgaagtggcccatgatctgtcgaagagccctgacatgcagggaagccaccagctgctcgtcgtatcagaggagcagttcaaggtgttcacgctgcccaaggtgagtgccaagctgaagttgaagctgacggccctggagggctcaagagtgcggcgggtcagcgtggcccacttcggcagtcgtcgagccgaggactacggggagcaccacctggcagtccttaccaacctgggcgacatccaggtggtctcgctgcccctgctcaagccccaggtgcgctacagctgcatccgccgggaggacgtcagtggcatcgcctcctgcgtcttcaccaaatatggccaaggcttctacctgatctcaccctcggagtttgagcgcttctctctctccaccaagtggctggtggagccccggtgtctggtggattcagcagaaaccaagaaccaccgccctggtaacggtgcgggccccaagaaggccccgagccgagccaggaactcagggactcagagtgatggcgaggagaagcagcccggcctggtgatggagcgcgctctgctcagtgatgagagagcggcaactggcgttcacatcgagccgccgtggggtgcagcctcagcaatggcggagcagagtgagtggctgagcgtccaggctgcgcgatgagcacacactactactgatggcctttcgggggtccctgccccaaccggagaggccggtgcacagggccccgccaggggctgggggcatcccggcttccacaatgcagctgctctgggcctcgggagaggagagaccccagtcccctgggctgcccttcccgggcctcgtctgtctgggtcctttggtcaatgttgcacagtttttattgctcccatccctttttgtagtgggctgggttttaagttataaatgttaactgcctctgggtgaaaaagtttttaataaacacctattacctcttg

SEQ ID NO: 147113 - DNA, 3015 bp, Artificial Sequence
  derived and/or modified sequence
atgcacggcagctgctgcctgggcggcggccagcccctgagcgtgtttgcatcccttcatatgggcccggagggtctggccctgaaagccggaagaggatggtgccctaccttccagtcattcccggagcctacccctagttacggtgcacccggagtggaatttatggggttgcaccaggaaaacaatgctgtcacccagattcacctcctcccaggccagtgccagctagtgaccctgctggacgacaacagcctgcatttatggtccttaaaggtgaaggggggcgcttcggagctgcaggaggacgagtcctttactctccggggtcccccaggcgctgcccccagtgcaacccagatcaccgtggtcctgccacactcctcttgtgaactgttataccttggcaccgagtctggtaatgttttcgtggtgcagctgcctgctttcagggcgttagaggaccggacaatcagcagcgatgcagtgctccagagacttccagaggaggccagacaccgacgggttttcgagatggtcgaagcactgcaagaacatccacgcgatccaaaccaaatattgatagggtactcccgtggattggtggttatttgggacttacagggaagtagggtcttataccactttctgtcttcccagcagctggaaaacatatggtggcagagagatggtcggttgcttgtgtcttgccactctgatggctcatattgccagtggcccgtgtctagcgaggcccagcagcccgaacccctcagatctctcgtgccatatggcccctttccgtgtaaggctattacccgcatcctctggctcacaacaagacaggggctgcctttcacaattttccagggcggcatgccccgagctagttacggtgatagacattgtatcagcgtcatacacgatggacaacagacggccttcgattttacctcccgcgtcatcgggtttaccgtgctgaccgaggctgacccagctgccaccttcgacgacccatacgccctggtcgtcctggctgaggaagagctggtggtcatcgatctgcagaccgcgggatggcctccggttcaattaccatacctggcgtcgctgcactgttccgctatcacctgctcgcaccatgtcagcaacatccccctaaagctgtgggaacgcattatcgccgcagggtccagacagaacgcacacttttccacaatggaatggcccatagacggcggcacatcactcactccagcccctccgcagcgcgatttacttttgaccgggcatgaggatggaacagttaggttctgggacgcctccggggtctgcctgagactgctttacaaactgtcgactgtgcgggttttccttaccgacaccgacccgaacgagaatttttctgcccagggtgaagatgaatggccccctctgcgcaaagtggggagttttgacccctattcagatgaccctcgactcgggattcagaaaatctttttgtgcaagtattctggctatttggcggtagctggcactgctgggcaggtgctcgtcctggagctcaacgatgaggccgccgaacaagccgtagagcaagttgaggctgacctgctgcaggaccaggaggggtaccgctggaaggggcacgaacgcctggcggcaaggagcgggccagtccgctttgaacccgggttccagccatttgtgctggtacagtgccaaccacctgctgtagtgactagcctcgcgctgcattctgagtggcgtttggttgcatttggcacttcccacggattcgggctctttgatcaccaacaaagacgccaagtgtttgtaaaatgcacgcttcacccttcagatcagttggccctggaaggtccactgtctagagttaaaagcttaaaaaagtccctgcgtcagagcttccgacgaatgcgaaggagcagagtatcctcccggaaacggcatccggcagggccccctggcgaagcccaggaaggttcagctaaagctgagcgccctggcctgcaaaacatggagctggccccagtccaacgcaagattgaggcacgatctgccgaggatagctttaccgggtttgtcagaaccctgtactttgctgacacataccttaaagatagcagtagacattgtccctcactgtgggcagggactaacggcggcacaatctatgccttttcccttcgggtgccaccagcagagcggcgcatggatgagcccgtccgcgcggagcaggctaaagagatacaactgatgcaccgggcaccagttgtgggtatccttgtattggacgggcactctgtgcccttgcctgaacctttggaagttgcccatgacctgagtaaatcccctgatatgcaaggtagccaccagttgctagtcgtcagtgaagaacagttcaaggtttttacgttgcctaaggtcagcgcgaagctgaaactgaagttgacagctctagagggaagtagagtgcggagagtttccgtggctcacttcggatccaggcgcgctgaggattatggggaacatcaccttgccgtgttaaccaatttaggcgacattcaggtggtcagtttgcccctgctgaagcctcaggtgcgttactcatgcattcggcgcgaagatgtcagtggcattgcttcttgcgtcttcacgaagtacggccaaggattctacctaatttcacccagcgagtttgaacgattctctctcagcacaaagtggctggttgaacctaggtgcctggtggactccgctgagactaagaaccatcgcccagggaatggagccggtcctaaaaaggccccctcccgcgctcgaaatagtggaacccagtctgacggagaggaaaagcagccagggctcgtgatggaacgggctctgctcagcgacgaaagggctgcaaccggtgtccatattgagcctccctggggtgcggcatctgctatggctgagcagtctgagtggctttccgtgcaggccgccagatag

SEQ ID NO: 147114 - DNA, 3015 bp, Artificial Sequence
  derived and/or modified sequence
atgcatggaagctgctgcttaggtggaggccagcccttaagcgtgttcgcatcattacatatgggacccgaagggctcgcacttaaggctggcagaggctggtgccccacatttcagagtttccctgaacctaccccgtcttacggcgcaccaggagtcgagtttatgggactgcaccaagagaataacgccgtgacccagatacacttgcttcccggacaatgtcagctggtgactctgctggacgacaactcattgcacctgtggagcttgaaagtcaagggaggcgcatcagaacttcaagaggacgagagtttcacccttaggggcccaccgggagccgctccgtcggctacccagattactgtagtgctcccacattctagctgcgagctcttgtacctgggtacagagtcaggaaacgtattcgtggtgcaactacccgcttttcgggcactagaagaccgaaccatatcttcagatgcagtcttgcagcgcctccccgaggaggcgagacatcggagagtgttcgaaatggttgaagctctacaggaacaccccagagaccctaatcaaatcctgattggctacagccgcggtcttgtcgtcatttgggacttgcagggcagcagagtcctctaccatttcctgagcagccaacagctggagaatatctggtggcagcgagacggacggttgctggtgtcatgccattcggacgggagctattgccagtggccagtgagctctgaagcacagcagcctgaaccactccggagcctggtaccatacggcccattcccttgcaaagccattacacgcatactatggctcacaactcggcaggggctcccgtttaccatcttccagggtggcatgcctcgcgcaagctatggagaccggcactgcataagtgtgattcatgatggccagcagactgcattcgatttcacatcgcgggtgatcggtttcacagtgctgaccgaggcggacccggcagcaacttttgacgatccctatgccttagtggtgctggctgaagaagaactggtggtcatcgacttacaaactgctggttggccaccggtccaactgccctacctcgcgtccctgcattgctccgccatcacttgctctcaccacgtgagcaatattccactcaagctgtgggagcgcataattgccgcaggaagtcggcagaacgctcacttctccacgatggagtggcccatcgatggcggaacatcgctcacccctgctccaccacagcgtgacctgctgctcaccggacacgaagacggcacagtgaggttttgggatgccagcggagtctgtctgaggctgctttacaagctgtctacagtccgtgtattcctaacggacacagaccctaatgagaacttctctgctcagggagaggacgaatggccacccctgcgcaaagtgggctcttttgacccatactctgacgatcctaggctgggcattcagaaaattttcctgtgcaaatactctgggtatcttgcagtggccggtacggcagggcaggtgcttgttctcgagttgaatgacgaagcagccgaacaggccgtggaacaggtggaggccgaccttctacaggaccaggaaggctaccggtggaagggccatgaaaggttggccgctagatccggaccagttagatttgagcccggatttcagcccttcgtattggttcagtgtcagccccctgctgtcgtaacatcattagctctccacagtgaatggagattggtggcttttgggacatcccatggattcggcttgtttgatcatcagcagcgaaggcaggtgttcgtaaaatgtaccttacatccttcggaccagctagctttagagggccctctctcgcgcgtaaagtccctgaagaaaagtctgcggcagagctttaggagaatgagacggtcgcgagtcagtagtcgaaagaggcacccagctggccctcccggagaagcgcaagaaggaagtgccaaagctgagcgcccagggttgcaaaatatggagctggcgcctgtccaacggaaaatcgaggcaagaagtgcggaagattcatttacgggatttgtgcggaccctctatttcgctgacacttatctcaaggattcctctcgtcattgtccctcgctctgggctgggaccaatggtggaaccatctatgctttctctctccgcgtccctcccgctgaacgccgaatggatgaaccggtccgtgcggaacaggccaaggaaatccagctcatgcaccgcgcacctgtcgtgggaatcctggtcttggatggtcattcggtccctctgcccgaaccattggaagtggcacacgatctcagtaaatctcctgatatgcagggctctcatcagctactggtggtgagcgaggaacaatttaaagtgtttacactgcccaaagtgtctgccaagctgaagctgaagttaactgctttagaaggtagcagagtaaggagagttagtgtggcacacttcggttcaagacgcgcagaagactacggcgagcaccacctggccgtacttacaaatttgggcgatatacaagtggtctcgctccccttgctcaagcctcaggtcaggtactcgtgcatcagaagggaagacgtgagtggcattgctagctgtgtctttacaaaatacggtcagggcttttacctgatctcaccttcagagtttgaacgatttagcctctcgaccaagtggctggtggagccccgttgtctggtggatagcgctgaaacaaaaaaccaccggcctggcaacggcgctggcccaaaaaaggcacccagtcgcgcaaggaacagcggcacacagtctgacggagaagagaagcagccaggtctggtgatggaaagagcccttctgtctgatgaacgggctgctactggcgtgcatattgaaccaccttggggcgcagcctccgctatggccgaacaatccgaatggttaagcgttcaggccgctagatag

SEQ ID NO: 147115 - RNA, 3048 nt, Artificial Sequence
  derived and/or modified sequence
augcgacgcuuuuuaaggccgggccacgauccggugcgggagcgcuugaagagagacuuguuucaauuuaacaagacaguagaacacgguuucccucaucagcccagcgcucuaggcuauagccccucgcugcggauccucgccaucgggacccgcaguggagcaauuaaguuauauggagcaccaggcguggaguuuaugggauuacaucaggaaaacaaugccgucacucaaauccaccuccuccccgggcagugucagcucgucacccugcuggacgacaauagcuugcaucucuggucucuaaaggugaagggaggcgcuagcgagcugcaagaggacgagucuuucaccuugaggggaccucccggcgcagcuccaucugcgacacaaauaaccguuguguugccgcauaguuccugugaacugcuguaucucgggaccgagagcggcaacguuuuugugguccaacuuccagcauuucgcgcccuugaggauagaacgauuucauccgaugcugugcugcaacgccugccugaggaagcaaggcaucguagaguuuuugaaaugguugaagcucuccaggaacauccucgcgaucccaaucaaaucuugauaggguacucaaggggacucguggucauuugggacuugcaggggucuaggguccuguaucacuuucucucuucucagcagcuggagaauaucugguggcagcgcgaugggcggcuccuggugagcugucacucagauggcucuuauugucaguggcccgugucuucagaggcucagcagccagagccucuucggucauugguuccuuacggcccauucccuugcaaagcgauuacaagaauccuuuggcucaccacacgccagggucugcccuuuacaauuuuucaggguggcaugcccagagccaguuacggcgacaggcauuguaucagcgugauccaugacggccagcaaacagcuuucgacuuuaccagccgcguaaucggcuucacaguguuaacugaagcugaccccgcugcaaccuuugacgaccccuaugcacucguaguucuggccgaagaggagcugguggucauugaccuccagaccgcuggcuggccuccagugcaacugccauaccucgccagccugcacugcagugccauuaccugcucacaccaugucuccaacaucccucuuaagcucugggaacgaaucaucgccgccggcucaaggcaaaaugcccauuucuccaccauggaauggcccauugacgggggaaccucgcuuacuccugcuccaccgcagcgcgaucuucuccuuacuggacacgaggaugggacaguccgauuuugggaugccucaggcgucugccuccgcuuguuguauaagcugucaacugugagaguguucuugacugauaccgauccuaaugaaaacuucagcgcucagggcgaagacgaguggccgccauugaggaaggucggaucuuucgaccccuacucagaugauccuagacucgggauccagaagaucuucuuguguaaauacucugguuaucucgcaguggcagggaccgcaggccaggugcuugugcuugagcugaaugacgaagcugcugaacaggcuguggaacagguagaggcugaccuucugcaggaucaagaaggguacagauggaaggggcacgaaagacuggcagcccgcucugggccagugcgauuugagccaggauuccaaccuuuugugcucgugcagugccagccccccgccguaguuaccagcuuagcuuuacauuccgaauggcgacugguugccuucgguaccucccauggauuuggacuguucgaccaccaacaacgacgccagguuuucgugaaaugcacccuccacccuucagaucaguuagcucuugaagguccacugagcagagucaaaucccugaaaaaaagcuugagacaaucguuccgacggaugcgcagaagcaggguaucaagccguaagagacauccugccgggccgccaggugaagcccaggaggguagcgccaaagcagagcggccugggcuccagaacauggaacuugccccagugcagagaaaaaucgaggccagaagcgcagaagauagcuucaccggauucgugcggacccuguauuucgccgauaccuaucuuaaagauucaagucgacauugucccucucuuugggcuggcacuaacggcgggaccauauacgcauucucccugaggguuccucccgcagaacggagaauggaugaaccugugcgggcagagcaagccaaggaaauccagcucaugcaucgggcgcccguugucggcauccugguccucgacgggcacucggucccccuuccagagccccuggaaguggcgcacgaccuuuccaagucccccgacaugcaagggagucaccagcugcucguugucucggaggagcaguuuaaaguuuucacuuugcccaagguaagugccaaacuuaagcugaagcucaccgcccuggaaggcagucgcguccgaagaguguccgucgcccacuucgggucuaggcgcgcagaagauuacggggagcaucaucuugccgugcugaccaaccugggcgacauucagguggugagccugccacuucucaaaccacaaguucgcuacucauguauacgcagggaagacgugucaggcaucgcguccuguguguuuacuaaauacgggcagggauucuaucuuauuaguccaucugaguuugagagauuuagccuuagcacaaaaugguugguugaaccccgaugccucgucgauucagcugaaacgaagaaccacagacccggaaacggugcaggccccaagaaggcccccucacgggcucggaacagcggcacccagucugacggcgaggagaaacagcccggacucguuauggagagggcauugcucagcgaugagcgcgccgcuaccggcgugcauaucgaaccaccguggggugcggccagcgccauggccgagcagucggaguggcugucaguucaggcugcccgcuag

SEQ ID NO: 147116 - RNA, 3048 nt, Artificial Sequence
  derived and/or modified sequence
augcgccgcuucuugagacccggccacgaucccgugcgugagcggcucaagagagaucuauuucaguuuaacaagacaguggaacauggcuuuccccaccagcccucugcucucggcuauucuccuucucuccggauccuugcgauagguacgcguaguggugcgaucaagcucuacggcgcgccaggcguggaguuuaugggccuucaucaggaaaacaaugcugugacucagauccaccugcuccccggucagugccaauuggugacucuucuggacgauaauuccuugcaucuuuggucauugaaggugaaggggggagcgucagagcuccaagaggaugagucuuucacccuuaggggcccucccggagccgccccuagcgccacccagaucaccguaguucuaccucauuccuccugcgaauugcuguaccugggcacagaauccggaaacgucuucgugguucaacuuccugcauuccgcgcgcuugaagaccgcaccaucaguagugaugcagugcuucagcgccuuccagaagaagcaagacaccggagaguuuucgaaaugguugaggcucuacaggagcauccucgggauccgaaccagauucuaaucggcuacucuaggggacuggucgugaucugggaccuucaggguucacgcgugcuguaccauuuucuuucuucccagcaauuggaaaacauaugguggcagagggauggacgacuucuggugucgugccacagugauggcaguuauugucaguggccaguuaguuccgaggcacagcagccugagccacuccguucccugguacccuauggcccauuuccuugcaaagcuauuacacggauccuauggcuaaccacacgacaaggcuugcccuucacuaucuuccagggaggaaugccccgggcuaguuauggugacagacauugcaucucugugauccacgauggucagcagaccgcguucgauuuuacauccagaguuauuggcuucacaguucuaaccgaagccgauccagcugccacauuugaugacccuuacgcucugguggugcucgccgaggaagaauuaguuguaauugaccugcagacugcuggguggccccccgugcaguugccuuaucuagcaucacugcauugcucagcuauuaccugcucucaccacgucaguaauaucccacugaaauugugggaacgcaucaucgcugccggcucucggcagaacgcucauuucuccacaauggaauggccgauugacggagguaccagucuuacuccugcccccccacagcgcgaccugcugcugaccggacacgaggaugggaccgugagauuuugggacgcuagugggguaugccugcgacucuuguauaagcucucuaccgucagaguuuuucugaccgauaccgaucccaacgaaaacuuuucugcccaaggugaggacgaauggccaccccuucguaagguaggaagcuucgaccccuauucugacgauccacgacugggcauucagaaaauuuuuuuauguaaguauagugguuaucuugcagucgccggaaccgcaggacaggugcugguguuagaguuaaacgaugaggcugccgaacaggcuguggaacaagucgaagccgaccuuuuacaggaucaagagggauaccgauggaagggccacgagcgucuggcugccagaucuggaccagugagauucgaaccaggcuuccaacccuucgucuuaguucagugucagcccccagccguggugaccucccuagccuugcacucugaauggcgacugguugccuucgguaccucccauggauuuggacuguucgaccaccaacaacgacgccagguuuucgugaaaugcacccuccacccuucagaucaguuagcucuugaagguccacugagcagagucaaaucccugaaaaaaagcuugagacaaucguuccgacggaugcgcagaagcaggguaucaagccguaagagacauccugccgggccgccaggugaagcccaggaggguagcgccaaagcagagcggccugggcuccagaacauggaacuugccccagugcagagaaaaaucgaggcucguuccgcagaggauucauucaccgguuuuguccgcacccuguauuucgccgauacuuaucucaaggauuccagcaggcauugucccagucuaugggccggaaccaauggcgguacaaucuacgccuuuagucugagaguucccccagccgagcggagaauggacgagccaguuagggcugaacaggcgaaagaaauccagcugaugcacagagcccccguggucggaauacuugugcuggacggccacagcgugccucuccccgaaccucuggaagucgcgcacgaucugaguaaaaguccugacaugcaggguucccaucaacuauuggucgugagugaggagcaauuuaagguguucacacugccaaaagugucugcaaaacuaaaacuaaaauuaaccgcacuggaaggaagccgcgucagacgagucucagucgcacacuuuggcucccggagggccgaggacuacggugaacaccaccucgcagugcucacuaaucugggcgacauccagguuguuagccuuccguuacugaaaccccagguacgauacucaugcauaagacgggaggaugugagcgguauugcuaguuguguguuuaccaaauacggccagggcuucuaucugaucagucccucagaauucgagagauuuagucucagcaccaagugguugguagagccaagaugucucguggacucagcggagaccaagaaccacaggccagggaacggugccgggcccaaaaaagccccuucaagagccaggaacaguggaacucagucugauggcgaagagaagcagccugguuuaguuauggagagagccuuacuaucugacgaacgagccgcaacgggcgugcacauugaaccuccuuggggagcugcuagugcuauggccgaacagagcgaaugguuaagcguccaagcagcccgguag

SEQ ID NO: 147117 - protein, 4655 aa, Artificial Sequence
  derived and/or modified sequence
MDRGPAAVACTLLLALVACLAPASGQECDSAHFRCGSGHCIPADWRCDGTKDCSDDADEIGCAVVTCQQGYFKCQSEGQCIPNSWVCDQDQDCDDGSDERQDCSQSTCSSHQITCSNGQCIPSEYRCDHVRDCPDGADENDCQYPTCEQLTCDNGACYNTSQKCDWKVDCRDSSDEINCTEICLHNEFSCGNGECIPRAYVCDHDNDCQDGSDEHACNYPTCGGYQFTCPSGRCIYQNWVCDGEDDCKDNGDEDGCESGPHDVHKCSPREWSCPESGRCISIYKVCDGILDCPGREDENNTSTGKYCSMTLCSALNCQYQCHETPYGGACFCPPGYIINHNDSRTCVEFDDCQIWGICDQKCESRPGRHLCHCEEGYILERGQYCKANDSFGEASIIFSNGRDLLIGDIHGRSFRILVESQNRGVAVGVAFHYHLQRVFWTDTVQNKVFSVDINGLNIQEVLNVSVETPENLAVDWVNNKIYLVETKVNRIDMVNLDGSYRVTLITENLGHPRGIAVDPTVGYLFFSDWESLSGEPKLERAFMDGSNRKDLVKTKLGWPAGVTLDMISKRVYWVDSRFDYIETVTYDGIQRKTVVHGGSLIPHPFGVSLFEGQVFFTDWTKMAVLKANKFTETNPQVYYQASLRPYGVTVYHSLRQPYATNPCKDNNGGCEQVCVLSHRTDNDGLGFRCKCTFGFQLDTDERHCIAVQNFLIFSSQVAIRGIPFTLSTQEDVMVPVSGNPSFFVGIDFDAQDSTIFFSDMSKHMIFKQKIDGTGREILAANRVENVESLAFDWISKNLYWTDSHYKSISVMRLADKTRRTVVQYLNNPRSVVVHPFAGYLFFTDWFRPAKIMRAWSDGSHLLPVINTTLGWPNGLAIDWAASRLYWVDAYFDKIEHSTFDGLDRRRLGHIEQMTHPFGLAIFGEHLFFTDWRLGAIIRVRKADGGEMTVIRSGIAYILHLKSYDVNIQTGSNACNQPTHPNGDCSHFCFPVPNFQRVCGCPYGMRLASNHLTCEGDPTNEPPTEQCGLFSFPCKNGRCVPNYYLCDGVDDCHDNSDEQLCGTLNNTCSSSAFTCGHGECIPAHWRCDKRNDCVDGSDEHNCPTHAPASCLDTQYTCDNHQCISKNWVCDTDNDCGDGSDEKNCNSTETCQPSQFNCPNHRCIDLSFVCDGDKDCVDGSDEVGCVLNCTASQFKCASGDKCIGVTNRCDGVFDCSDNSDEAGCPTRPPGMCHSDEFQCQEDGICIPNFWECDGHPDCLYGSDEHNACVPKTCPSSYFHCDNGNCIHRAWLCDRDNDCGDMSDEKDCPTQPFRCPSWQWQCLGHNICVNLSVVCDGIFDCPNGTDESPLCNGNSCSDFNGGCTHECVQEPFGAKCLCPLGFLLANDSKTCEDIDECDILGSCSQHCYNMRGSFRCSCDTGYMLESDGRTCKVTASESLLLLVASQNKIIADSVTSQVHNIYSLVENGSYIVAVDFDSISGRIFWSDATQGKTWSAFQNGTDRRVVFDSSIILTETIAIDWVGRNLYWTDYALETIEVSKIDGSHRTVLISKNLTNPRGLALDPRMNEHLLFWSDWGHHPRIERASMDGSMRTVIVQDKIFWPCGLTIDYPNRLLYFMDSYLDYMDFCDYNGHHRRQVIASDLIIRHPYALTLFEDSVYWTDRATRRVMRANKWHGGNQSVVMYNIQWPLGIVAVHPSKQPNSVNPCAFSRCSHLCLLSSQGPHFYSCVCPSGWSLSPDLLNCLRDDQPFLITVRQHIIFGISLNPEVKSNDAMVPIAGIQNGLDVEFDDAEQYIYWVENPGEIHRVKTDGTNRTVFASISMVGPSMNLALDWISRNLYSTNPRTQSIEVLTLHGDIRYRKTLIANDGTALGVGFPIGITVDPARGKLYWSDQGTDSGVPAKIASANMDGTSVKTLFTGNLEHLECVTLDIEEQKLYWAVTGRGVIERGNVDGTDRMILVHQLSHPWGIAVHDSFLYYTDEQYEVIERVDKATGANKIVLRDNVPNLRGLQVYHRRNAAESSNGCSNNMNACQQICLPVPGGLFSCACATGFKLNPDNRSCSPYNSFIVVSMLSAIRGFSLELSDHSETMVPVAGQGRNALHVDVDVSSGFIYWCDFSSSVASDNAIRRIKPDGSSLMNIVTHGIGENGVRGIAVDWVAGNLYFTNAFVSETLIEVLRINTTYRRVLLKVTVDMPRHIVVDPKNRYLFWADYGQRPKIERSFLDCTNRTVLVSEGIVTPRGLAVDRSDGYVYWVDDSLDIIARIRINGENSEVIRYGSRYPTPYGITVFENSIIWVDRNLKKIFQASKEPENTEPPTVIRDNINWLRDVTIFDKQVQPRSPAEVNNNPCLENNGGCSHLCFALPGLHTPKCDCAFGTLQSDGKNCAISTENFLIFALSNSLRSLHLDPENHSPPFQTINVERTVMSLDYDSVSDRIYFTQNLASGVGQISYATLSSGIHTPTVIASGIGTADGIAFDWITRRIYYSDYLNQMINSMAEDGSNRTVIARVPKPRAIVLDPCQGYLYWADWDTHAKIERATLGGNFRVPIVNSSLVMPSGLTLDYEEDLLYWVDASLQRIERSTLTGVDREVIVNAAVHAFGLTLYGQYIYWTDLYTQRIYRANKYDGSGQIAMTTNLLSQPRGINTVVKNQKQQCNNPCEQFNGGCSHICAPGPNGAECQCPHEGNWYLANNRKHCIVDNGERCGASSFTCSNGRCISEEWKCDNDNDCGDGSDEMESVCALHTCSPTAFTCANGRCVQYSYRCDYYNDCGDGSDEAGCLFRDCNATTEFMCNNRRCIPREFICNGVDNCHDNNTSDEKNCPDRTCQSGYTKCHNSNICIPRVYLCDGDNDCGDNSDENPTYCTTHTCSSSEFQCASGRCIPQHWYCDQETDCFDASDEPASCGHSERTCLADEFKCDGGRCIPSEWICDGDNDCGDMSDEDKRHQCQNQNCSDSEFLCVNDRPPDRRCIPQSWVCDGDVDCTDGYDENQNCTRRTCSENEFTCGYGLCIPKIFRCDRHNDCGDYSDERGCLYQTCQQNQFTCQNGRCISKTFVCDEDNDCGDGSDELMHLCHTPEPTCPPHEFKCDNGRCIEMMKLCNHLDDCLDNSDEKGCGINECHDPSISGCDHNCTDTLTSFYCSCRPGYKLMSDKRTCVDIDECTEMPFVCSQKCENVIGSYICKCAPGYLREPDGKTCRQNSNIEPYLIFSNRYYLRNLTIDGYFYSLILEGLDNVVALDFDRVEKRLYWIDTQRQVIERMFLNKTNKETIINHRLPAAESLAVDWVSRKLYWLDARLDGLFVSDLNGGHRRMLAQHCVDANNTFCFDNPRGLALHPQYGYLYWADWGHRAYIGRVGMDGTNKSVIISTKLEWPNGITIDYTNDLLYWADAHLGYIEYSDLEGHHRHTVYDGALPHPFAITIFEDTIYWTDWNTRTVEKGNKYDGSNRQTLVNTTHRPFDIHVYHPYRQPIVSNPCGTNNGGCSHLCLIKPGGKGFTCECPDDFRTLQLSGSTYCMPMCSSTQFLCANNEKCIPIWWKCDGQKDCSDGSDELALCPQRFCRLGQFQCSDGNCTSPQTLCNAHQNCPDGSDEDRLLCENHHCDSNEWQCANKRCIPESWQCDTFNDCEDNSDEDSSHCASRTCRPGQFRCANGRCIPQAWKCDVDNDCGDHSDEPIEECMSSAHLCDNFTEFSCKTNYRCIPKWAVCNGVDDCRDNSDEQGCEERTCHPVGDFRCKNHHCIPLRWQCDGQNDCGDNSDEENCAPRECTESEFRCVNQQCIPSRWICDHYNDCGDNSDERDCEMRTCHPEYFQCTSGHCVHSELKCDGSADCLDASDEADCPTRFPDGAYCQATMFECKNHVCIPPYWKCDGDDDCGDGSDEELHLCLDVPCNSPNRFRCDNNRCIYSHEVCNGVDDCGDGTDETEEHCRKPTPKPCTEYEYKCGNGHCIPHDNVCDDADDCGDWSDELGCNKGKERTCAENICEQNCTQLNEGGFICSCTAGFETNVFDRTSCLDINECEQFGTCPQHCRNTKGSYECVCADGFTSMSDRPGKRCAAEGSSPLLLLPDNVRIRKYNLSSERFSEYLQDEEYIQAVDYDWDPKDIGLSVVYYTVRGEGSRFGAIKRAYIPNFESGRNNLVQEVDLKLKYVMQPDGIAVDWVGRHIYWSDVKNKRIEVAKLDGRYRKWLISTDLDQPAAIAVNPKLGLMFWTDWGKEPKIESAWMNGEDRNILVFEDLGWPTGLSIDYLNNDRIYWSDFKEDVIETIKYDGTDRRVIAKEAMNPYSLDIFEDQLYWISKEKGEVWKQNKFGQGKKEKTLVVNPWLTQVRIFHQLRYNKSVPNLCKQICSHLCLLRPGGYSCACPQGSSFIEGSTTECDAAIELPINLPPPCRCMHGGNCYFDETDLPKCKCPSGYTGKYCEMAFSKGISPGTTAVAVLLTILLIVVIGALAIAGFFHYRRTGSLLPALPKLPSLSSLVKPSENGNGVTFRSGADLNMDIGVSGFGPETAIDRSMAMSEDFVMEMGKQPIIFENPMYSARDSAVKVVQPIQVTVSENVDNKNYGSPINPSEIVPETNPTSPAADGTQVTKWNLFKRKSKQTTNFENPIYAQMENEQKESVAATPPPSPSLPAKPKPPSRRDPTPTYSATEDTFKDTANLVKEDSEV

SEQ ID NO: 147118 - DNA, 13968 bp, Artificial Sequence
  derived and/or modified sequence
atggacagggggccagctgctgtcgcctgcacccttctgctggcactggtggcctgcctggcacccgccagcggtcaggagtgcgactccgcccattttcggtgtggcagcggacactgtattccagcagactggaggtgtgatggtacaaaggactgttcggacgatgccgacgagatcgggtgtgctgtggtaacatgccagcagggctacttcaaatgccagtcagaggggcagtgtatccctaacagctgggtttgtgatcaggaccaggactgcgacgacggttctgacgagcgccaggactgttctcagtctacctgttcctctcatcaaattacatgctcaaacgggcaatgcattccatccgaatacaggtgcgaccacgtcagagactgtccagatggggcagacgaaaacgattgccagtacccaacgtgcgaacagctcacctgcgacaacggagcttgttataacaccagccagaaatgtgattggaaggtggactgcagggactcatctgacgagatcaattgcacggagatttgcctacataatgaattttcttgtggaaacggcgagtgcatcccaagagcgtatgtgtgtgaccacgataacgattgtcaggacgggtcggacgaacatgcttgtaattaccctacttgtgggggatatcagtttacctgtccttccggcaggtgcatatatcaaaactgggtctgtgacggagaggatgattgcaaagataatggagacgaggatggctgtgagagcggaccacatgacgtgcacaagtgtagtcctcgggaatggagctgtcccgagtccggccgctgtatctccatttataaagtttgcgatggaattctcgactgtcctggtagggaggacgaaaacaacacttccaccgggaagtattgtagtatgacgctgtgttccgccttaaactgtcagtaccaatgtcacgaaacaccatatggcggggcctgtttctgccctccaggttatattattaaccataacgatagtagaacatgtgttgagtttgatgattgtcagatatgggggatctgtgatcagaagtgcgaaagcagaccagggcgacacctatgtcattgcgaggaaggatacattctggagcgggggcagtactgcaaagctaacgactcttttggagaagcctccattatctttagcaatggcagggacttgctgatcggtgacatccacggccgctcctttagaatactcgtggaatcacagaaccgcggggtagcagtgggggttgcctttcactaccacctgcagcgagttttttggaccgatacagtgcagaacaaggtgtttagcgttgacattaatggcctcaacatccaagaagtgttgaacgtctctgtggaaacaccagagaaccttgcggtggattgggttaacaataagatctacttggtcgagaccaaggtcaatcgaattgatatggtgaatttggacggaagctatagagttacactgataacagaaaatctgggtcaccctaggggaatagctgttgacccaaccgtcggctatctcttcttcagtgactgggagtcgctttcaggggaacccaaattagagcgtgccttcatggatggcagtaatagaaaggacctcgtgaaaaccaaactgggctggccggccggggtgaccttggacatgatatccaagagggtttactgggtcgactcacggttcgactacattgagaccgtcacttatgacggaatccagaggaaaactgtagtgcatgggggcagtctgatcccccatccctttggcgtgtctctgttcgagggccaagtgttctttaccgactggaccaaaatggcagttctgaaagcaaacaagtttaccgagacaaacccgcaggtctattatcaggctagcttgcggccctatggggtgaccgtgtatcattcactccgacagccgtatgccacaaacccatgtaaggataataacggcggctgtgagcaggtgtgtgtcctcagccacaggacagacaacgatggtcttgggtttagatgcaaatgtacttttgggttccagctggataccgacgaaaggcactgtatcgccgtgcagaacttcctaattttttctagccaggtggccatccgcggtatacctttcactctgtctacccaggaagacgtgatggtgcccgtgtcagggaatccctctttcttcgtcggaattgatttcgatgcgcaagacagtacgatttttttctcagacatgtcaaaacacatgatctttaagcaaaaaatagatggtacaggccgcgagatacttgctgcgaatcgggtcgagaatgttgagtccctcgctttcgattggatctctaaaaacctttattggactgattctcattacaaatctatcagtgtgatgaggcttgctgacaaaactcgcagaacggttgtgcagtacctgaacaacccccgatccgtggtggtccatccttttgcaggctacctcttcttcaccgattggttcagaccagcaaagataatgagagcttggtccgacggtagtcatctccttccagttatcaacactaccctcggatggcccaacggcttagccatcgactgggcagcatcccggctctactgggtagacgcttacttcgacaaaattgagcatagcacatttgacggtctggacaggcgccggctcggacatatcgagcagatgacacatccctttgggctcgctatatttggcgaacacctgtttttcacagactggcgtctgggcgcaattattagggtccggaaggccgatgggggagagatgactgtgatcaggagtggcatagcatatatactgcatctgaaatcttatgacgtgaacattcagactggcagcaacgcttgtaaccaacctactcaccctaatggagattgttctcacttctgtttccccgtgccgaatttccaaagagtgtgtggctgtccatacgggatgcgtctcgccagtaatcatcttacatgcgagggagacccaaccaacgaacccccaaccgaacagtgcgggcttttctccttcccatgtaagaatgggcggtgcgtgccaaattactacctgtgtgacggcgtggatgactgtcacgacaactccgacgagcagctgtgtgggaccttgaacaacacgtgcagcagctcggcctttacctgtggtcacggagagtgcattccggcacattggagatgcgataaacgcaatgattgtgtggacggcagcgatgagcacaattgtcccacgcatgctcctgccagttgtctcgatacccagtacacctgcgacaaccaccagtgcatctctaaaaactgggtgtgcgatactgacaatgactgcggagacgggtccgacgaaaagaattgtaactcaacggagacatgccagccatcacaattcaattgccccaaccataggtgcatcgacctttcattcgtctgtgacggagacaaggactgtgtcgatgggtctgatgaggtgggctgcgtgctaaattgcaccgcaagtcagtttaaatgcgcttcaggcgataagtgcatcggtgtgaccaatcgttgcgacggcgtgtttgactgttctgataatagcgacgaggctggctgccccacccgccctcctggaatgtgtcattcagacgagttccaatgccaggaggacggaatctgcatccctaacttttgggagtgtgatgggcaccccgactgcctgtacggatcggacgaacacaatgcgtgcgtcccgaagacatgtcctagttcttacttccattgcgacaacgggaactgtattcaccgggcttggctgtgcgacagagacaatgattgcggtgatatgagcgatgaaaaagattgccctacccagcccttccgttgccccagctggcagtggcagtgcctcgggcacaatatctgtgtcaacctttcggtggtgtgcgatgggatctttgactgccccaacggcactgatgagtcacccctgtgtaacggcaactcctgttccgactttaacggcggctgtacccacgagtgcgtccaagagcctttcggcgcaaaatgcctgtgcccgcttggatttctcctggcaaacgattctaagacctgtgaggacattgatgagtgcgacatcctcggatcctgctcccagcactgttacaacatgagagggagcttcaggtgttcctgcgatactgggtacatgctggaatccgacggccgcacctgtaaagtgacagcctcggaaagcctgctgctcctggtggcgagccaaaacaagataattgcggacagcgtaacaagtcaggttcataatatctacagcttagttgagaatggctcctacatcgtcgctgtcgatttcgacagtatctctggccgcatattctggtctgacgccacccaaggcaagacgtggtccgccttccagaatggcacagaccgacgcgtcgtcttcgattcctcgataattctgacagagaccattgcgattgactgggttggccggaacctttactggaccgactacgctctggagaccattgaggtatctaagattgatggctctcacaggacggtgctaatctcaaagaatctcaccaatcctcgcggtctggcactggaccccaggatgaacgagcacctcctgttctggtccgattggggccaccatccaagaatcgaacgcgcttccatggacgggagcatgcggacagtgattgtgcaggataagattttctggccttgcggcctaaccatcgattaccctaaccgtttgctgtactttatggactcctacttggactatatggacttctgcgattacaatggccaccataggcgacaggtgatcgctagcgacctgattattcgtcatccctacgccttgaccctgtttgaggactcggtgtactggaccgatcgggccacccgtcgggtaatgcgcgccaataagtggcatggcggcaaccagtctgtcgtaatgtataacattcagtggccattgggcattgtggcggttcatccgtccaagcagcccaatagcgtgaatccatgcgccttctctcgatgtagccacctgtgcctcttatcctcccagggcccccacttctattcttgtgtgtgtccatctggctggtccctctccccagacttgttgaattgtcttcgggacgatcagccctttttgataactgttcggcaacacattatctttggcatctctcttaacccggaggtgaagagcaatgacgcaatggtgcccatagccgggatccagaacggcctcgacgtggagtttgatgatgcagagcaatatatttattgggtggagaatcctggcgaaatacacagagtgaaaaccgatggcacaaaccggacagtgttcgcttccattagcatggtaggccccagtatgaatcttgctctggattggatctcccgaaatctgtattcaactaatccgcgtactcagtcgatagaagttctgactctgcacggcgatataagatacaggaagacattaatcgctaacgacggaaccgctctcggcgttggattcccaataggtatcactgtagacccagctcgtggaaagttgtactggtcggaccaaggcacagacagcggcgtgcccgctaagatcgcctccgccaatatggatggcacttccgtgaaaacattgttcaccggtaaccttgaacaccttgaatgcgtgacccttgatatcgaggaacagaagttatattgggccgtgacaggaaggggtgtgatcgaacggggcaacgtggacggaactgatagaatgatcctggtgcatcagctttctcatccatggggaatcgccgtccatgactcatttctatactataccgatgaacagtacgaggtcatcgagcgcgtcgataaggcaaccggagccaataaaatcgtccttagggacaacgtgcccaacctgcggggactccaagtgtaccaccgacgcaatgctgcggaatcgagcaatggctgtagtaataacatgaatgcatgtcagcaaatctgtctacctgttccgggaggtttgttctcatgtgcctgcgccaccggctttaagctgaacccggacaaccgctcatgttccccatacaatagcttcattgttgtatctatgctttcagccatacgcggctttagtctggagctcagcgaccacagtgagacaatggttcctgtggctgggcaaggacggaacgcacttcatgtggacgtcgatgtgagctctggtttcatttattggtgtgacttttccagcagtgtggccagtgacaacgcaatccggcgcatcaagccagacggtagctctttgatgaatatcgtgactcatggaattggggagaacggcgtgagggggattgccgtcgattgggtcgccggtaacttatattttactaacgcgtttgtttctgaaacactcatcgaggtattacgcattaataccacataccggcgcgtcttgctcaaggtcacggtcgatatgccgcgacatatagtggtggacccgaagaacagatatctattctgggccgactacgggcagcgtccaaaaattgagcgaagcttcttagattgtacaaatcgcacagtgctggtgtcagaaggcatcgtgacaccaaggggcctcgctgtggatcgctcagacgggtacgtgtattgggtggatgattctttagacattatagcccggattcgaatcaatggagagaactcagaggttattagatacggtagtcgctacccaactccttatggcattacagtttttgagaattcaatcatctgggtggatagaaatctgaagaaaatattccaagcatcaaaggaacccgaaaacactgaaccgcctacagtgatccgagacaatattaattggttgcgtgatgtaaccatcttcgacaagcaggtccagcctagatctcctgcagaggtcaacaacaacccatgtttagagaacaatggaggctgctcacacttatgcttcgctttacccggcctgcataccccaaaatgtgattgtgctttcgggacgcttcagtctgacggtaaaaattgcgcaatatccaccgagaacttccttatatttgccttaagtaactccttacgcagtctgcacctggatccagagaaccactctcccccctttcagacgattaatgtggagaggacagtgatgtccctggactatgatagcgtatccgaccgaatttactttacacaaaacctcgcttccggagtgggtcagatctcatacgcaactctcagctccggtatccatactcctacagttatcgcatccgggattggtactgccgatggaatagctttcgactggattactcgtaggatctattatagcgattatcttaatcagatgatcaactcaatggcagaagacgggtctaacaggacagtcatcgctcgtgtccccaagccgagagctatcgttctggatccgtgccagggttacctgtactgggcagattgggacacacacgcaaagatcgagagggccaccctgggaggaaatttccgcgtgcccatcgtgaatagctcacttgtcatgccgtccgggcttactctggactacgaagaagacctcctttattgggtggacgcttctctacagaggatagagaggtcaactctgactggcgtcgatagggaggttatcgtgaacgcagcagtgcatgccttcggtctgaccctgtacggccagtatatttactggacggacctgtacacacagaggatttacagggctaataagtacgatggctctggtcaaattgccatgactaccaatctgctttcgcaacccagaggtatcaatacagttgtgaagaaccagaagcaacaatgcaataatccttgcgaacagttcaatggaggatgctctcatatttgcgctccaggacccaatggcgctgaatgccagtgtccacatgaaggaaactggtatctggctaataaccggaagcactgcatcgtcgacaatggcgagcggtgtggcgcatcttcgttcacatgctccaacggaaggtgcatttccgaagagtggaagtgtgataatgataacgactgcggagacggctctgatgagatggaatccgtttgtgcactacacacatgtagccccaccgccttcacctgtgcaaacggtagatgtgtgcaatactcctatcgatgtgactattataacgactgcggagatggctctgacgaggcgggttgcctgtttagagactgcaacgccacaacagagttcatgtgcaataaccggcggtgtatacctcgggagttcatttgtaatggggtggataactgtcatgacaacaatacatctgatgagaagaattgtcccgatcggacatgccagagcggctacaccaaatgtcataactctaacatctgcatcccaagagtgtacctctgcgacggagacaacgactgtggcgataatagtgatgaaaatccgacctactgcaccacccatacatgtagttcctccgaattccagtgcgcgtcaggccggtgcattcctcaacactggtattgcgaccaggaaacagactgttttgacgcctccgacgaaccagcaagctgcgggcactcagaaagaacctgcttagctgacgaatttaagtgcgacgggggacggtgcattccgtccgaatggatatgtgacggcgacaatgactgcggcgatatgagcgacgaagacaagcgccatcagtgtcaaaatcagaactgttctgatagtgaattcttatgtgttaatgaccgcccaccagacagacgctgcattccacagagctgggtgtgtgatggggacgtcgattgtactgacggctacgacgaaaaccaaaactgtacccgccgtacctgttcagagaacgaattcacttgtgggtacgggctctgcattccaaagatttttaggtgtgaccgtcacaatgactgtggagattactcagatgaaagaggctgtctctatcagacttgccaacagaatcagtttacttgccagaatggtcgctgcatctcaaaaactttcgtttgcgacgaggataatgattgtggtgatggaagcgacgagctgatgcacctgtgccacaccccggagcctacttgccctccacacgagttcaaatgtgacaacggtaggtgtatcgagatgatgaaactgtgtaatcatctggacgactgtcttgataattccgacgaaaagggctgcgggatcaacgagtgtcatgacccatccatttcaggctgtgaccacaactgcacagatactctcacctcattttactgtagctgtcggcctggttacaagctgatgagcgataaaaggacatgcgtggatattgatgaatgtaccgagatgccatttgtttgctcgcagaagtgcgagaacgtgattggttcgtacatatgtaagtgtgcaccagggtatctcagggagcccgacggaaagacgtgtcgccaaaactccaacattgaaccctacctcatcttctctaaccggtattacctcagaaatcttacaatagatggctacttttatagtttaatcttggagggacttgacaacgtggtggccctggactttgaccgggtggagaagaggttgtactggatcgatacccagcgacaagtcatcgaaagaatgttcctcaataaaacaaataaggagaccatcatcaatcacagactcccggccgctgaaagtttggccgtggactgggtgtcaaggaagttgtactggctagatgccaggctggacgggctgttcgtgtcggacctgaatggtggtcatcggagaatgctggcccaacactgcgttgatgcaaataatacattctgcttcgacaatcctaggggtctcgcgcttcacccacaatatggatacctgtactgggctgattggggacatcgggcatatattggacgcgtcggtatggacgggacaaataagtctgtaatcatatcgaccaaattggagtggccaaatggcatcactattgattataccaacgacctactgtactgggccgacgcacatcttggttatatagaatattcagatctggagggccaccacagacataccgtgtatgatggagctcttcctcacccgttcgccattacaatcttcgaggacaccatatactggaccgactggaacactagaacagtagaaaaaggaaacaagtacgacggatctaacaggcagacccttgtcaacacaacccaccgccccttcgatatccatgtgtaccatccctataggcaacccatcgtaagcaacccatgcgggacaaacaacggagggtgcagccacctttgtctcataaagcctggaggaaaagggttcacatgcgaatgcccggatgactttagaaccctgcagttatctgggagtacatactgcatgcccatgtgtagtagcactcagttcctctgcgccaacaacgaaaaatgtatccccatttggtggaaatgtgatggacagaaggactgctctgacggaagcgacgaacttgccttatgccctcagagattctgccggctcgggcagttccaatgttcagacggaaattgcacaagcccgcaaaccttgtgcaatgcgcaccagaattgtccagacggcagtgatgaggacagactgctgtgcgagaaccaccactgcgattccaacgaatggcagtgcgccaataagcggtgcattccagagtcctggcagtgcgatactttcaacgattgtgaggacaattcagatgaggactcgtctcactgcgcatctcggacatgtaggccaggacaatttagatgtgctaacgggcgatgtattccccaggcctggaaatgcgatgtggacaatgactgcggggaccattcggatgaacccatagaagagtgtatgtcaagtgcgcacctctgtgataattttactgaattcagttgcaaaactaactacaggtgtattcccaagtgggcagtgtgtaacggcgtggatgactgtcgggacaactcagacgagcagggatgtgaagaacgaacctgtcatcctgtgggggattttcgatgtaaaaatcatcattgcatacctctgcgctggcagtgtgatggccagaatgattgtggtgacaattccgatgaagaaaattgcgctccacgtgagtgcaccgagagcgaattccgctgcgtcaatcaacagtgcatacccagccgatggatctgcgatcattacaatgattgcggggacaacagcgacgaacgcgattgcgaaatgcggacttgccatcctgaatattttcagtgcaccagcgggcactgcgtccacagcgaactgaagtgtgacggttcggcagattgcctcgatgccagcgacgaagccgattgccctacacgcttccccgacggagcatattgccaggcaacaatgtttgagtgcaagaatcatgtgtgtatccccccctattggaagtgtgacggggatgatgactgcggtgatggctccgatgaggaactccatctgtgtctagacgtgccctgcaacagcccaaatagattccggtgtgataataatcgttgcatatattcccacgaggtgtgtaacggcgtggacgactgcggtgatggtacagatgaaactgaggagcactgcagaaagcccactccgaagccttgtactgagtatgagtacaagtgcggaaacgggcattgcataccacatgacaacgtgtgtgatgatgctgacgactgtggcgattggtctgacgagctagggtgcaacaagggcaaggagaggacatgcgcagagaatatctgcgaacagaactgcacacagcttaacgaaggagggttcatttgctcctgcacagcgggatttgagacgaacgtgttcgataggaccagttgcctggatattaacgaatgtgagcagtttggcacgtgtccgcaacactgccggaataccaaggggtcgtacgaatgtgtctgtgcggatggatttacatctatgagcgaccggcctggtaagcgttgcgctgccgaaggcagctcccctctcctcctgctccccgataacgttcgaatccgcaagtataatctatccagtgagcggttcagtgagtatctccaggatgaggaatatatacaggccgtggactatgattgggacccaaaggatataggcctgtccgttgtgtactacacagtgagaggcgaagggtcaagattcggagcaatcaaacgcgcgtacatccccaacttcgagagcgggagaaacaacctggttcaggaggtggacctgaagctgaagtacgtgatgcagcccgatggaattgctgtggactgggtgggaaggcatatatattggagtgatgtcaagaataagaggattgaggtcgcaaagcttgatggaagatacaggaaatggctgatctccactgacttagaccaaccagctgcaatcgcagtgaaccctaaactcggcttgatgttttggacagactggggtaaggagccaaaaatcgagtctgcgtggatgaacggggaggacaggaatattctggtgtttgaggatctaggttggccaaccggtttgtctatagactatctcaataatgacaggatctattggagcgactttaaggaggacgttatagagactatcaagtacgacggcaccgaccgccgcgtcatcgctaaagaggcgatgaacccctacagtctcgacatctttgaagatcagctgtactggatcagtaaagagaagggagaggtttggaagcagaataagttcggacaggggaagaaggagaagacgctggtagtaaatccttggctgacccaggttcggattttccaccagcttagatacaataagagcgtacccaacctgtgcaagcagatctgttcccatctgtgtttgctgcggcctggaggatattcttgtgcttgtcctcagggctcatccttcatcgagggatccaccacagaatgcgatgccgcaatcgagttaccaataaacttgccgccaccctgcagatgcatgcatgggggcaactgctatttcgacgaaacagacctgcccaaatgtaagtgcccgagtggctacaccggcaaatactgcgagatggcttttagcaagggcatttctcctgggactaccgcggttgccgtactgctcacaatcctactcattgtggttataggggcactggctattgccggatttttccattaccgtagaacggggtccttactaccagcccttcccaaactgccctcgctttctagtctggtcaaaccatcagaaaatgggaacggcgtcacttttcgcagcggagccgacctgaatatggatataggcgtgagcgggttcgggcccgagacagccatcgacagaagtatggctatgagcgaggattttgtgatggagatgggaaagcagcctattatcttcgaaaatcccatgtactcagccagagactccgccgtcaaagtagtacagccaatccaagtgactgtctcagaaaatgtcgacaataaaaactatgggtctcctatcaatccttcagaaattgtgcccgagaccaaccctacatcacctgccgcggacgggacacaagtgaccaagtggaaccttttcaagcgtaagagcaagcaaactaccaactttgagaaccccatctatgcccaaatggaaaatgagcagaaggaaagcgtcgctgctacacctccaccctctcccagcctgcctgcaaaaccaaaaccaccgtcgcgccgcgatcccacacccacctattcagcaactgaagacacgttcaaggatacagctaatctagtgaaggaggactcagaagtatag

SEQ ID NO: 147119 - DNA, 3678 bp, Artificial Sequence
  derived and/or modified sequence
atggatagagggccagcagctgtcgcgtgtaccttgcttctggctctggtcgcctgcctggctcccgcaagtgggcaggagtgcgattcggcccatttccgctgcgggtcgggccactgcatcccagccgactggcgctgtgatgggactaaagactgttccgacgacgctgacgagattgggtgtgctgtggtgacctgtcagcagggctacttcaagtgccagtcagagggtcaatgcatcccgaattcctgggtttgcgaccaagaccaagactgcgacgatggtagtgatgaacggcaggactgcagtcagtccacatgcagcagccatcagatcacatgttccaacggccagtgtatcccgagtgagtatcggtgcgaccatgtgcgcgattgccccgatggcgccgatgaaaacgattgccagtaccccacttgtgaacagttgacctgtgacaatggcgcctgctacaatacatcacaaaagtgtgattggaaagtggattgtcgggacagctctgacgaaattaactgtaccgagatttgtcttcacaacgaattctcatgcggcaatggggagtgcatcccacgggcttacgtatgcgaccatgataacgattgccaggacggctcagacgagcacgcctgtaactatccaacctgtggtggctaccagtttacctgtccctccggcagatgtatctaccagaactgggtttgtgatggtgaagacgactgtaaggataacggggacgaggacggatgcgagtcaggaccgcacgatgtgcataagtgctcgccccgcgaatggagttgcccggagtccggccggtgtatctccatttacaaagtatgtgatggaattctggattgtcccggaagggaagatgagaataacacctccactggcaagtattgctcaatgaccctgtgttctgctctaaattgccagtatcagtgccacgaaaccccctacggtggggcgtgcttctgtccacccggatatatcatcaaccataatgactcccggacatgtgtggagttcgacgactgccaaatctggggcatttgcgatcagaagtgcgaaagtcgtccaggcaggcacttgtgtcactgcgaggaggggtatatcctggagagggggcaatactgcaaagcaaatgatagcttcggcgaggccagtatcattttttccaacggcagggatctgcttatcggagatatccacggccgctccttcagaatcctcgtagaaagccagaatcgcggcgtggccgttggagtcgcgttccactatcacctgcagcgggtgttttggaccgacacagttcagaacaaggtctttagtgtggatattaacggtcttaacattcaagaggttctcaacgtgtccgttgagaccccagagaacctggccgtcgactgggtgaataacaagatttacttagtagaaacgaaggtgaatcggattgatatggtaaatcttgacgggagctaccgggtcacccttattaccgaaaacctgggccaccctaggggaatagctgtggatcccaccgtagggaaaacggtagtccatggggggtcattgataccccacccgtttggcgtcagcttgtttgaaggtcaggtgttctttaccgactggactaaaatggccgtgttgaaggctaacaaattcacagagacaaacccccaggtctactatcaggcctcactccgcccgtatggggtgactgtgtaccactcgttgcgacagccttacgccactaatccatgcaaggataacaacggcggatgcgaacaggtgtgtgtgctgtctcatcgcaccgataacgacggtctaggcttcagatgcaaatgcacattcggatttcagctcgacacagatgagaggcattgcattggcagagagatcctcgccgctaaccgagtggaaaatgtggaatcactggcatttgattggattagcaagaatctgtactggactgacagtcattacaagagcatatcagtcatgcgcctggctgataaaacaaggagaactgtggtgcagtacctgaacaatcctcggtccgtggttgtccatcccttcgctgggtacctgttctttacggattggttccgccctgcaaagattatgcgcgcatggagcgatggcagccatctcttaccagtgattaacacaacccttgggtggccaaatggattggccatcgattgggctgctagtagattatactgggtagacgcttacttcgacaaaattgagcattccacattcgatggactcgacaggaggagattgggccacattgagcagatgacacatccattcgggctggccatcttcggcgaacatctcttttttaccgactggcggctgggtgccattatcagagtgcggaaagctgatggtggggagatgaccgtaattcgctcgggtatcgcctatattctacatctgaaaagctacgatgtgaatatacagactgggtccaatgcatgtaatcagcctacccacccgaatggggattgctcacatttttgtttccccgtgccaaattttcagagggtctgcggatgcccgtatggaatgagactcgcctcaaaccatctcacgtgcgagggggatccgacgaatgagccacccactgagcagtgtggacttttttcttttccttgcaaaaacggccggtgcgttcccaactactatctgtgcgacggagtcgacgactgccatgacaatagtgacgaacaactttgtgggacactaaataatacatgctccagtagcgcttttacttgcgggcacggggagtgcatccctgctcactggagatgtgacaagcgaaatgattgcgtggatggtagtgacgaacataactgtccaacacatgcacctgctagttgccttgacacccagtacacatgtgacaatcaccagtgtatctccaagaactgggtgtgcgacaccgataacgattgtggagacggttccgatgaaaagaattgcaatagtacagagacctgtcaaccttcacagtttaattgccctaaccacagatgtatagatctgagctttgtgtgcgacggagataaagactgcgtggatggcagcgacgaggtagggtgcgtactcaactgtacagccagtcagttcaagtgtgcatcaggggacaagtgtatcggagtgactaacaggtgcgacggcgtttttgactgcagcgataactccgacgaagccggctgtcctactaggcctcccggaatgtgccactccgatgaattccaatgtcaagaggacggcatctgcattccgaatttctgggaatgcgacggtcaccctgactgtctttacgggagcgatgagcacaatgcatgcgtgcctaaaacatgcccttcttcctatttccactgcgacaatggtaactgtatccatagggcatggctgtgtgaccgtgataatgactgtggtgatatgtccgacgagaaggattgtccgactcagcccttccgttgcccaagctggcagtggcagtgcctgggccacaacatatgtgttaacctaagcgtggtgtgcgacggaatcttcgactgccctaatggtactgacgagtccccactgtgtagtaaatttcccgatcattctctgcttgcaataaacagcttctag

SEQ ID NO: 147120 - DNA, 1941 bp, Artificial Sequence
  derived and/or modified sequence
atgttagcccagcattgtgtggacgctaataacaccttctgtttcgacaacccaagaggactggccctacacccacagtatggatatctgtactgggccgattggggacatagagcttatatcggtcgtgtgggaatggatggcacaaacaaatctgtgataatctccaccaaactggagtggccaaacggtataacgatagattacaccaatgatctcctttactgggcagacgcccatcttggctacatcgaatacagcgatctcgaaggacaccatcgacacactgtgtatgacggcgctctgccccatccattcgcaattacaatttttgaagatacaatatattggaccgactggaatacaaggaccgtagagaaaggcaataagtatgacgggtctaatcggcaaacactcgtgaacactacccacaggccatttgatatacacgtttaccacccataccgacaaccaatcgtcagtaacccctgcggtactaataatggcggctgttcccacctgtgcctcataaagccaggtgggaagggatttacgtgcgagtgcccggatgactttcgaaccctgcagctgtcaggcagcacctactgcatgccaatgtgctctagcacccaattcctgtgtgcaaacaacgagaaatgcattcctatctggtggaaatgtgacggacagaaggactgtagtgatgggtccgacgagctggccctgtgcccccagcgattttgtagactggggcaattccagtgcagtgatggaaactgcacaagcccacagactctctgtaatgcccatcaaaattgccctgacggcagtgatgaggatcggttgttgtgcgaaaatcaccactgtgatagcaacgagtggcagtgcgcaaacaaacgctgcattcccgagagttggcagtgcgacaccttcaacgactgtgaggacaattcggatgaggattccagccactgcgcttcaagaacgtgcagaccaggtcagtttagatgtgccaatggaagatgtattccgcaagcttggaagtgcgatgtggacaacgattgtggagaccattccgacgagccaattgaagagtgcatgagtagcgcgcacctgtgcgataatttcactgaattctcctgcaagactaattacagatgtatacccaagtgggcagtctgtaacggcgttgacgactgcagggataattctgacgagcagggatgtgaagaacgcacttgccacccggtcggtgatttcaggtgtaaaaatcatcactgtatccccctgagatggcagtgtgatggtcaaaatgattgcggggataattcggatgaggaaaactgtgcaccccgcgagtgtacggaatcggagtttcgctgcgtaaaccaacagtgtatcccaagccgatggatttgcgatcactacaacgactgtggagacaattcggacgagcgcgactgcgggatgcgtctgatgaagctgatagttcctcatgcctttctaatggtccatactgcaagactgctgtgtagcaatgcaaagaccatgttcgtaagtcgacacataggtaatgtgatggctatgatgaccgtggccatggtgcagatgaaaaatttcacgtgtgcttggatgttccccgtgatccatcagacggtgtctggcgtaacaaccatagctgctttcattgtgatgagatgtgcaatggtctggatgactgtggagatggaactgatgcggcagcgttctacagtggaaaaccgcccattaaatctggtccagaatatgaacattagtgtggcaatgggtatcgcattccacatgacgatgtgcgtcatgatgccaatgaccgtggtgactggccccatgaactgggttgccattaaagagaagaaagagcatgtgttgaaaatctatgccagcaagatcgtgcccaactag

SEQ ID NO: 147121 - DNA, 13968 bp, Artificial Sequence
  derived and/or modified sequence
atggaccggggccctgctgctgtggcctgcaccctgctgctggccctggtggcctgcctggccccagccagcggccaggagtgtgacagcgcccacttccgctgtggcagcggccactgcatcccagctgactggaggtgtgatggcaccaaggactgcagtgatgatgctgatgagatcggctgtgctgtggtgacctgccagcagggctacttcaagtgccagagcgagggccagtgcatccccaacagctgggtgtgtgaccaggaccaggactgtgatgatggcagtgatgagcggcaggactgcagccagagcacctgcagcagccaccagatcacctgcagcaatggccagtgcatccccagcgagtaccgctgtgaccacgtgcgggactgcccagatggagcagatgaaaatgactgccagtaccccacctgtgagcagctgacctgtgacaacggggcctgctacaacaccagccagaagtgtgactggaaggtggactgccgggacagcagtgatgagatcaactgcacagagatctgcctgcacaatgagttcagctgtggaaatggagagtgcatcccccgggcctacgtgtgtgaccatgacaatgactgccaggacggcagtgatgaacatgcctgcaactaccccacctgtggcggctaccagttcacctgccccagcggccgctgcatctaccagaactgggtgtgtgatggagaagatgactgcaaggacaatggagatgaagatggctgtgagagcggcccccatgatgtgcacaagtgcagcccccgggagtggagctgcccagagagcggccgctgcatcagcatctacaaggtgtgtgatggcatcctggactgccccggccgggaggatgagaacaacaccagcacaggcaagtactgcagcatgaccctgtgcagcgccctgaactgccagtaccagtgccacgagaccccctacggcggggcctgcttctgccccccaggctacatcatcaaccacaatgacagcaggacctgtgtggagtttgatgactgccagatctggggcatctgtgaccagaagtgtgagagccggcccggccgccacctgtgccactgtgaggagggctacatcctggagcggggccagtactgcaaggccaatgacagctttggagaggccagcatcatcttcagcaatggccgggacctgctgattggagacatccacggccgctccttccgcatcctggtggagagccagaacagaggagtggccgtgggcgtggccttccactaccacctgcagagggtcttctggacagacacagtgcagaacaaggtgttttctgtggacatcaatggcctgaacatccaggaggtgctgaatgtgtctgtggagaccccagagaacctggccgtggactgggtgaacaacaagatctacctggtggagaccaaggtgaacagaattgacatggtgaacctggatggcagctacagagtgaccctcatcacagagaacctgggccacccccggggcattgctgtggaccccaccgtgggctacctgttcttcagtgactgggagagcctgtctggagagcccaagctggagcgggccttcatggatggcagcaacaggaaggacctggtgaagaccaagctgggctggccagctggggtgaccctggacatgatcagcaagagggtgtactgggtggacagcagatttgactacattgaaacagtgacctatgatggcatccagaggaagacagtggtgcacggcggcagcctcatcccccacccctttggagtgtccctgtttgagggccaggtgttcttcacagactggaccaagatggctgtgctgaaggccaacaagttcacagagaccaacccccaggtgtactaccaggccagcctgcggccctacggcgtgacagtgtaccacagcctgcggcagccctatgccaccaacccctgcaaggacaacaatggaggctgtgagcaggtgtgtgtgctgagccacaggacagacaatgatggcctgggcttccgctgcaagtgcaccttcggcttccagctggacacagatgagcggcactgcatcgctgtgcagaacttcctgatcttcagcagccaggtggccatccggggcatccccttcaccctgagcacccaggaggatgtgatggtgcctgtgtctggcaaccccagcttctttgtgggcatcgactttgatgcccaggacagcaccatcttcttcagtgacatgagcaagcacatgatcttcaagcagaagattgatggcaccggccgggagatcctggccgccaacagagtggagaatgtggagagcctggcctttgactggatcagcaagaacctgtactggacagacagccactacaagagcatctctgtgatgaggctggccgacaagaccaggagaacagtggtgcagtacctgaacaaccccaggtctgtggtggtgcacccctttgctggctacctgttcttcacagactggttccggcctgccaagatcatgagggcctggagcgatggcagccacctgctgcctgtgatcaacaccaccctgggctggcccaacggcctggccatcgactgggccgccagccggctgtactgggtggatgcctactttgacaagattgagcacagcacctttgatggcctggacagaagaaggctgggccacatcgagcagatgacccaccccttcggcctggccatctttggagagcacctgttcttcacagactggaggctgggcgccatcatccgggtgaggaaggcagatggaggagagatgaccgtcatccgcagcggcatcgcctacatcctgcacctgaagagctatgatgtgaacatccagacaggcagcaatgcctgcaaccagcccacccaccccaatggagactgcagccacttctgcttccctgtgcccaacttccagagggtgtgtggctgcccctacggcatgaggctggccagcaaccacctgacctgtgagggggaccccaccaatgaaccacccacagagcagtgtggcctcttctccttcccctgcaagaatggccgctgtgtgcccaactactacctgtgtgatggagtggatgactgccacgacaacagtgatgagcagctgtgtggcaccctgaacaacacctgcagcagcagcgccttcacctgtggccacggggagtgcatcccagcccactggaggtgtgacaagagaaatgactgtgtggatggcagtgatgagcacaactgccccacccacgccccagccagctgcctggacacccagtacacctgtgacaaccaccagtgcatcagcaagaactgggtgtgtgacacagacaatgactgtggagatggcagtgatgagaagaactgcaacagcacagagacctgccagcccagccagttcaactgccccaaccaccgctgcatcgacctgagctttgtgtgtgatggagacaaggactgtgtggatggcagtgatgaggtgggctgtgtgctgaactgcacagccagccagttcaagtgtgccagcggggacaagtgcattggagtgaccaacagatgtgatggagtgtttgactgcagcgacaacagtgatgaggccggctgccccacccggcccccaggcatgtgccacagtgatgagttccagtgccaggaggatggcatctgcatccccaacttctgggagtgtgatggccacccagactgcctgtatggcagtgatgagcacaatgcctgtgtgcccaagacctgccccagcagctacttccactgtgacaatggaaactgcatccaccgggcctggctgtgtgaccgggacaatgactgtggggacatgtctgatgagaaggactgccccacccagcccttccgctgccccagctggcagtggcagtgcctgggccacaacatctgtgtgaacctgtctgtggtgtgtgatggcatctttgactgccccaacggcacagatgagagccccctgtgcaatggaaacagctgcagcgacttcaatggaggctgcacccatgaatgtgtgcaggagccctttggagccaagtgcctgtgccccctgggcttcctgctggccaatgacagcaagacctgtgaagatattgatgaatgtgacatcctgggcagctgcagccagcactgctacaacatgaggggcagcttccgctgcagctgtgacaccggctacatgctggagagtgatggccgcacctgcaaggtgacagccagcgagagcctgctgctgctggtggccagccagaacaagatcatcgctgacagcgtgaccagccaggtgcacaacatctacagcctggtggagaatggcagctacatcgtggccgtggactttgacagcatcagcggccgcatcttctggagcgatgccacccagggcaagacctggagcgccttccagaatggaacagaccggcgggtggtgtttgacagcagcatcatcctgacagagaccatcgccatcgactgggtgggcaggaacctgtactggacagattatgccctggagaccatcgaggtgtccaagattgatggcagccacaggacagtgctgatcagcaagaacctgaccaacccccggggcctggccctggaccccaggatgaatgagcacctgctcttctggagcgactggggccaccaccccagaattgagcgggcctccatggatggctccatgaggacagtcatcgtgcaggacaagatcttctggccctgtggcctgaccatcgactaccccaaccggctgctgtacttcatggacagctacctggactacatggacttctgtgactacaacggccaccaccggcggcaggtgattgccagtgacctgatcatccgccacccctatgccctgaccctgtttgaggacagcgtgtactggacagaccgggccaccaggagagtgatgagggccaacaagtggcacggcggcaaccagagcgtggtgatgtacaacatccagtggcccctgggcatcgtggccgtgcaccccagcaagcagcccaacagcgtgaacccctgtgccttcagccgctgcagccacctgtgcctgctgagcagccagggcccccacttctacagctgtgtgtgccccagcggctggagcctgagcccagacctgctgaactgcctgagagatgaccagcccttcctgatcaccgtgcggcagcacatcatcttcggcatcagcctgaaccctgaggtgaagagcaatgatgccatggtgcccatcgccggcatccagaatggcctggatgtggagtttgatgatgctgagcagtacatctactgggtggagaaccctggagagatccaccgggtgaagacagatggcaccaacagaacagtgtttgccagcatctccatggtgggccccagcatgaacctggccctggactggatcagcaggaacctgtacagcaccaaccccaggacccagagcattgaggtgctgaccctgcatggagacatccgctacaggaagaccctgattgccaatgatggaacagccctgggcgtgggcttccccatcggcatcaccgtggaccctgcccggggcaagctgtactggagcgaccagggcacagacagcggcgtgcctgccaagatcgccagcgccaacatggatggcacctctgtgaagaccctcttcaccggcaacctggagcacctggagtgtgtgaccctggacatcgaggagcagaagctgtactgggccgtgacaggccggggcgtgattgaaagaggaaatgtggatggaacagacaggatgatcctggtgcaccagctgagccacccctggggcattgctgtgcatgacagcttcctgtactacacagatgagcagtatgaggtgattgagcgggtggacaaggccaccggggccaacaagatcgtgctgcgggacaacgtgcccaacctgcggggcctgcaggtgtaccacagaagaaatgctgctgagagcagcaatggctgcagcaacaacatgaatgcctgccagcagatctgcctgcctgtgcctgggggcctcttcagctgtgcctgtgccaccggcttcaagctgaacccagacaacagaagctgcagcccctacaacagcttcatcgtggtgtccatgctgagcgccatccggggcttcagcctggagctgagtgaccacagcgagaccatggtgcctgtggccggccagggcagaaatgccctgcacgtggatgtggatgtgagcagcggcttcatctactggtgtgacttcagcagctctgtggccagtgacaatgccatccgccgcatcaagccagatggcagcagcctgatgaacatcgtgacccacggcatcggggagaatggagtgcggggcattgctgtggactgggtggccggcaacctgtacttcaccaatgcctttgtgtctgagaccctgattgaggtgctgcgcatcaacaccacctacagaagagtgctgctgaaggtgacagtggacatgcccaggcacatcgtggtggaccccaagaaccgctacctgttctgggccgactatggccagaggcccaagattgaaagaagcttcctggactgcaccaacagaacagtgctggtgtctgagggcatcgtgaccccccggggcctggccgtggacagaagtgatggctacgtgtactgggtggatgacagcctggacatcatcgcccgcatccgcatcaacggggagaacagcgaggtgatccgctatggcagccgctaccccaccccctacggcatcaccgtgtttgaaaattccatcatctgggtggacaggaacctgaagaagatcttccaggccagcaaggagcctgagaacacagagccccccaccgtcatccgggacaacatcaactggctgagagatgtgaccatctttgacaagcaggtgcagcccaggagccctgctgaggtgaacaacaacccctgcctggagaacaacggcggctgcagccacctgtgctttgccctgcccggcctgcacacccccaagtgtgactgtgccttcggcaccctgcagagtgatggcaagaactgtgccatcagcacagagaacttcctgatctttgccctgagcaacagcctgcggagcctgcacctggaccctgagaaccacagcccccccttccagaccatcaacgtggagaggacagtgatgagcctggactatgacagcgtgtctgaccgcatctacttcacccagaacctggccagcggcgtgggccagatctcctatgccaccctgagcagcggcatccacacccccaccgtgattgccagcggcattggaacagcagatggcatcgcctttgactggatcacccggcgcatctactacagcgactacctgaaccagatgatcaacagcatggctgaagatggcagcaacagaacagtgattgcccgggtgcccaagccccgggccatcgtgctggacccctgccagggctacctgtactgggccgactgggacacccacgccaagattgaaagagccaccctgggcggcaacttccgggtgcccatcgtgaacagcagcctggtgatgcccagcggcctgaccctggactatgaggaggacctgctgtactgggtggatgccagcctgcagagaattgaaagaagcaccctgactggagtggaccgggaggtgattgtgaatgctgctgtgcacgccttcggcctgaccctgtatggccagtacatctactggacagacctgtacacccagaggatctaccgggccaacaagtatgatggcagcggccagatcgccatgaccaccaacctgctgagccagccccggggcatcaacacagtggtgaagaaccagaagcagcagtgcaacaacccctgtgagcagttcaatggaggctgcagccacatctgtgcccctggccccaatggagctgagtgccagtgcccccatgagggcaactggtacctggccaacaacaggaagcactgcatcgtggacaacggggagcgctgtggggccagcagcttcacctgcagcaatggccgctgcatcagcgaggagtggaagtgtgacaatgacaatgactgtggagatggcagtgatgagatggagagcgtgtgtgccctgcacacctgcagccccacagccttcacctgtgccaacggccgctgtgtgcagtacagctaccgctgtgactactacaatgactgtggagatggcagtgatgaagctggctgcctcttccgggactgcaatgccaccacagagttcatgtgcaacaacagacgctgcatcccccgggagttcatctgcaatggagtggacaactgccacgacaacaacaccagtgatgagaagaactgcccagacaggacctgccagagcggctacaccaagtgccacaacagcaacatctgcatcccccgggtgtacctgtgtgatggagacaatgactgtggggacaacagtgatgagaaccccacctactgcaccacccacacctgcagcagcagcgagttccagtgtgccagcggccgctgcatcccccagcactggtactgtgaccaggagacagactgctttgatgccagtgatgagcccgccagctgtggccacagcgagaggacctgcctggctgatgagttcaagtgtgatggcggccgctgcatccccagcgagtggatctgtgatggagacaatgactgtggggacatgtctgatgaggacaagaggcaccagtgccagaaccagaactgcagcgacagcgagttcctgtgtgtgaatgaccggcccccagaccggcgctgcatcccccagagctgggtgtgtgatggagatgtggactgcacagatggctatgatgagaaccagaactgcaccaggaggacctgcagtgaaaatgagttcacctgtggctacggcctgtgcatccccaagatcttccgctgtgacagacacaatgactgtggggactacagtgatgagcggggctgcctgtaccagacctgccagcagaaccagttcacctgccagaatggccgctgcatcagcaagacctttgtgtgtgatgaagataatgactgtggagatggcagtgatgagctgatgcacctgtgccacaccccagagcccacctgcccccctcatgagttcaagtgtgacaatggccgctgcatcgagatgatgaagctgtgcaaccacctggatgactgcctggacaacagtgatgagaagggctgcggcatcaatgaatgtcatgaccccagcatcagcggctgtgaccacaactgcacagacaccctgaccagcttctactgcagctgcaggcctggctacaagctgatgtctgacaagaggacctgtgtggacattgatgaatgtacagagatgccctttgtgtgcagccagaagtgtgaaaatgtgattggcagctacatctgcaagtgtgcccctggctacctgcgggagccagatggcaagacctgccggcagaacagcaacatcgagccctacctgatcttcagcaaccgctactacctgaggaacctgaccattgatggctacttctacagcctcatcctggagggcctggacaacgtggtggccctggactttgacagagtggagaagaggctgtactggattgacacccagaggcaggtgattgaaagaatgttcctgaacaagaccaacaaggagaccatcatcaaccaccggctgcctgctgctgagagcctggccgtggactgggtgtccaggaagctgtactggctggatgcccggctggatggcctgtttgtgtctgacctgaatggaggccacaggaggatgctggcccagcactgtgtggatgccaacaacaccttctgctttgacaacccccggggcctggccctgcacccccagtatggctacctgtactgggccgactggggccaccgggcctacatcggccgggtgggcatggatggcaccaacaagagcgtcatcatcagcaccaagctggagtggcccaacggcatcaccatcgactacaccaatgacctgctgtactgggcagatgcccacctgggctacatcgagtacagcgacctggagggccaccaccgccacacagtgtatgatggagccctgccccacccctttgccatcaccatctttgaggacaccatctactggacagactggaacaccaggacagtggagaagggcaacaagtatgatggcagcaaccggcagaccctggtgaacaccacccaccggccctttgacatccacgtgtaccacccctaccggcagcccatcgtgagcaacccctgtggcaccaacaatggaggctgcagccacctgtgcctgatcaagccaggcggcaagggcttcacctgtgagtgcccagatgacttccgcaccctgcagctgagcggcagcacctactgcatgcccatgtgcagcagcacccagttcctgtgtgccaacaatgagaagtgcatccccatctggtggaagtgtgatggccagaaggactgcagtgatggcagtgatgagctggccctgtgcccccagcgcttctgccgcctgggccagttccagtgcagtgatggcaactgcaccagcccccagaccctgtgcaatgcccaccagaactgcccagatggcagtgatgaggaccggctgctgtgtgagaaccaccactgtgacagcaatgagtggcagtgtgccaacaagcgctgcatccctgagagctggcagtgtgacaccttcaatgactgtgaggacaacagtgatgaggacagcagccactgtgccagcaggacctgcaggcctggccagttccgctgtgccaacggccgctgcatcccccaggcctggaagtgtgatgtggacaatgactgtggggaccacagtgatgagcccatcgaggagtgcatgagcagcgcccacctgtgtgacaacttcacagagttcagctgcaagaccaactaccgctgcatccccaagtgggccgtgtgcaatggagtggatgactgccgggacaacagtgatgagcagggctgtgaggagaggacctgccaccctgtgggggacttccgctgcaagaaccaccactgcatccccctgcgctggcagtgtgatggccagaatgactgtggggacaacagtgatgaggagaactgtgccccccgggagtgcacagagagcgagttccgctgtgtgaaccagcagtgcatccccagccgctggatctgtgaccactacaatgactgtggggacaacagtgatgagcgggactgtgagatgaggacctgccaccctgagtacttccagtgcaccagcggccactgtgtgcacagcgagctgaagtgtgatggcagcgctgactgcctggatgccagtgatgaggccgactgccccacccgcttcccagatggagcctactgccaggccaccatgtttgagtgcaagaaccacgtgtgcatccccccctactggaagtgtgatggagatgatgactgtggagatggcagtgatgaggagctgcacctgtgcctggatgtgccctgcaacagccccaaccgcttccgctgtgacaacaaccgctgcatctacagccatgaggtgtgcaatggagtggatgactgtggagatggaacagatgaaacagaggagcactgcaggaagcccacccccaagccctgcacagaatatgagtacaagtgtggaaatggccactgcatcccccatgacaacgtgtgtgatgatgctgatgactgtggggactggagcgatgagctgggctgcaacaagggcaaggagaggacctgtgccgagaacatctgtgagcagaactgcacccagctgaatgaaggaggcttcatctgcagctgcacagctggctttgagaccaacgtgtttgacaggaccagctgcctggacatcaatgaatgtgagcagtttggcacctgcccccagcactgcaggaacaccaagggcagctatgaatgtgtgtgtgctgatggcttcacctccatgtctgacaggcctgggaagagatgtgccgctgagggcagcagccccctgctgctgctgcctgacaacgtgcgcatcaggaagtacaacctgagcagcgagcgcttcagcgagtacctgcaggatgaggagtacatccaggccgtggactatgactgggaccccaaggacatcggcctgtctgtggtgtactacacagtgcggggggagggcagcagatttggagccatcaagagggcctacatccccaactttgaaagtggaagaaacaacctggtgcaggaggtggacctgaagctgaagtatgtgatgcagccagatggcattgctgtggactgggtgggccgccacatctactggagcgatgtgaagaacaagagaattgaggtggccaagctggatggccgctacaggaagtggctgatcagcacagacctggaccagcctgctgccatcgctgtgaaccccaagctgggcctgatgttctggacagactggggcaaggagcccaagattgagagcgcctggatgaatggagaggacaggaacatcctggtgtttgaggacctgggctggcccaccggcctgagcattgactacctgaacaatgaccgcatctactggagcgacttcaaggaggatgtgattgagaccatcaagtatgatggaacagaccggcgggtgattgccaaggaggccatgaacccctacagcctggacatctttgaggaccagctgtactggatcagcaaggagaagggggaggtgtggaagcagaacaagtttggccagggcaagaaggagaagaccctggtggtgaacccctggctgacccaggtgcgcatcttccaccagctgcgctacaacaagtctgtgcccaacctgtgcaagcagatctgcagccacctgtgcctgctgcggcctgggggctacagctgtgcctgcccccagggcagcagcttcatcgagggcagcaccacagaatgtgatgctgccatcgagctgcccatcaacctgcccccaccctgccgctgcatgcatggaggcaactgctactttgatgaaacagacctgcccaagtgcaagtgccccagcggctacaccgggaagtactgtgagatggccttcagcaagggcatcagccctggcaccacagctgtggccgtgctgctgaccatcctgctgattgtggtgattggagccctggccatcgccggcttcttccactacagaagaacaggcagcctgctgcctgccctgcccaagctgcccagcctgagcagcctggtgaagcccagtgaaaatggaaatggagtgaccttccgctctggagctgacctgaacatggacattggagtgtctggcttcggccctgagacagccatcgaccgctccatggccatgtctgaggactttgtgatggagatgggcaagcagcccatcatctttgagaaccccatgtacagcgcccgggacagcgctgtgaaggtggtgcagcccatccaggtgacagtgtctgaaaatgtggacaacaagaactacggcagccccatcaaccccagcgagatcgtgcctgagaccaaccccaccagccctgctgctgatggcacccaggtgaccaagtggaacctcttcaagaggaagagcaagcagaccaccaactttgagaaccccatctatgcccagatggagaatgagcagaaggagagcgtggccgccaccccaccacccagccccagcctgcctgccaagcccaagccacccagccggcgggaccccacccccacctacagcgccacagaggacaccttcaaggacacagccaacctggtgaaggaggacagcgaggtgtag

SEQ ID NO: 147122 - DNA, 3678 bp, Artificial Sequence
  derived and/or modified sequence
atggaccggggccctgctgctgtggcctgcaccctgctgctggccctggtggcctgcctggccccagccagcggccaggagtgtgacagcgcccacttccgctgtggcagcggccactgcatcccagctgactggaggtgtgatggcaccaaggactgcagtgatgatgctgatgagatcggctgtgctgtggtgacctgccagcagggctacttcaagtgccagagcgagggccagtgcatccccaacagctgggtgtgtgaccaggaccaggactgtgatgatggcagtgatgagcggcaggactgcagccagagcacctgcagcagccaccagatcacctgcagcaatggccagtgcatccccagcgagtaccgctgtgaccacgtgcgggactgcccagatggagcagatgaaaatgactgccagtaccccacctgtgagcagctgacctgtgacaacggggcctgctacaacaccagccagaagtgtgactggaaggtggactgccgggacagcagtgatgagatcaactgcacagagatctgcctgcacaatgagttcagctgtggaaatggagagtgcatcccccgggcctacgtgtgtgaccatgacaatgactgccaggacggcagtgatgaacatgcctgcaactaccccacctgtggcggctaccagttcacctgccccagcggccgctgcatctaccagaactgggtgtgtgatggagaagatgactgcaaggacaatggagatgaagatggctgtgagagcggcccccatgatgtgcacaagtgcagcccccgggagtggagctgcccagagagcggccgctgcatcagcatctacaaggtgtgtgatggcatcctggactgccccggccgggaggatgagaacaacaccagcacaggcaagtactgcagcatgaccctgtgcagcgccctgaactgccagtaccagtgccacgagaccccctacggcggggcctgcttctgccccccaggctacatcatcaaccacaatgacagcaggacctgtgtggagtttgatgactgccagatctggggcatctgtgaccagaagtgtgagagccggcccggccgccacctgtgccactgtgaggagggctacatcctggagcggggccagtactgcaaggccaatgacagctttggagaggccagcatcatcttcagcaatggccgggacctgctgattggagacatccacggccgctccttccgcatcctggtggagagccagaacagaggagtggccgtgggcgtggccttccactaccacctgcagagggtcttctggacagacacagtgcagaacaaggtgttttctgtggacatcaatggcctgaacatccaggaggtgctgaatgtgtctgtggagaccccagagaacctggccgtggactgggtgaacaacaagatctacctggtggagaccaaggtgaacagaattgacatggtgaacctggatggcagctacagagtgaccctcatcacagagaacctgggccacccccggggcattgctgtggaccccaccgtgggcaagacagtggtgcatggaggcagcctcatcccccaccccttcggcgtgtccctgtttgagggccaggtgttcttcacagactggaccaagatggctgtgctgaaggccaacaagttcacagagaccaacccccaggtgtactaccaggccagcctgcggccctatggagtgacagtgtaccacagcctgcggcagccctatgccaccaacccctgcaaggacaacaacggcggctgtgagcaggtgtgtgtgctgagccacaggacagacaatgatggcctgggcttccgctgcaagtgcaccttcggcttccagctggacacagatgagcggcactgcatcggccgggagatcctggccgccaacagagtggagaatgtggagagcctggcctttgactggatcagcaagaacctgtactggacagacagccactacaagagcatctctgtgatgaggctggccgacaagaccaggagaacagtggtgcagtacctgaacaaccccaggtctgtggtggtgcacccctttgctggctacctgttcttcacagactggttccggcctgccaagatcatgagggcctggagcgatggcagccacctgctgcccgtcatcaacaccaccctgggctggcccaacggcctggccatcgactgggccgccagccggctgtactgggtggatgcctactttgacaagattgagcacagcacctttgatggcctggacagaagaaggctgggccacatcgagcagatgacccaccccttcggcctggccatctttggagagcacctgttcttcacagactggaggctgggcgccatcatccgggtgaggaaggcagatggaggagagatgaccgtcatccgctctggaattgcctacatcctgcacctgaagagctatgatgtgaacatccagacaggcagcaatgcctgcaaccagcccacccaccccaacggggactgcagccacttctgcttccctgtgcccaacttccagagggtgtgtggctgcccctacggcatgaggctggccagcaaccacctgacctgtgagggggaccccaccaatgagcccccaacagagcagtgtggcctcttctccttcccctgcaagaatggccgctgtgtgcccaactactacctgtgtgatggagtggatgactgccacgacaacagtgatgagcagctgtgtggcaccctgaacaacacctgcagcagcagcgccttcacctgtggccatggagagtgcatcccagcccactggaggtgtgacaagagaaatgactgtgtggatggcagtgatgagcacaactgccccacccacgccccagccagctgcctggacacccagtacacctgtgacaaccaccagtgcatcagcaagaactgggtgtgtgacacagacaatgactgtggagatggcagtgatgagaagaactgcaacagcacagagacctgccagcccagccagttcaactgccccaaccaccgctgcatcgacctgagctttgtgtgtgatggagacaaggactgtgtggatggcagtgatgaggtgggctgtgtgctgaactgcacagccagccagttcaagtgtgccagcggggacaagtgcatcggcgtgaccaacagatgtgatggagtgtttgactgcagcgacaacagtgatgaagctggctgccccaccaggcctcctggcatgtgccacagtgatgagttccagtgccaggaggatggcatctgcatccccaacttctgggagtgtgatggccacccagactgcctgtatggcagtgatgagcacaatgcctgtgtgcccaagacctgccccagcagctacttccactgtgacaatggaaactgcatccaccgggcctggctgtgtgaccgggacaatgactgtggggacatgtctgatgagaaggactgccccacccagcccttccgctgccccagctggcagtggcagtgcctgggccacaacatctgtgtgaacctgtctgtggtgtgtgatggcatctttgactgccccaatggaacagatgagagccccctgtgcagcaagttcccagaccacagcctgctggccatcaacagcttctag

SEQ ID NO: 147123 - DNA, 1941 bp, Artificial Sequence
  derived and/or modified sequence
atgctggcccagcactgtgtggatgccaacaacaccttctgctttgacaacccccggggcctggccctgcacccccagtatggctacctgtactgggccgactggggccaccgggcctacatcggccgggtgggcatggatggcaccaacaagagcgtcatcatcagcaccaagctggagtggcccaacggcatcaccatcgactacaccaatgacctgctgtactgggcagatgcccacctgggctacatcgagtacagcgacctggagggccaccaccgccacacagtgtatgatggagccctgccccacccctttgccatcaccatctttgaggacaccatctactggacagactggaacaccaggacagtggagaagggcaacaagtatgatggcagcaaccggcagaccctggtgaacaccacccaccggccctttgacatccacgtgtaccacccctaccggcagcccatcgtgagcaacccctgtggcaccaacaacggcggctgcagccacctgtgcctgatcaagccaggcggcaagggcttcacctgtgaatgtccagatgacttccgcaccctgcagctgagcggcagcacctactgcatgcccatgtgcagcagcacccagttcctgtgtgccaacaatgagaagtgcatccccatctggtggaagtgtgatggccagaaggactgcagtgatggcagtgatgagctggccctgtgcccccagcgcttctgccgcctgggccagttccagtgcagtgatggcaactgcaccagcccccagaccctgtgcaatgcccaccagaactgcccagatggcagtgatgaagatcggctgctgtgtgagaaccaccactgtgacagcaatgagtggcagtgtgccaacaagcgctgcatccctgagagctggcagtgtgacaccttcaatgactgtgaggacaacagtgatgaggacagcagccactgtgccagcaggacctgccggcccggccagttccgctgtgccaacggccgctgcatcccccaggcctggaagtgtgatgtggacaatgactgtggggaccacagtgatgagcccatcgaggagtgcatgagcagcgcccacctgtgtgacaacttcacagagttcagctgcaagaccaactaccgctgcatccccaagtgggccgtgtgcaatggagtggatgactgccgggacaacagtgatgagcagggctgtgaggagaggacctgccaccctgtgggggacttccgctgcaagaaccaccactgcatccccctgcgctggcagtgtgatggccagaatgactgtggggacaacagtgatgaggagaactgtgcccccagagaatgtacagaaagtgagttccgctgtgtgaaccagcagtgcatccccagccgctggatctgtgaccactacaatgactgtggggacaacagtgatgagcgggactgtggcatgaggctgatgaagctgattgtgccccacgccttcctgatggtgcacacagcccggctgctgtgcagcaatgccaagaccatgtttgtgagccgccacatcggaaatgtgatggccatgatgacagtggccatggtgcagatgaagaacttcacctgtgcctggatgtttcctgtgatccaccagacagtgtctggagtgaccaccatcgccgccttcatcgtgatgagatgtgccatggtgtggatgacagtggagatggagctgatgaggcagaggagcacagtggagaaccggcccctgaacctggtgcagaacatgaacatctctgtggccatgggcatcgccttccacatgaccatgtgtgtgatgatgcccatgacagtggtgacaggccccatgaactgggtggccatcaaggagaagaaggagcacgtgctgaagatctatgccagcaagatcgtgcccaactag

SEQ ID NO: 147124 - DNA, 15808 bp, Artificial Sequence
  derived and/or modified sequence
aaagtgcagggggcgggccgggcggcagggggcctgcccgctggattcccgcatgcttgttccggggcggtcgggtctaaagggctttatgcactgtctggagggtggggactggcgcgggtagaaaacgggatgcctcgggcgtgggggcaggcttttggccactaggagctggcggaggtgcagacctaaaggagcgttcgctagcagaggcgctgccggtgcggtgtgctacgcgcgcccacctcccggggaaggaacggcgaggccggggaccgtcgcggagatggatcgcgggccggcagcagtggcgtgcacgctgctcctggctctcgtcgcctgcctagcgccggccagtggccaagaatgtgacagtgcgcattttcgctgtggaagtgggcattgcatccctgcagactggaggtgtgatgggaccaaagactgttcagatgacgcggatgaaattggctgcgctgttgtgacctgccagcagggctatttcaagtgccagagtgagggacaatgcatccccaactcctgggtgtgtgaccaagatcaagactgtgatgatggctcagatgaacgtcaagattgctcacaaagtacatgctcaagtcatcagataacatgctccaatggtcagtgtatcccaagtgaatacaggtgcgaccacgtcagagactgccccgatggagctgatgagaatgactgccagtacccaacatgtgagcagcttacttgtgacaatggggcctgctataacaccagtcagaagtgtgattggaaagttgattgcagggactcctcagatgaaatcaactgcactgagatatgcttgcacaatgagttttcatgtggcaatggagagtgtatccctcgtgcttatgtctgtgaccatgacaatgattgccaagacggcagtgacgaacatgcttgcaactatccgacctgcggtggttaccagttcacttgccccagtggccgatgcatttatcaaaactgggtttgtgatggagaagatgactgtaaagataatggagatgaagatggatgtgaaagcggtcctcatgatgttcataaatgttccccaagagaatggtcttgcccagagtcgggacgatgcatctccatttataaagtttgtgatgggattttagattgcccaggaagagaagatgaaaacaacactagtaccggaaaatactgtagtatgactctgtgctctgccttgaactgccagtaccagtgccatgagacgccgtatggaggagcgtgtttttgtcccccaggttatatcatcaaccacaatgacagccgtacctgtgttgagtttgatgattgccagatatggggaatttgtgaccagaagtgtgaaagccgacctggccgtcacctgtgccactgtgaagaagggtatatcttggagcgtggacagtattgcaaagctaatgattcctttggcgaggcctccattatcttctccaatggtcgggatttgttaattggtgatattcatggaaggagcttccggatcctagtggagtctcagaatcgtggagtggccgtgggtgtggctttccactatcacctgcaaagagttttttggacagacaccgtgcaaaataaggttttttcagttgacattaatggtttaaatatccaagaggttctcaatgtttctgttgaaaccccagagaacctggctgtggactgggttaataataaaatctatctagtggaaaccaaggtcaaccgcatagatatggtaaatttggatggaagctatcgggttacccttataactgaaaacttggggcatcctagaggaattgccgtggacccaactgttggttatttatttttctcagattgggagagcctttctggggaacctaagctggaaagggcattcatggatggcagcaaccgtaaagacttggtgaaaacaaagctgggatggcctgctggggtaactctggatatgatatcgaagcgtgtttactgggttgactctcggtttgattacattgaaactgtaacttatgatggaattcaaaggaagactgtagttcatggaggctccctcattcctcatccctttggagtaagcttatttgaaggtcaggtgttctttacagattggacaaagatggccgtgctgaaggcaaacaagttcacagagaccaacccacaagtgtactaccaggcttccctgaggccctatggagtgactgtttaccattccctcagacagccctatgctaccaatccgtgtaaagataacaatgggggctgtgagcaggtctgtgtcctcagccacagaacagataatgatggtttgggtttccgttgcaagtgcacattcggcttccaactggatacagatgagcgccactgcattgctgttcagaatttcctcattttttcatcccaagttgctattcgtgggatcccgttcaccttgtctacccaggaagatgtcatggttccagtttcggggaatccttctttctttgtcgggattgattttgacgcccaggacagcactatctttttttcagatatgtcaaaacacatgatttttaagcaaaagattgatggcacaggaagagaaattctcgcagctaacagggtggaaaatgttgaaagtttggcttttgattggatttcaaagaatctctattggacagactctcattacaagagtatcagtgtcatgaggctagctgataaaacgagacgcacagtagttcagtatttaaataacccacggtcggtggtagttcatccttttgccgggtatctattcttcactgattggttccgtcctgctaaaattatgagagcatggagtgacggatctcacctcttgcctgtaataaacactactcttggatggcccaatggcttggccatcgattgggctgcttcacgattgtactgggtagatgcctattttgataaaattgagcacagcacctttgatggtttagacagaagaagactgggccatatagagcagatgacacatccgtttggacttgccatctttggagagcatttattttttactgactggagactgggtgccattattcgagtcaggaaagcagatggtggagaaatgacagttatccgaagtggcattgcttacatactgcatttgaaatcgtatgatgtcaacatccagactggttctaacgcctgtaatcaacccacgcatcctaacggtgactgcagccacttctgcttcccggtgccaaatttccagcgagtgtgtgggtgcccttatggaatgaggctggcttccaatcacttgacatgcgagggggacccaaccaatgaaccacccacagagcagtgtggcttattttccttcccctgtaaaaatggcagatgtgtgcccaattactatctctgtgatggagtcgatgattgtcatgataacagtgatgagcaactatgtggcacacttaataatacctgttcatcttcggcgttcacctgtggccatggggagtgcattcctgcacactggcgctgtgacaaacgcaacgactgtgtggatggcagtgatgagcacaactgccccacccacgcacctgcttcctgccttgacacccaatacacctgtgataatcaccagtgtatctcaaagaactgggtctgtgacacagacaatgattgtggggatggatctgatgaaaagaactgcaattcgacagagacatgccaacctagtcagtttaattgccccaatcatcgatgtattgacctatcgtttgtctgtgatggtgacaaggattgtgttgatggatctgatgaggttggttgtgtattaaactgtactgcttctcaattcaagtgtgccagtggggataaatgtattggcgtcacaaatcgttgtgatggtgtttttgattgcagtgacaactcggatgaagcaggctgtccaaccaggcctcctggtatgtgccactcagatgaatttcagtgccaagaagatggtatctgcatcccgaacttctgggaatgtgatgggcatccagactgcctctatggatctgatgagcacaatgcctgtgtccccaagacttgcccttcatcatatttccactgtgacaacggaaactgcatccacagggcatggctctgtgatcgggacaatgactgcggggatatgagtgatgagaaggactgccctactcagccctttcgctgtcctagttggcaatggcagtgtcttggccataacatctgtgtgaatctgagtgtagtgtgtgatggcatctttgactgccccaatgggacagatgagtccccactttgcaatgggaacagctgctcagatttcaatggtggttgtactcacgagtgtgttcaagagccctttggggctaaatgcctatgtccattgggattcttacttgccaatgattctaagacctgtgaagacatagatgaatgtgatattctaggctcttgtagccagcactgttacaatatgagaggttctttccggtgctcgtgtgatacaggctacatgttagaaagtgatgggaggacttgcaaagttacagcatctgagagtctgctgttacttgtggcaagtcagaacaaaattattgccgacagtgtcacctcccaggtccacaatatctattcattggtcgagaatggttcttacattgtagctgttgattttgattcaattagtggtcgtatcttttggtctgatgcaactcagggtaaaacctggagtgcgtttcaaaatggaacggacagaagagtggtatttgacagtagcatcatcttgactgaaactattgcaatagattgggtaggtcgtaatctttactggacagactatgctctggaaacaattgaagtctccaaaattgatgggagccacaggactgtgctgattagtaaaaacctaacaaatccaagaggactagcattagatcccagaatgaatgagcatctactgttctggtctgactggggccaccaccctcgcatcgagcgagccagcatggacggcagcatgcgcactgtcattgtccaggacaagatcttctggccctgcggcttaactattgactaccccaacagactgctctacttcatggactcctatcttgattacatggacttttgtgattataatggacaccatcggagacaggtgatagccagtgatttgattatacggcacccctatgccctaactctctttgaagactctgtgtactggactgaccgtgctactcgtcgggttatgcgagccaacaagtggcatggagggaaccagtcagttgtaatgtataatattcaatggccccttgggattgttgcggttcatccttcgaaacaaccaaattccgtgaatccatgtgccttttcccgctgcagccatctctgcctgctttcctcacaggggcctcatttttactcctgtgtttgtccttcaggatggagtctgtctcctgatctcctgaattgcttgagagatgatcaacctttcttaataactgtaaggcaacatataatttttggaatctcccttaatcctgaggtgaagagcaatgatgctatggtccccatagcagggatacagaatggtttagatgttgaatttgatgatgctgagcaatacatctattgggttgaaaatccaggtgaaattcacagagtgaagacagatggcaccaacaggacagtatttgcttctatatctatggtggggccttctatgaacctggccttagattggatttcaagaaacctttattctaccaatcctagaactcagtcaatcgaggttttgacactccacggagatatcagatacagaaaaacattgattgccaatgatgggacagctcttggagttggctttccaattggcataactgttgatcctgctcgtgggaagctgtactggtcagaccaaggaactgacagtggggttcctgccaagatcgccagtgctaacatggatggcacatctgtgaaaactctctttactgggaacctcgaacacctggagtgtgtcactcttgacatcgaagagcagaaactctactgggcagtcactggaagaggagtgattgaaagaggaaacgtggatggaacagatcgaatgatcctggtacaccagctttcccacccctggggaattgcagtccatgattctttcctttattatactgatgaacagtatgaggtcattgaaagagttgataaggccactggggccaacaaaatagtcttgagagataatgttccaaatctgaggggtcttcaagtttatcacagacgcaatgccgccgaatcctcaaatggctgtagcaacaacatgaatgcctgtcagcagatttgcctgcctgtaccaggaggattgttttcctgcgcctgtgccactggatttaaactcaatcctgataatcggtcctgctctccatataactctttcattgttgtttcaatgctgtctgcaatcagaggctttagcttggaattgtcagatcattcagaaaccatggtgccggtggcaggccaaggacgaaacgcactgcatgtggatgtggatgtgtcctctggctttatttattggtgtgattttagcagctcagtggcatctgataatgcgatccgtagaattaaaccagatggatcttctctgatgaacattgtgacacatggaataggagaaaatggagtccggggtattgcagtggattgggtagcaggaaatctttatttcaccaatgcctttgtttctgaaacactgatagaagttctgcggatcaatactacttaccgccgtgttcttcttaaagtcacagtggacatgcctaggcatattgttgtagatcccaagaacagatacctcttctgggctgactatgggcagagaccaaagattgagcgttctttccttgactgtaccaatcgaacagtgcttgtgtcagagggcattgtcacaccacggggcttggcagtggaccgaagtgatggctacgtttattgggttgatgattctttagatataattgcaaggattcgtatcaatggagagaactctgaagtgattcgttatggcagtcgttacccaactccttatggcatcactgtttttgaaaattctatcatatgggtagataggaatttgaaaaagatcttccaagccagcaaggaaccagagaacacagagccacccacagtgataagagacaatatcaactggctaagagatgtgaccatctttgacaagcaagtccagccccggtcaccagcagaggtcaacaacaacccttgcttggaaaacaatggtgggtgctctcatctctgctttgctctgcctggattgcacaccccaaaatgtgactgtgcctttgggaccctgcaaagtgatggcaagaattgtgccatttcaacagaaaatttcctcatctttgccttgtctaattccttgagaagcttacacttggaccctgaaaaccatagcccacctttccaaacaataaatgtggaaagaactgtcatgtctctagactatgacagtgtaagtgatagaatctacttcacacaaaatttagcctctggagttggacagatttcctatgccaccctgtcttcagggatccatactccaactgtcattgcttcaggtatagggactgctgatggcattgcctttgactggattactagaagaatttattacagtgactacctcaaccagatgattaattccatggctgaagatgggtctaaccgcactgtgatagcccgcgttccaaaaccaagagcaattgtgttagatccctgccaagggtacctgtactgggctgactgggatacacatgccaaaatcgagagagccacattgggaggaaacttccgcgtacccattgtgaacagcagtctggtcatgcccagtgggctgactctggactatgaagaggaccttctctactgggtggatgctagtctgcagaggattgaacgcagcactctgacgggcgtggatcgtgaagtcattgtcaatgcagccgttcatgcttttggcttgactctctatggccagtatatttactggactgacttgtacacacaaagaatttaccgagctaacaaatatgacgggtcaggtcagattgcaatgaccacaaatttgctctcccagcccaggggaatcaacactgttgtgaagaaccagaaacaacagtgtaacaatccttgtgaacagtttaatgggggctgcagccatatctgtgcaccaggtccaaatggtgccgagtgccagtgtccacatgagggcaactggtatttggccaacaacaggaagcactgcattgtggacaatggtgaacgatgtggtgcatcttccttcacctgctccaatgggcgctgcatctcggaagagtggaagtgtgataatgacaacgactgtggggatggcagtgatgagatggaaagtgtctgtgcacttcacacctgctcaccgacagccttcacctgtgccaatgggcgatgtgtccaatactcttaccgctgtgattactacaatgactgtggtgatggcagtgatgaggcagggtgcctgttcagggactgcaatgccaccacggagtttatgtgcaataacagaaggtgcatacctcgtgagtttatctgcaatggtgtagacaactgccatgataataacacttcagatgagaaaaattgccctgatcgcacttgccagtctggatacacaaaatgtcataattcaaatatttgtattcctcgcgtttatttgtgtgacggagacaatgactgtggagataacagtgatgaaaaccctacttattgcaccactcacacgtgcagcagcagtgagttccaatgcgcatctgggcgctgtattcctcaacattggtattgtgatcaagaaacagattgttttgatgcctctgatgaacctgcctcttgtggtcactctgagcgaacatgcctagctgatgagttcaagtgtgatggtgggaggtgcatcccaagcgaatggatctgtgacggtgataatgactgtggggatatgagtgacgaggataaaaggcaccagtgtcagaatcaaaactgctcggattccgagtttctctgtgtaaatgacagacctccggacaggaggtgcattccccagtcttgggtctgtgatggcgatgtggattgtactgacggctacgatgagaatcagaattgcaccaggagaacttgctctgaaaatgaattcacctgtggttacggactgtgtatcccaaagatattcaggtgtgaccggcacaatgactgtggtgactatagcgacgagaggggctgcttataccagacttgccaacagaatcagtttacctgtcagaacgggcgctgcattagtaaaaccttcgtctgtgatgaggataatgactgtggagacggatctgatgagctgatgcacctgtgccacaccccagaacccacgtgtccacctcacgagttcaagtgtgacaatgggcgctgcatcgagatgatgaaactctgcaaccacctagatgactgtttggacaacagcgatgagaaaggctgtggcattaatgaatgccatgacccttcaatcagtggctgcgatcacaactgcacagacaccttaaccagtttctattgttcctgtcgtcctggttacaagctcatgtctgacaagcggacttgtgttgatattgatgaatgcacagagatgccttttgtctgtagccagaagtgtgagaatgtaataggctcctacatctgtaagtgtgccccaggctacctccgagaaccagatggaaagacctgccggcaaaacagtaacatcgaaccctatctcatttttagcaaccgttactatttgagaaatttaactatagatggctatttttactccctcatcttggaaggactggacaatgttgtggcattagattttgaccgagtagagaagagattgtattggattgatacacagaggcaagtcattgagagaatgtttctgaataagacaaacaaggagacaatcataaaccacagactaccagctgcagaaagtctggctgtagactgggtttccagaaagctctactggttggatgcccgcctggatggcctctttgtctctgacctcaatggtggacaccgccgcatgctggcccagcactgtgtggatgccaacaacaccttctgctttgataatcccagaggacttgcccttcaccctcaatatgggtacctctactgggcagactggggtcaccgcgcatacattgggagagtaggcatggatggaaccaacaagtctgtgataatctccaccaagttagagtggcctaatggcatcaccattgattacaccaatgatctactctactgggcagatgcccacctgggttacatagagtactctgatttggagggccaccatcgacacacggtgtatgatggggcactgcctcaccctttcgctattaccatttttgaagacactatttattggacagattggaatacaaggacagtggaaaagggaaacaaatatgatggatcaaatagacagacactggtgaacacaacacacagaccatttgacatccatgtgtaccatccatataggcagcccattgtgagcaatccctgtggtaccaacaatggtggctgttctcatctctgcctcatcaagccaggaggaaaagggttcacttgcgagtgtccagatgacttccgcacccttcagctgagtggcagcacctactgcatgcccatgtgctccagcacccagttcctgtgcgctaacaatgaaaagtgcattcctatctggtggaaatgtgatggacagaaagactgctcagatggctctgatgaactggccctttgcccgcagcgcttctgccgactgggacagttccagtgcagtgacggcaactgcaccagcccgcagactttatgcaatgctcaccaaaattgccctgatgggtctgatgaagaccgtcttctttgtgagaatcaccactgtgactccaatgaatggcagtgcgccaacaaacgttgcatcccagaatcctggcagtgtgacacatttaacgactgtgaggataactcagatgaagacagttcccactgtgccagcaggacctgccggccgggccagtttcggtgtgctaatggccgctgcatcccgcaggcctggaagtgtgatgtggataatgattgtggagaccactcggatgagcccattgaagaatgcatgagctctgcccatctctgtgacaacttcacagaattcagctgcaaaacaaattaccgctgcatcccaaagtgggccgtgtgcaatggtgtagatgactgcagggacaacagtgatgagcaaggctgtgaggagaggacatgccatcctgtgggggatttccgctgtaaaaatcaccactgcatccctcttcgttggcagtgtgatgggcaaaatgactgtggagataactcagatgaggaaaactgtgctccccgggagtgcacagagagcgagtttcgatgtgtcaatcagcagtgcattccctcgcgatggatctgtgaccattacaacgactgtggggacaactcagatgaacgggactgtgagatgaggacctgccatcctgaatattttcagtgtacaagtggacattgtgtacacagtgaactgaaatgcgatggatccgctgactgtttggatgcgtctgatgaagctgattgtcccacacgctttcctgatggtgcatactgccaggctactatgttcgaatgcaaaaaccatgtttgtatcccgccatattggaaatgtgatggcgatgatgactgtggcgatggttcagatgaagaacttcacctgtgcttggatgttccctgtaattcaccaaaccgtttccggtgtgacaacaatcgctgcatttatagtcatgaggtgtgcaatggtgtggatgactgtggagatggaactgatgagacagaggagcactgtagaaaaccgacccctaaaccttgtacagaatatgaatataagtgtggcaatgggcattgcattccacatgacaatgtgtgtgatgatgccgatgactgtggtgactggtccgatgaactgggttgcaataaaggaaaagaaagaacatgtgctgaaaatatatgcgagcaaaattgtacccaattaaatgaaggaggatttatctgctcctgtacagctgggttcgaaaccaatgtttttgacagaacctcctgtctagatatcaatgaatgtgaacaatttgggacttgtccccagcactgcagaaataccaaaggaagttatgagtgtgtctgtgctgatggcttcacgtctatgagtgaccgccctggaaaacgatgtgcagctgagggtagctctcctttgttgctactgcctgacaatgtccgaattcgaaaatataatctctcatctgagaggttctcagagtatcttcaagatgaggaatatatccaagctgttgattatgattgggatcccaaggacataggcctcagtgttgtgtattacactgtgcgaggggagggctctaggtttggtgctatcaaacgtgcctacatccccaactttgaatccggccgcaataatcttgtgcaggaagttgacctgaaactgaaatacgtaatgcagccagatggaatagcagtggactgggttggaaggcatatttactggtcagatgtcaagaataaacgcattgaggtggctaaacttgatggaaggtacagaaagtggctgatttccactgacctggaccaaccagctgctattgctgtgaatcccaaactagggcttatgttctggactgactggggaaaggaacctaaaatcgagtctgcctggatgaatggagaggaccgcaacatcctggttttcgaggaccttggttggccaactggcctttctatcgattatttgaacaatgaccgaatctactggagtgacttcaaggaggacgttattgaaaccataaaatatgatgggactgataggagagtcattgcaaaggaagcaatgaacccttacagcctggacatctttgaagaccagttatactggatatctaaggaaaagggagaagtatggaaacaaaataaatttgggcaaggaaagaaagagaaaacgctggtagtgaacccttggctcactcaagttcgaatctttcatcaactcagatacaataagtcagtgcccaacctttgcaaacagatctgcagccacctctgccttctgagacctggaggatacagctgtgcctgtccccaaggctccagctttatagaggggagcaccactgagtgtgatgcagccatcgaactgcctatcaacctgccccccccatgcaggtgcatgcacggaggaaattgctattttgatgagactgacctccccaaatgcaagtgtcctagcggctacaccggaaaatattgtgaaatggcgttttcaaaaggcatctctccaggaacaaccgcagtagctgtgctgttgacaatcctcttgatcgtcgtaattggagctctggcaattgcaggattcttccactatagaaggaccggctcccttttgcctgctctgcccaagctgccaagcttaagcagtctcgtcaagccctctgaaaatgggaatggggtgaccttcagatcaggggcagatcttaacatggatattggagtgtctggttttggacctgagactgctattgacaggtcaatggcaatgagtgaagactttgtcatggaaatggggaagcagcccataatatttgaaaacccaatgtactcagccagagacagtgctgtcaaagtggttcagccaatccaggtgactgtatctgaaaatgtggataataagaattatggaagtcccataaacccttctgagatagttccagagacaaacccaacttcaccagctgctgatggaactcaggtgacaaaatggaatctcttcaaacgaaaatctaaacaaactaccaactttgaaaatccaatctatgcacagatggagaacgagcaaaaggaaagtgttgctgcgacaccacctccatcaccttcgctccctgctaagcctaagcctccttcgagaagagacccaactccaacctattctgcaacagaagacacttttaaagacaccgcaaatcttgttaaagaagactctgaagtatagctataccagctatttagggaataattagaaacacacttttgcacatatattttttacaaacagatgaaaaaagttaacattcagtactttatgaaaaaaatatatttttccctgtttgcctatagttggaggtatcctgtgtgtctttttttacttatgccgtctcatatttttacaaataattatcacaatgtactatatgtatatctttgcactgaagttgtctgaaggtaatactataaatatattgtatatttgtaaattttggaaagattatcctgttactgaatttgctaataaagatgtctgctgatttggttggtgatcattatagtaaatgatccaacaagaaaaggaattgactggggacctttagccgtgtctaaagaagaggcaccactcatatttcctataaaattatctaggaaaggaatccaggccccgctcttgggtccatttttacacattagcacttaattaatgttcaatattacatgtcaatttgattaatggctatgttgataggggccactatgtgttgtatagacatctggacttgactgtagactcctcagataatacagaaggtaggaaaagcaattcagtttggcccttctgtgtgttggcattgtctaaccagaactctctgtttcatgtgtgttctctcactagctgccaagacaacatttttatttgtgatgtctatgaggaaatcccatatcattaagtgccagtgtcctgcattgagtttgtggttaattaaatgagctcttctgctgatggaccctggagcaatttctcccctcacctgacattcaaggtggtcacctgccctagtagttggagctcagtagctgaatttctgaaaccaaatctgtgtcttcataaaataaggtgcaaaaaaaaaaaataccagttaagtaaagcctcaactgggtttttgtttctatgaaaatatcattataatcactatttatttcctaagttgaacctgaatagaaagggaaaccattcttattaagctttttattaggccctgtggctaaatgtgtacatttatattagaatgtactgtacagtccagatcttttctttaattcttattggttttttttttttttttttttttagagatggagtcttgctatattgccaaggctgatcttgaagtcctgggctcaagtgatcctcccacctcagcctcctgagtggttggggttacgggcgtgagccactgtgcctggcttccagctctcctcttaaatagtgggtatagtctgcacaacaggaaccatggcaggaatatacactttcccatagcaaatagcatacctgactctctgtgctaatattgcacatttgttaaacaatgaatgaatggatggatggatggatggatgaatgaatgaaacatatactactgattattttattccagagttctcaaaatatttgttgctgatattttgagtgctgactgtaattactttgattagataaacaactggaaataatgctgctgaaaaagttctaataaatgtgtattttatcaga

SEQ ID NO: 147125 - DNA, 4007 bp, Artificial Sequence
  derived and/or modified sequence
aggcttttggccactaggagctggcggaggtgcagacctaaaggagcgttcgctagcagaggcgctgccggtgcggtgtgctacgcgcgcccacctcccggggaaggaacggcgaggccggggaccgtcgcggagatggatcgcgggccggcagcagtggcgtgcacgctgctcctggctctcgtcgcctgcctagcgccggccagtggccaagaatgtgacagtgcgcattttcgctgtggaagtgggcattgcatccctgcagactggaggtgtgatgggaccaaagactgttcagatgacgcggatgaaattggctgcgctgttgtgacctgccagcagggctatttcaagtgccagagtgagggacaatgcatccccaactcctgggtgtgtgaccaagatcaagactgtgatgatggctcagatgaacgtcaagattgctcacaaagtacatgctcaagtcatcagataacatgctccaatggtcagtgtatcccaagtgaatacaggtgcgaccacgtcagagactgccccgatggagctgatgagaatgactgccagtacccaacatgtgagcagcttacttgtgacaatggggcctgctataacaccagtcagaagtgtgattggaaagttgattgcagggactcctcagatgaaatcaactgcactgagatatgcttgcacaatgagttttcatgtggcaatggagagtgtatccctcgtgcttatgtctgtgaccatgacaatgattgccaagacggcagtgacgaacatgcttgcaactatccgacctgcggtggttaccagttcacttgccccagtggccgatgcatttatcaaaactgggtttgtgatggagaagatgactgtaaagataatggagatgaagatggatgtgaaagcggtcctcatgatgttcataaatgttccccaagagaatggtcttgcccagagtcgggacgatgcatctccatttataaagtttgtgatgggattttagattgcccaggaagagaagatgaaaacaacactagtaccggaaaatactgtagtatgactctgtgctctgccttgaactgccagtaccagtgccatgagacgccgtatggaggagcgtgtttttgtcccccaggttatatcatcaaccacaatgacagccgtacctgtgttgagtttgatgattgccagatatggggaatttgtgaccagaagtgtgaaagccgacctggccgtcacctgtgccactgtgaagaagggtatatcttggagcgtggacagtattgcaaagctaatgattcctttggcgaggcctccattatcttctccaatggtcgggatttgttaattggtgatattcatggaaggagcttccggatcctagtggagtctcagaatcgtggagtggccgtgggtgtggctttccactatcacctgcaaagagttttttggacagacaccgtgcaaaataaggttttttcagttgacattaatggtttaaatatccaagaggttctcaatgtttctgttgaaaccccagagaacctggctgtggactgggttaataataaaatctatctagtggaaaccaaggtcaaccgcatagatatggtaaatttggatggaagctatcgggttacccttataactgaaaacttggggcatcctagaggaattgccgtggacccaactgttgggaagactgtagttcatggaggctccctcattcctcatccctttggagtaagcttatttgaaggtcaggtgttctttacagattggacaaagatggccgtgctgaaggcaaacaagttcacagagaccaacccacaagtgtactaccaggcttccctgaggccctatggagtgactgtttaccattccctcagacagccctatgctaccaatccgtgtaaagataacaatgggggctgtgagcaggtctgtgtcctcagccacagaacagataatgatggtttgggtttccgttgcaagtgcacattcggcttccaactggatacagatgagcgccactgcattggaagagaaattctcgcagctaacagggtggaaaatgttgaaagtttggcttttgattggatttcaaagaatctctattggacagactctcattacaagagtatcagtgtcatgaggctagctgataaaacgagacgcacagtagttcagtatttaaataacccacggtcggtggtagttcatccttttgccgggtatctattcttcactgattggttccgtcctgctaaaattatgagagcatggagtgacggatctcacctcttgcctgtaataaacactactcttggatggcccaatggcttggccatcgattgggctgcttcacgattgtactgggtagatgcctattttgataaaattgagcacagcacctttgatggtttagacagaagaagactgggccatatagagcagatgacacatccgtttggacttgccatctttggagagcatttattttttactgactggagactgggtgccattattcgagtcaggaaagcagatggtggagaaatgacagttatccgaagtggcattgcttacatactgcatttgaaatcgtatgatgtcaacatccagactggttctaacgcctgtaatcaacccacgcatcctaacggtgactgcagccacttctgcttcccggtgccaaatttccagcgagtgtgtgggtgcccttatggaatgaggctggcttccaatcacttgacatgcgagggggacccaaccaatgaaccacccacagagcagtgtggcttattttccttcccctgtaaaaatggcagatgtgtgcccaattactatctctgtgatggagtcgatgattgtcatgataacagtgatgagcaactatgtggcacacttaataatacctgttcatcttcggcgttcacctgtggccatggggagtgcattcctgcacactggcgctgtgacaaacgcaacgactgtgtggatggcagtgatgagcacaactgccccacccacgcacctgcttcctgccttgacacccaatacacctgtgataatcaccagtgtatctcaaagaactgggtctgtgacacagacaatgattgtggggatggatctgatgaaaagaactgcaattcgacagagacatgccaacctagtcagtttaattgccccaatcatcgatgtattgacctatcgtttgtctgtgatggtgacaaggattgtgttgatggatctgatgaggttggttgtgtattaaactgtactgcttctcaattcaagtgtgccagtggggataaatgtattggcgtcacaaatcgttgtgatggtgtttttgattgcagtgacaactcggatgaagcaggctgtccaaccaggcctcctggtatgtgccactcagatgaatttcagtgccaagaagatggtatctgcatcccgaacttctgggaatgtgatgggcatccagactgcctctatggatctgatgagcacaatgcctgtgtccccaagacttgcccttcatcatatttccactgtgacaacggaaactgcatccacagggcatggctctgtgatcgggacaatgactgcggggatatgagtgatgagaaggactgccctactcagccctttcgctgtcctagttggcaatggcagtgtcttggccataacatctgtgtgaatctgagtgtagtgtgtgatggcatctttgactgccccaatgggacagatgagtccccactttgcagtaagtttcctgaccacagtttactggccataaactcattctgaacagtagcctggtgtgcatcaccattgtcacagtcactgtgtagctttgtaggaaggatttcagttcctctatgagttcacatctgtgtagggggtaaccataattgaattcaaatacatcaccattggataattttctgattaaatcctttgtacttggttatgtgtttttacttctttttatgtctttgttt

SEQ ID NO: 147126 - DNA, 2913 bp, Artificial Sequence
  derived and/or modified sequence
tttgcctgaagaaaggtgacttctaacaactgtctgtgattctcagaaagctctactggttggatgcccgcctggatggcctctttgtctctgacctcaatggtggacaccgccgcatgctggcccagcactgtgtggatgccaacaacaccttctgctttgataatcccagaggacttgcccttcaccctcaatatgggtacctctactgggcagactggggtcaccgcgcatacattgggagagtaggcatggatggaaccaacaagtctgtgataatctccaccaagttagagtggcctaatggcatcaccattgattacaccaatgatctactctactgggcagatgcccacctgggttacatagagtactctgatttggagggccaccatcgacacacggtgtatgatggggcactgcctcaccctttcgctattaccatttttgaagacactatttattggacagattggaatacaaggacagtggaaaagggaaacaaatatgatggatcaaatagacagacactggtgaacacaacacacagaccatttgacatccatgtgtaccatccatataggcagcccattgtgagcaatccctgtggtaccaacaatggtggctgttctcatctctgcctcatcaagccaggaggaaaagggttcacttgcgagtgtccagatgacttccgcacccttcagctgagtggcagcacctactgcatgcccatgtgctccagcacccagttcctgtgcgctaacaatgaaaagtgcattcctatctggtggaaatgtgatggacagaaagactgctcagatggctctgatgaactggccctttgcccgcagcgcttctgccgactgggacagttccagtgcagtgacggcaactgcaccagcccgcagactttatgcaatgctcaccaaaattgccctgatgggtctgatgaagaccgtcttctttgtgagaatcaccactgtgactccaatgaatggcagtgcgccaacaaacgttgcatcccagaatcctggcagtgtgacacatttaacgactgtgaggataactcagatgaagacagttcccactgtgccagcaggacctgccggccgggccagtttcggtgtgctaatggccgctgcatcccgcaggcctggaagtgtgatgtggataatgattgtggagaccactcggatgagcccattgaagaatgcatgagctctgcccatctctgtgacaacttcacagaattcagctgcaaaacaaattaccgctgcatcccaaagtgggccgtgtgcaatggtgtagatgactgcagggacaacagtgatgagcaaggctgtgaggagaggacatgccatcctgtgggggatttccgctgtaaaaatcaccactgcatccctcttcgttggcagtgtgatgggcaaaatgactgtggagataactcagatgaggaaaactgtgctccccgggagtgcacagagagcgagtttcgatgtgtcaatcagcagtgcattccctcgcgatggatctgtgaccattacaacgactgtggggacaactcagatgaacgggactgtgggatgcgtctgatgaagctgattgtcccacacgctttcctgatggtgcatactgccaggctactatgttcgaatgcaaaaaccatgtttgtatcccgccatattggaaatgtgatggcgatgatgactgtggcgatggttcagatgaagaacttcacctgtgcttggatgttccctgtaattcaccaaaccgtttccggtgtgacaacaatcgctgcatttatagtcatgaggtgtgcaatggtgtggatgactgtggagatggaactgatgagacagaggagcactgtagaaaaccgacccctaaaccttgtacagaatatgaatataagtgtggcaatgggcattgcattccacatgacaatgtgtgtgatgatgccgatgactgtggtgactggtccgatgaactgggttgcaataaaggaaaagaaagaacatgtgctgaaaatatatgcgagcaaaattgtacccaattaaatgaaggaggatttatctgctcctgtacagctgggttcgaaaccaatgtttttgacagaacctcctgtctagatatcaatgaatgtgaacaatttgggacttgtccccagcactgcagaaataccaaaggaagttatgagtgtgtctgtgctgatggcttcacgtctatgagtgaccgccctggaaaacgatgtgcagctgagggtagctctcctttgttgctactgcctgacaatgtccgaattcgaaaatataatctctcatctgagaggttctcagagtatcttcaagatgaggaatatatccaagctgttgattatgattgggatcccaaggacataggcctcagtgttgtgtattacactgtgcgaggggagggctctaggtttggtgctatcaaacgtgcctacatccccaactttgaatccggccgcaataatcttgtgcaggaagttgacctgaaactgaaatacgtaatgcagccagatggaatagcagtggactgggttggaaggcatatttactggtcagatgtcaagaataaacgcattgaggtggctaaacttgatggaaggtacagaaagtggctgatttccactgacctggaccaaccagctgctattgctgtgaatcccaaactagggcttatgttctggactgactggggaaaggaacctaaaatcgagtctgcctggatgaatggagaggaccgcaacatcctggttttcgaggaccttggttggccaactggcctttctatcgattatttgaacaatgaccgaatctactggagtgacttcaaggaggacgttattgaaaccataaaatatgatgggactgataggagagtcattgc

SEQ ID NO: 147127 - DNA, 13968 bp, Artificial Sequence
  derived and/or modified sequence
atggaccggggccccgccgccgtggcctgcaccctgctgctggccctggtggcttgcttggctcctgccagtggccaagaatgcgattctgcccatttccggtgcggaagcggacactgtataccagctgattggcggtgcgacggcaccaaggactgcagtgacgacgctgacgagatagggtgcgctgtggtcacttgccagcaaggctatttcaaatgccagagcgaaggacagtgtatcccaaatagctgggtttgcgatcaggaccaggattgtgacgacggtagcgacgagcgccaggactgcagtcagtccacatgcagtagccaccagatcacttgtagcaatgggcagtgcatcccctcagagtacagatgcgatcacgtccgcgactgtccagatggtgccgatgagaatgactgtcagtacccaacatgtgagcaactaacttgcgacaatggggcctgctacaacacgtcacagaagtgtgactggaaggtggactgtcgggattcttccgacgagataaattgcaccgagatctgccttcataatgagtttagctgcggcaacggcgagtgcatccctcgagcatatgtgtgtgatcacgacaatgactgccaggacgggtccgatgaacacgcttgcaactatccaacgtgcggcgggtatcagttcacctgtccctctggtcgctgtatctaccagaactgggtttgcgatggcgaagacgactgtaaggataacggcgacgaagatggctgtgaaagcggcccacacgacgtccacaagtgcagccccagggaatggtcatgtccagaaagcgggagatgcatctccatctataaggtctgcgatggtatcctggactgccccggacgcgaagatgaaaataatacaagcaccggaaaatactgttccatgaccctttgcagtgccctcaactgccagtaccagtgtcacgagactccttatggaggtgcttgcttttgcccacccggctacattatcaaccacaatgattcacggacctgcgttgaattcgacgactgccagatctggggcatatgtgaccagaaatgcgagtcacgtcctggaagacacctgtgtcattgtgaagagggctacattctggaacggggacagtattgcaaagctaacgattcttttggggaagcatctatcattttcagcaatggccgggatctgttgattggggatattcacggcagatccttcaggatccttgttgaatcccagaatagaggagtggccgtgggcgtcgccttccattaccacctgcagcgcgtgttctggactgataccgtgcaaaacaaagtcttcagcgtggatatcaatggcttaaacatccaagaggttctgaacgtgtcagttgagactcctgagaacctggccgtcgattgggttaacaacaaaatttatctcgtagagaccaaagtaaacagaattgacatggtgaacctggatggcagctatcgcgtgacactcatcacagagaatcttggccacccaaggggcatcgccgtcgaccccacagtcggatacctgttcttctcagattgggagagcctgagcggcgagccaaaacttgagcgcgcctttatggatggttcaaatcgcaaagacctggtgaagacaaagttgggatggcccgctggtgttactctggatatgatctccaagcgcgtgtactgggtggattcaaggtttgactacattgagactgtgacctacgatggaatccagcggaagacagttgtccacgggggttctctaataccacacccatttggtgtctctttgttcgaaggccaggtatttttcacagactggacaaaaatggccgttctgaaggcaaacaagtttactgagacgaacccacaggtgtattatcaggcgagcctacgtccctatggcgtgacagtctatcattccctgcggcaaccatatgcaacaaatccgtgcaaggacaacaacggcggctgcgaacaagtctgcgtgttatcacatcggactgataacgatggactcggattccggtgcaagtgtacgtttggtttccagcttgacaccgacgagcggcattgcattgctgtgcagaactttctgatcttcagctcacaggtggcgatcagggggattccattcacactgtcaacacaggaggacgtgatggtcccagtgtcagggaatccaagctttttcgttggcatcgacttcgacgcccaggacagtacgattttcttttccgatatgtcgaaacatatgattttcaagcagaaaattgatggcactggcagagagattctagccgctaatagggtggagaacgtagaatctttggcgttcgactggatttcaaagaacctgtactggacagactcacactataagtccatttcagtgatgcgcctggcagataaaaccagacggaccgtggtgcagtacctaaacaacccccggagcgtggtggtacacccctttgcgggctatctattcttcacggattggttcagaccagcgaagatcatgagagcgtggagcgatgggagtcacttgcttccagtgattaacacaaccctcggctggcccaacgggttagccatcgattgggcagcgagcaggttgtattgggttgacgcatatttcgataagatcgaacactccacttttgacgggttggacagacgtcgattgggccacattgagcaaatgactcacccttttgggttggccatattcggggagcacttgttcttcaccgattggcggctgggcgccattatcagagtccggaaggccgacgggggggagatgacagttatcagatctgggattgcatacattttacacctgaaaagttatgacgtcaatattcagaccggaagcaatgcctgtaaccaacctactcaccccaatggagactgttcgcacttttgcttcccggtgccaaatttccagcgggtatgtggctgtccatacgggatgcgcttagcttctaatcacctcacgtgcgaaggcgatcctacaaacgagcctccaactgaacagtgcgggttgttctcgttcccatgcaaaaatggcagatgtgtgcccaactactatctgtgcgacggggtcgacgactgtcatgacaactctgatgagcaactgtgcggcacacttaacaatacatgctccagctccgcatttacctgcggccatggcgagtgtattccagctcattggcgctgtgataaacggaacgattgcgtcgatggcagtgatgaacacaattgtccgacccatgctccagcgtcctgtttggatacccaatatacctgcgacaaccaccagtgcatatcaaagaattgggtgtgcgacacagacaatgactgcggcgatggatctgacgaaaaaaactgcaacagtactgaaacctgtcaaccttcccagttcaattgcccaaaccaccgatgcatcgacctatcttttgtctgtgacggagataaagactgtgtggatgggagtgacgaggttggatgcgtgctcaactgcacagcttcccagtttaagtgcgcatccggcgataaatgtattggagtcacgaatcgatgcgacggcgtgtttgactgtagcgataattccgacgaggctgggtgtccaactagacccccaggtatgtgtcatagcgacgagtttcagtgtcaggaagatggcatatgtattcccaatttctgggaatgcgacggtcatccagactgtctctacggctcagacgagcacaatgcttgtgtgcctaaaacctgccccagttcttatttccactgcgacaacggaaactgcatccatagggcctggctttgcgaccgagacaatgactgtggcgatatgtctgacgagaaagactgccctactcagccgttccgttgcccaagctggcagtggcagtgtttggggcacaacatttgtgtgaatttgtctgtggtgtgcgatggaatctttgactgtcctaacggaacggatgagtccccactgtgcaatggcaactcctgtagcgactttaatggaggatgcactcacgagtgcgtgcaggagccattcggggccaaatgtctctgtccattgggtttcctgcttgcaaacgatagcaagacttgcgaagacatcgatgaatgtgacatcctgggcagctgtagtcagcactgctacaacatgcgcggatcgtttcgctgtagttgcgatactggttacatgttggaatctgatggtcggacatgcaaagttaccgcgtccgaatcactattactgttggtagccagtcagaataagattatcgcggattccgtgacctctcaggtccataatatctatagtttagtcgagaatggtagttacatcgtagccgttgactttgactccataagcgggcggatcttttggtccgacgctactcagggaaagacatggtctgcttttcaaaatgggactgaccggcgcgtagtgtttgactcctcaattatactcacagaaactatcgcaatcgactgggtgggaaggaacctgtattggaccgactatgccctcgagaccatcgaagttagtaagatcgatggctctcacagaacggtgctgatttcaaagaacctgacaaatcccagaggtttggcactggaccctagaatgaatgaacatttgctcttctggagcgattggggccaccacccaagaattgaacgagcgtcaatggacggtagtatgcgcaccgttattgttcaagacaaaatattttggccctgcggcctgactatcgactacccaaatcgtctgctgtatttcatggactcatatcttgactacatggacttttgcgactacaatggccaccatcggaggcaggtgatcgcgtccgacctgatcattcgacacccctatgccctgacattgttcgaggatagtgtgtactggacagatagagcaacacgccgggtgatgagagcgaataaatggcatggcggaaaccagtctgtggtcatgtataacatccagtggccactcggcatcgtggcagtgcacccttcaaagcagcccaattccgtgaacccctgtgcgttctctaggtgtagtcatctctgtctgctgtcttcgcagggaccacacttctatagctgtgtttgtcccagcggctggtctctctctcctgacctgctgaactgcctccgcgacgatcagcctttcctcattactgtaagacagcacataatatttgggattagtctcaatcctgaggtcaagagcaatgatgctatggtacccatcgcagggattcagaacggactggatgtcgagttcgatgatgcagagcagtacatctactgggtcgaaaacccaggagaaatccaccgggtgaagacagacggcaccaaccgaactgtattcgccagcatctccatggtcggcccgtcgatgaatctggctctggactggataagtcggaatttgtattctaccaacccacgcacccagtcaattgaggtcctgactttgcacggcgatatcagatataggaagaccctgatcgccaatgatgggacggcattaggagtgggattccctatcggaatcaccgttgatcccgcgagaggcaaactctactggagcgaccagggtacagatagtggggtgccagctaagattgcctcagccaacatggacgggacaagtgtgaagacgctattcacaggaaacttggagcatctggaatgcgtgacactcgatatcgaggaacagaaactctactgggctgttactggacgtggtgtcatcgaacgaggcaacgtggacggaaccgaccggatgattctagtgcatcagctgtctcatccttggggcattgcagtacatgacagtttcttgtactatacagacgaacagtacgaggttattgagcgggtggacaaagcaaccggagctaacaagatagtcctgagggacaacgtgccaaacctgcgcggtcttcaggtttatcataggcgcaacgccgctgaatccagtaacgggtgcagcaacaacatgaacgcctgccaacagatctgcctccccgtacctggcgggctgttcagctgtgcctgcgccactgggtttaaacttaatccagataatcgcagctgcagcccctacaatagctttatagtggtatctatgctctctgcaatacggggcttctctctcgagctcagcgatcactccgagacaatggtccccgtagctggacagggacgcaacgccctacacgtggacgtggacgtgagcagcggatttatctattggtgtgatttcagttccagtgttgccagtgacaatgcaattaggaggatcaaaccagacggatctagcctgatgaatatcgttacccacggcattggcgaaaacggggtccggggaatcgcagtcgactgggttgctggcaatttatactttacaaacgccttcgtatctgagacacttatcgaggtcttaaggataaacactacttatcgcagagttttgctgaaggtcactgttgacatgcccagacacatcgtcgtggaccccaaaaaccgttatctgttttgggccgattacggccagagacccaaaattgaacgctcgtttctggattgtaccaatcggaccgtgcttgttagcgaaggtattgttactcctagagggctggcagtggaccggtccgacggatacgtctactgggttgacgattcattggacattatcgctaggatcagaataaacggcgaaaactctgaagtgattaggtatggttcaaggtatcccacaccgtatgggataaccgtgttcgaaaactccattatatgggtggatcgcaatcttaagaaaatttttcaggctagcaaggagcctgaaaacacggaaccacccacagtcattcgggacaatattaactggcttagggacgtgaccatttttgataagcaggtgcagccgcgttctccagcagaggtcaacaacaatccatgcctggaaaataatggtggttgctcgcatttgtgctttgccctcccgggcctccacacccccaaatgcgattgtgcctttggcaccctccagtctgacgggaaaaactgtgccattagtaccgagaactttcttatcttcgcactcagtaacagcttgaggtcactgcacctcgaccccgagaaccactcccccccgtttcagacaatcaatgtggaacgtaccgtgatgagcttggattacgattcggtatccgatagaatatactttacccagaatctggcctctggcgtcggacagatctcctacgccaccctgagtagtggcatccacacgccgaccgtcatagcctctggcataggcactgccgatggaattgctttcgattggatcaccaggcgcatatattatagcgattacctgaaccagatgatcaacagcatggcagaggatggatcaaatcgaaccgtcatcgctcgggtgccaaagccacgcgctattgttctggacccttgccaggggtacctgtactgggcagattgggatacacacgcgaagatcgaaagggcgacattggggggaaactttcgcgtgccaatcgttaatagtagtctcgttatgccttccggactaactcttgactacgaagaagacctgctgtactgggtggatgcatcgcttcaaagaatcgagagatccactcttacaggggtcgatcgggaggtgattgtgaatgccgctgtgcatgcgttcggccttaccctctatgggcagtatatatactggactgacctctatacccagaggatataccgggccaacaaatatgatggcagtggccagatcgccatgacaaccaacctgctctcacaacccagagggatcaacaccgtcgtcaaaaatcagaaacaacagtgcaacaacccctgtgaacagttcaacggcgggtgttcccacatatgcgctcctggacccaatggagccgagtgccagtgccctcacgaaggcaattggtatctggctaacaacagaaaacactgtatcgtggataacggggaacgatgcggcgcctcctcattcacctgtagtaacggccggtgcatttctgaagagtggaaatgtgacaacgacaacgattgcggtgatggtagcgatgaaatggagagcgtgtgtgcactgcatacctgctctccaaccgcctttacttgtgcgaatggccgctgcgtgcaatacagctaccgctgcgattactataatgattgtggcgatgggagcgatgaagccggctgtttatttcgcgactgcaacgccaccactgagttcatgtgtaacaataggcggtgtattccccgggagtttatctgcaacggcgtcgacaactgccacgataataatacatctgatgaaaaaaactgccctgaccggacatgccagagcggttataccaagtgccacaatagcaacatctgtataccacgggtttacctctgcgacggagacaatgattgtggggataacagtgacgaaaatcccacttactgtactactcacacttgttctagttcagagttccaatgtgcctccgggcgatgtatccctcagcattggtactgcgatcaggaaactgattgttttgacgccagcgatgaacccgcatcttgtggacactcagagcgcacctgcctagccgatgaatttaagtgcgatgggggccggtgcataccaagcgagtggatttgtgatggagataatgattgcggcgacatgagtgatgaagacaaaaggcaccagtgccaaaatcagaactgttccgacagcgagttcctgtgcgtcaacgaccggcctccagatcgaaggtgcattcctcagtcatgggtgtgcgatggagatgtcgactgtacggacggctatgatgagaaccagaattgtacacgcagaacatgttccgaaaatgagtttacctgcgggtacggcctctgcatcccgaaaatcttcaggtgtgaccgccataacgactgtggggactactccgatgagcgcgggtgtctgtaccagacctgccaacagaatcaattcacttgccagaatggaaggtgtatctccaaaacatttgtgtgcgacgaagacaacgactgcggcgatggaagcgatgaactgatgcacctgtgccacacaccggagcctacctgtccaccccatgaatttaagtgcgataacggcagatgcattgagatgatgaaattatgcaatcatttagacgattgtctggacaacagtgatgagaaaggatgtgggattaatgagtgtcacgacccttcgatttctgggtgtgaccacaactgtaccgatacgctcactagtttctattgctcctgtcgacctgggtacaagcttatgtccgataagcggacctgcgtggatattgatgaatgtaccgagatgcccttcgtctgtagtcagaaatgtgagaacgtcattggctcgtacatttgtaaatgcgcaccaggatacttgagggaaccagatgggaagacatgcagacaaaattccaacattgaaccttacctaatctttagcaaccgctattacttgagaaatctcaccattgacggctacttctattctctgatcttagagggtctggacaatgttgtagccttggactttgaccgagtggagaagagactttattggattgacacacagcggcaggtgattgaacgcatgtttttaaataagaccaacaaggaaacaattattaatcatcggcttcctgccgccgaatctctagcagttgattgggtgagtagaaagttgtactggctggacgcacgattagatggcctatttgtctctgatctcaatggaggccaccgccgaatgttagcccagcattgtgtggacgctaacaatacgttttgcttcgacaacccaagggggcttgcactgcaccctcagtatggatatctgtactgggccgattggggccaccgagcatacatcggaagggtaggcatggatggtaccaacaagtctgtgatcattagtactaaactcgagtggcccaacggcattacaattgattacacaaatgacctgctgtactgggccgacgcacacttagggtacatcgagtactcagacctggaagggcaccataggcacactgtgtacgacggagccctacctcatccttttgcaataacaatcttcgaggacaccatatactggacggactggaataccagaaccgtcgaaaagggaaataagtatgatggaagcaacaggcagacactggtcaatacaacacacagaccatttgacattcatgtgtaccatccataccggcagccaatagtgtcaaatccatgcggcaccaacaacggcggctgtagccacctctgcctaatcaaacctgggggcaagggattcacgtgtgagtgccccgacgactttagaacccttcagctctccggatccacttactgcatgccgatgtgcagctcaacacagttcctgtgtgcaaataatgaaaaatgcattcccatttggtggaagtgcgatgggcagaaggactgctcagacggctctgacgaactcgctttgtgcccacagcgcttttgtaggctgggccagtttcagtgcagcgatggtaactgcacatcccctcagacactgtgcaacgcacaccagaactgtcctgatggaagcgacgaagatcgactgttatgtgaaaaccaccattgtgattccaacgaatggcagtgtgccaacaagaggtgcatacccgaaagctggcagtgcgataccttcaatgattgtgaggacaatagcgatgaggactccagccattgtgccagtcggacttgcaggcccggccagtttagatgtgctaacggcagatgcattcctcaagcctggaagtgcgatgtggataatgactgcggagaccactcagacgagccaatcgaggagtgcatgagttcggcgcacctgtgcgataactttacagagtttagctgcaaaacaaactacagatgtataccgaaatgggctgtctgcaatggggttgacgactgccgcgataattctgacgagcagggatgtgaggaacggacctgtcaccctgtgggggatttccggtgtaaaaaccatcactgtataccactgaggtggcaatgcgatggtcaaaacgactgcggggacaattcggatgaggaaaactgcgctccccgtgaatgtacggagtcagagtttcgctgtgtcaaccagcaatgtattccgtcccgttggatttgtgaccattacaacgattgcggcgacaactcggacgagagggattgtgaaatgcggacatgccacccagaatactttcaatgcaccagcggccactgcgttcactcggagctgaaatgcgacgggagtgccgattgccttgacgccagcgatgaagcagattgtccaactagatttcctgatggggcctactgtcaggcaactatgtttgaatgcaagaatcatgtgtgtattcccccatattggaaatgcgacggcgatgatgattgcggagatggaagcgacgaagagttgcatctgtgtctcgatgtgccctgtaatagtccgaataggtttaggtgcgataacaatcgttgcatctacagccacgaggtatgtaatggagttgacgattgcggcgacggaacggatgagacggaggagcactgcaggaaaccgacccccaagccttgcactgagtatgaatataaatgcggtaatggccattgtatacctcacgataacgtgtgcgatgacgcggatgactgcggagattggtctgacgaattagggtgtaataagggcaaagagaggacctgcgccgagaacatctgtgaacagaattgcacccagctgaatgagggaggattcatctgttcatgtactgcaggtttcgagaccaacgtgttcgacagaacgtcttgccttgatatcaatgaatgcgagcagtttggcacgtgcccacagcattgccgcaatacaaaggggtcctacgaatgcgtgtgtgcagatggattcacttccatgtccgaccgccccggtaagaggtgcgcggccgaaggttcatcacctctgctgctgctaccagataatgtacggatccgcaagtataacttaagcagcgaaagattctcagagtatctgcaggacgaggagtatatccaagccgttgactatgattgggacccaaaggatatcggcctttcggtcgtctactacacagtcagaggagagggctctcgttttggggccattaaacgggcttatattcccaattttgagagtggccgcaataatcttgtccaggaagttgatttgaaactgaagtacgtgatgcagcccgacggcattgcagtggactgggtgggccgtcacatttactggagcgatgtcaaaaataaacgtatcgaagtcgcaaagctggatggcaggtaccgcaaatggttgatcagcacagatctcgatcagccagcagctattgcagtcaaccccaagctaggcctcatgttctggaccgattggggcaaggaacctaagatcgaaagcgcttggatgaatggagaggatcgcaacatcctggtattcgaagacctgggatggcccaccggtttgagtatcgactatcttaataacgatcggatctactggagtgacttcaaggaagatgtgattgaaacgatcaaatacgacggcactgaccgaagagtgattgcaaaagaggctatgaatccctattccttagatatttttgaggatcagctatactggatttctaaggagaaaggggaagtatggaagcagaacaagttcggtcaaggcaagaaggaaaagacacttgtggtgaacccctggttgacccaggttaggatctttcatcagctgcggtataataagagtgtgccaaacctgtgcaaacagatatgctctcatctctgcttactgcgccccggtggctacagctgtgcatgtccccaaggctccagcttcattgagggttctactaccgaatgcgacgctgccatcgaacttcccatcaatctgccaccgccttgtcggtgtatgcatggaggcaactgctattttgacgagaccgatcttcccaagtgtaagtgtccatcgggatacactggtaaatactgtgaaatggccttttccaaaggaatatccccggggacaaccgcggtggcggttcttcttacgattctcctaatcgttgtgattggagccttggctatagccggtttctttcattatcgcagaactgggtcactgctgcctgccctgcccaagttaccctcactgagctctcttgtgaagccatcagagaatgggaatggtgttacttttcggtctggcgctgacttgaacatggatataggagtatcgggcttcggcccagaaaccgccatcgacagaagcatggcgatgtccgaggattttgtgatggaaatgggaaagcagccaatcatcttcgagaatcctatgtattccgcacgagactcagccgtcaaggtggtgcagccgattcaggtgaccgtaagtgagaacgtcgacaataaaaattatggcagccccataaatcctagtgagatcgtgccagaaacaaacccaactagtcccgctgcagacgggacgcaggtgacaaaatggaatctctttaagaggaagtcaaagcagaccacaaacttcgaaaatccaatttacgcccagatggaaaatgaacagaaggagtccgtcgcagcaactcctcccccctcaccttctctcccagctaagccgaaacccccctctcgtagggatcctacacccacctactcagcaactgaggacacctttaaggacacagcgaatcttgtcaaggaagattctgaagtgtag

SEQ ID NO: 147128 - DNA, 3678 bp, Artificial Sequence
  derived and/or modified sequence
atggaccggggccccgccgccgtggcctgcaccctgctgctggccctcgtggcgtgtcttgctccagcttctgggcaggaatgtgactcggcgcattttaggtgtgggtcaggccattgtatccctgctgactggagatgcgatggtactaaggactgttcggacgacgccgacgaaatcggctgcgccgtcgtgacttgccagcaaggttacttcaaatgtcaatcagagggtcaatgcatcccaaatagttgggtttgcgaccaggatcaggactgtgacgatggatccgacgagcggcaagattgcagccaaagcacctgttcatctcaccaaatcacctgtagtaacggtcaatgtatcccctctgaataccggtgcgatcacgtgcgtgattgtcccgatggcgctgacgaaaatgactgccagtaccctacttgcgagcagttgacctgcgataatggggcatgctacaatacttcccaaaaatgtgactggaaggtggattgtagggactccagtgatgaaattaattgcacagaaatctgtcttcataatgaatttagctgcgggaacggtgagtgcatccctcgagcatatgtgtgtgaccacgataacgattgtcaggacggaagcgacgagcatgcctgcaattacccaacctgtggaggataccagttcacatgtccctccggccgatgcatctaccaaaattgggtatgtgatggggaggatgactgtaaggacaatggtgatgaggatggctgcgaatccggccctcatgatgtccacaaatgcagcccccgggagtggagctgtcccgaatctgggaggtgtatctctatatacaaagtctgcgacggcatactggactgcccaggcagggaagatgaaaacaacacctccacgggaaagtactgcagcatgaccctgtgtagcgcattaaactgtcagtaccagtgccatgagacaccttatgggggggcatgtttttgcccccccggctacattataaatcacaatgactcccgaacctgtgtggaatttgacgattgtcagatttgggggatctgtgaccagaagtgcgaaagccggcctggccggcacctatgtcactgcgaggagggttacatcttagagagagggcagtactgtaaagcgaacgactccttcggggaagcgtccattatattttctaacggccgcgacctcttaattggcgacatccacggtagatctttccgcatactggtggaaagccagaatcgtggagtggctgtcggcgtagcgttccactaccatctgcagcgcgtcttttggaccgataccgtacagaacaaggtattttctgtggacatcaatggcttaaacatccaggaggtgcttaatgtgtcagtagaaacacccgagaacctcgccgtggattgggtgaataataagatttatttggtggagacgaaggtgaaccggatagacatggtgaacctggatggaagctaccgtgtgaccctcatcacagagaacttaggacaccctcgcggcatcgccgtagatcctactgtaggaaaaaccgtggtgcacgggggaagcttgatcccccaccccttcggggtctccctttttgaggggcaagtcttcttcacagattggacaaagatggccgtattgaaggcaaataaatttaccgagaccaacccccaagtgtactatcaggcctccctcagaccctacggcgtgaccgtgtatcattcactccggcaaccatatgccacaaacccttgtaaagacaataatggcgggtgtgagcaagtgtgcgtcctttcacaccgcactgacaatgacggactgggctttagatgtaaatgtacattcggcttccaactggacaccgacgagagacattgcattggtcgagagattctggctgcgaatcgggtggagaatgtggaaagcctggcattcgattggatttcgaagaatctttattggaccgattcccactacaagtctatctctgtaatgagattggcagacaagaccagacgtactgtggttcagtaccttaacaacccaagatccgtagtcgttcacccttttgccgggtatctgtttttcaccgactggttcagaccagccaagatcatgagggcctggagcgacggttcccatctactgccggtcatcaatactacactcggatggccaaatgggctagccattgattgggcagcatcgcggctatattgggttgatgcctatttcgataaaatcgagcacagcacctttgatggcctggaccgcagacgactcggccacattgaacagatgacacacccatttggcctcgccatcttcggtgagcatctattttttacagattggcgcctgggagccatcatccgggtacgcaaagctgatgggggagaaatgactgtaatccgatccggtatcgcatacatcttacaccttaaatcctatgatgtgaacatacagactggctcaaacgcatgtaaccagcctacccatcccaacggagattgcagtcatttttgcttcccagttccaaatttccagagggtgtgcggctgtccctacggaatgaggctggcatcaaatcatttaacctgcgagggcgacccaacgaacgagccaccaaccgaacagtgtgggctatttagcttcccttgtaagaacggtcggtgcgtgcctaattactacctgtgtgacggggtagacgactgccacgataacagcgacgaacagctgtgcggcactctgaataatacttgttcctcctccgcgttcacatgcggacatggcgaatgtatccctgcccactggaggtgcgataagcgcaatgactgcgttgacggcagtgacgaacacaactgcccaacccacgctccagctagttgcctggacactcagtatacatgcgacaatcaccaatgtatctcgaagaactgggtctgtgatacagataacgactgtggcgacggtagtgacgagaaaaattgtaactccacagaaacttgtcagcctagccagtttaattgccctaaccatagatgcattgatctttccttcgtttgtgacggggacaaggattgtgtggacggcagcgacgaagtgggctgcgttttaaattgtaccgcctcacagtttaagtgcgcatcgggggataagtgcattggcgtgacaaacaggtgtgacggcgtcttcgactgttccgataacagtgatgaggccggatgccccaccaggcctccaggaatgtgtcattctgatgagtttcagtgtcaggaagatgggatctgcattccaaacttttgggaatgtgacggtcacccggactgtctgtacggaagcgacgagcacaacgcctgtgttccaaaaacgtgcccctcaagttatttccactgtgacaatggcaattgtattcatcgcgcctggctctgcgatcgggacaacgattgcggagacatgtctgacgaaaaagactgtcccacccagccatttagatgccccagctggcaatggcagtgtttgggtcacaacatttgcgtcaatctgagcgtggtctgtgacggtatctttgactgccccaatggtactgatgaatcaccactgtgcagcaaattcccggatcatagcctgctggctataaatagcttttag

SEQ ID NO: 147129 - DNA, 1941 bp, Artificial Sequence
  derived and/or modified sequence
atgctggcccagcactgcgtggacgccaacaacaccttctgcttcgataatcccagaggactggcccttcacccacaatatggatacctctattgggcagactggggccatagggcttatatcggcagagtgggcatggatggcacaaataaaagcgttattatcagcaccaaacttgagtggcccaacggaatcaccatcgactacaccaacgatctgttgtattgggccgacgcgcacttgggatatattgagtattcagatctggaaggtcatcacaggcacaccgtgtacgatggcgcgttgccccaccccttcgccattaccatctttgaggacacaatctattggaccgactggaatacgaggacagtggagaaggggaataaatacgacggcagtaatagacagacactcgtgaacactactcacagaccgttcgatattcacgtgtaccatccataccggcagccaatcgtgtcgaatccttgcggcacaaataatggcggatgcagccatctctgtttaattaagcccgggggaaagggctttacctgtgaatgtcctgatgactttcgcacgttgcagctgtccggaagtacatactgcatgccgatgtgctccagcacccaattcctgtgtgctaacaacgagaaatgtatccctatatggtggaaatgtgatggtcagaaagattgttctgatggcagcgacgaactcgcgctgtgtcctcagcgattttgccggctaggacagttccagtgctccgatgggaattgcaccagtccgcagaccctatgcaatgcacaccagaattgcccagatggtagtgatgaggatcgtctgttgtgcgagaatcaccactgtgactccaacgagtggcagtgtgcaaacaagaggtgcatcccagaatcatggcagtgcgacacctttaacgattgcgaagacaattccgacgaagactcttctcattgcgccagcagaacatgccggcccggacagttcagatgcgccaatggccggtgtatcccacaggcttggaagtgcgacgtcgataatgactgtggagaccattccgacgaaccgattgaggagtgcatgagttctgcccacctctgcgacaactttaccgaatttagttgcaagactaattatcgctgtattccgaaatgggccgtgtgcaacggcgtggatgattgtcgcgacaactctgatgagcagggatgcgaagaacggacatgtcaccccgttggcgatttcagatgcaagaaccaccactgtattccccttcggtggcagtgtgatggtcagaacgattgcggagacaactctgatgaagaaaactgcgcaccacgggaatgtaccgagtcagaatttcgatgcgtaaatcaacagtgcataccatcaagatggatttgtgatcactacaacgattgtggcgacaatagtgatgagcgtgactgcggcatgcggctcatgaagctcattgtgccccacgctttcctgatggttcacaccgcccgtttattatgttccaatgccaagactatgtttgtgtcgcgtcatatcggcaatgtgatggcaatgatgacagtggctatggtacaaatgaagaacttcacatgcgcatggatgtttcccgttatccaccaaacagtcagcggagtgaccactatcgctgcttttatagtgatgaggtgcgccatggtctggatgaccgttgaaatggagctgatgaggcaaagatctactgtggaaaacaggccgctgaacctggtgcagaatatgaatattagcgtggccatggggatcgcgttccacatgacaatgtgcgtgatgatgcccatgacagtggtgactggacctatgaactgggtggccataaaggagaaaaaagagcacgtcctgaaaatatacgccagcaagatcgttccaaattag

SEQ ID NO: 147130 - DNA, 13968 bp, Artificial Sequence
  derived and/or modified sequence
atggatagaggtcccgcagctgtcgcatgcacgctgctccttgcactggtagcctgcctagcaccggctagcggacaagaatgtgattcggctcattttcgttgcgggagcggtcactgtatcccggcagactggagatgtgacggaacaaaggattgtagtgacgatgctgacgaaatcggctgtgcagtagtgacatgccagcaaggatattttaaatgtcagtccgagggtcagtgcatcccaaattcttgggtctgcgaccaagaccaagactgcgatgatggaagcgatgagcggcaggactgcagtcagtctacttgtagtagccaccagattacttgttctaacggacagtgcatcccttctgaatatcgatgcgaccatgtcagggattgcccagacggcgctgacgagaatgactgtcaataccctacctgtgagcaactcacctgcgacaacggagcctgttataatacttctcaaaaatgtgattggaaagttgattgccgcgatagctctgatgagattaactgcactgagatttgcttgcataacgaattctcatgtggaaatggtgagtgcattcctagggcttacgtgtgtgatcacgacaatgactgccaggacggctctgacgagcatgcctgcaattatcccacgtgtggaggttatcaatttacttgcccgagcgggcgttgtatctaccagaactgggtctgcgatggggaagatgattgcaaggacaatggagacgaagacggctgcgagagcgggcctcacgacgtgcataagtgcagcccgagagaatggagctgccctgagtccgggagatgtatcagtatttataaggtatgcgacgggatcctggattgtcccggtcgagaagatgaaaacaatacgtccactggcaagtactgctcaatgaccctgtgttcagcgctgaattgccagtatcagtgccacgaaaccccttacggtggagcatgtttttgtcctccaggctacatcatcaaccacaatgacagccggacctgcgttgaatttgatgattgtcaaatttgggggatctgtgatcaaaaatgtgaatctaggcctggaaggcacctgtgtcactgcgaagaaggttatatcctcgagcggggacagtactgtaaggcgaatgactcgttcggagaagcttccattatctttagcaacggacgtgaccttttgatcggggacatacacgggagatccttccgcatactcgtggagtcacagaaccggggagttgctgtcggagttgcatttcactaccatcttcagcgggtgttttggacagacacagtgcagaacaaggtgttctccgttgatatcaacggcctgaatattcaggaggtgctcaacgtttcagtagagaccccggaaaacttagctgtggattgggtgaataataagatttacctcgtagaaaccaaggtgaaccgtattgacatggtaaatctcgacggctcgtaccgggtgaccttaataacagaaaacctgggacatcctcgcggtatagctgtcgaccccaccgttggttacttatttttctccgattgggagtccctgtccggtgagccaaagttggagcgggcttttatggacggcagcaatcggaaggatctggtgaagacaaaactggggtggcccgctggagtgacattagacatgatctctaaacgggtgtactgggtagatagcaggttcgactatattgagactgtgacttacgatggaatccagcgcaagacggttgtgcatggtgggtcacttatcccacatccatttggggtctcactgtttgaaggccaggtgttttttaccgattggaccaagatggccgtgttaaaagcaaacaaatttactgagaccaatccccaggtctattatcaggcaagcctccgcccatacggagtgacagtctatcactcgctgcgccagccttatgccactaatccttgtaaagataataatgggggttgtgagcaagtgtgcgtgttgagccataggacagacaatgacggactgggctttagatgtaagtgcacctttggttttcagctggataccgacgaaaggcattgcatcgctgtccagaacttcttaatctttagctcccaggttgccataagaggcattccttttaccctgtcaactcaagaagacgtcatggtgcccgtttcaggcaacccctcttttttcgtagggatcgattttgatgctcaggattccaccatcttcttttccgatatgtcaaagcatatgatttttaaacagaagatcgacggcaccggcagagaaattcttgccgctaacagggtggaaaatgtggagagcctcgcattcgattggatatctaagaacctgtactggactgatagccactacaagagcatctcggtcatgagacttgctgataagaccagacgcaccgtagtgcagtacctaaataacccaaggtctgtggtggttcatccctttgcaggttacctcttttttactgattggttcagacctgccaagattatgagggcttggtcagatggctcccatctcctgccagtcatcaacaccacgctgggctggccaaacggacttgccattgactgggccgcttcccgcctgtattgggtggacgcctacttcgacaagatcgagcattccaccttcgatggcttggaccgcaggcgcctgggtcacatcgagcagatgacgcatccatttggcctggcaatctttggagaacaccttttctttacggattggcgtctcggtgctatcataagggttcggaaggccgatggaggggaaatgaccgttataagaagtggaatcgcctacatattgcacctgaagagctacgacgtgaacatccagacaggcagtaatgcatgtaatcaaccgacacaccccaacggggattgttctcatttttgtttccctgtgcccaattttcaacgagtttgcggttgcccatatggaatgcggttagcctcgaatcatcttacatgcgagggggaccccacaaacgagcccccaacagagcagtgtggacttttctcattcccctgcaagaatggacgctgtgtccccaattattatctatgcgacggagttgacgactgtcatgacaacagcgatgaacagctatgcggaacccttaataatacatgcagcagcagcgcatttacatgcggccatggggaatgcatcccggcacattggaggtgcgataagaggaatgactgtgtggacggttctgatgaacacaactgtccaacgcatgcacctgcttcctgtttagatacacaatacacgtgtgacaatcaccaatgcatttccaagaactgggtttgcgacaccgataacgactgcggggatggctccgatgagaagaactgcaactcaaccgaaacatgccagccatctcaattcaactgtccaaatcaccgatgcattgacctgagcttcgtgtgcgacggcgacaaagactgcgtggatggctctgacgaggttggatgcgtgctgaattgtaccgctagccagttcaaatgcgcgtcaggggacaagtgtattggagtcaccaatagatgcgacggggtgtttgactgtagcgataactcagacgaagcagggtgtcccacaagacctccaggcatgtgtcatagcgatgaatttcagtgccaagaggacggaatatgtattcccaatttctgggagtgtgatgggcatccggattgtctgtacggctctgatgagcataacgcgtgcgttcccaagacatgtccctcctcttatttccactgcgataatggaaactgtattcatcgggcttggctgtgcgatagggataacgattgtggggatatgtccgacgaaaaggattgcccaactcagccattccgctgtccttcttggcagtggcagtgtttgggccacaacatttgtgtgaacctgtccgtcgtgtgcgatggaatctttgattgccccaacggcaccgacgagagcccactgtgtaatggcaacagttgctcagatttcaatgggggatgcacccatgagtgcgtgcaagagcccttcggtgctaaatgcctctgccctctggggtttctgttagccaacgacagcaagacctgtgaggatattgacgaatgtgatattcttggtagctgttcacagcattgctacaacatgcggggaagcttcagatgtagctgtgatacagggtacatgctggagagcgacggcaggacttgtaaggtcacagcttccgaaagccttttgttgctcgtcgcctctcagaacaaaattatagcagacagcgttactagtcaagtgcacaatatatattccttagtagagaacggaagttacattgtggccgtggatttcgactctatatctgggaggatattctggtcagacgcaacccagggcaagacttggagtgcattccagaacgggacagatagaagggtcgttttcgactcaagcatcatcctgaccgaaacaattgcgattgactgggtgggacgcaacctctactggaccgattacgctctcgaaaccatagaggtctcaaaaatcgacggatcacatcgcacagttctgataagcaaaaatttgaccaaccctaggggacttgctctcgacccccgaatgaacgagcatttgctgttttggtccgactggggccaccatcctcgaattgaaagggcatctatggacggcagtatgcgcactgtgatcgtgcaggacaagatcttctggccttgcggcctaaccatcgactatcctaatcgtctgctgtatttcatggactcatacctggactatatggacttctgtgactacaatggccaccaccgtagacaagtcatcgcatcggacctcattataaggcacccctacgcactaaccctttttgaagatagtgtgtattggacagaccgagccacacgtcgagtgatgagggcaaataagtggcacggaggcaaccagtccgtcgtaatgtataatattcagtggcccctgggcatcgtggcagtccatccaagtaagcagcccaatagtgtgaatccttgcgcatttagtagatgttcccacctctgtttgctctcatcacagggaccgcacttctacagttgtgtctgtccaagcggatggtccctttcacccgacctactgaactgcctaagagatgatcaacctttcctgataaccgtgcgccagcatatcattttcggtatcagcctgaaccccgaggtgaagtccaatgatgccatggtccctatcgctgggattcaaaatggcctggacgtcgaatttgacgacgccgaacaatacatctattgggtcgaaaatcctggagaaatacatagagtcaagacggatgggactaaccgcactgtgttcgcctcaattagcatggtggggccaagcatgaaccttgccctggactggatttctaggaacctgtattctacaaatcctagaacccagagcatcgaagtattgactttacatggcgatatacgctaccgaaaaacccttattgcgaatgacggaaccgcgctgggcgtgggtttccctatcggaatcactgtcgatccagcccgaggaaagctgtattggtctgaccagggcactgactctggtgtgcctgctaagattgcaagcgccaacatggatggcacaagtgtgaaaaccctttttacaggcaacctcgagcatctggagtgcgtaactttagacattgaggaacaaaagctttattgggccgtcactgggaggggagtgatcgagaggggaaatgtagacggtaccgaccgtatgatattggtgcatcagctgtcacatccatggggaattgctgtccatgacagttttttgtattatactgacgagcagtacgaagtcatcgaacgcgtcgataaagccacgggtgccaataagattgtgctgagagacaacgtccccaacctgcgcggactccaggtgtaccatcgaaggaacgctgcggagtcctccaatgggtgttccaataatatgaacgcctgccagcagatctgtctgcctgtgcctggtgggctgttctcatgtgcttgcgcgaccggcttcaaactcaatcccgataaccggagttgttccccgtacaactcttttatcgtagtgtctatgctgtcagctatccggggttttagtttggagctcagtgatcactcagagacaatggtgcctgtagccggtcaaggcagaaatgcccttcatgtagacgtggacgtttcatctgggttcatatattggtgtgacttttcaagtagtgtggcgtctgataatgctattcgtcggatcaaacccgacggcagctcactgatgaatatagtgacccacggaattggagagaacggggtcagaggtattgcagtggattgggtggctgggaatctgtatttcaccaatgcattcgtcagtgagacactaatcgaggtcttgcgcattaatacgacctaccgcagagtcctgctgaaggtcacagttgatatgcccagacatatcgtagtggatccaaagaatcggtatctgttctgggccgactacggacagcgaccaaaaattgaacggtccttcctcgattgcacaaacaggactgttctggttagcgaaggtattgtcacccccaggggattagccgtggacaggtctgatggctacgtatactgggttgatgactccctggatattattgccagaattcgcatcaatggggagaatagcgaagtgataaggtacgggtctagatacccgaccccatatggaatcacagtgtttgaaaattcgattatttgggtcgacagaaatttgaaaaaaatctttcaggcatccaaggaacctgagaacaccgagcccccaacagtgatccgcgacaacatcaactggctaagagatgtgactatttttgacaagcaagtccaacccaggagcccagcagaagtgaacaataacccatgcctggagaacaatggtggatgctcacacttatgttttgctctccccggtctgcatacacctaagtgtgactgcgcgtttggcacgctgcagagtgacggcaagaactgtgcgatcagcacagaaaattttctcatattcgccctgtctaactctttgaggtcattgcacctggatcccgaaaatcattccccgcctttccagacaatcaacgtggaacggacagtgatgtctcttgactacgactctgtcagcgataggatttacttcacccaaaatttggcctcgggtgtcgggcagatctcatatgcaactctttcatccggaatccacactcccacagtaatcgccagtggtattggcacggcagatggaatagcgtttgactggataacacgaaggatatactattctgactatctgaatcaaatgattaactctatggccgaagatggaagcaatcgaacagtgatcgcccgagtgccaaaacctagagccatcgtcctggacccctgccagggatacttgtattgggctgactgggatacccatgccaaaatcgaaagggccaccttggggggtaatttccgcgtccccatcgtgaattcttccctggtgatgccaagtggcctaaccctggactatgaggaggatctgctgtactgggtcgacgcctcactgcaacggatcgaacgaagtacactgacaggggtggacagggaagttattgtcaatgcagctgtgcacgcttttggactcaccctatatggacagtacatatattggacagatctgtatacccagcggatctaccgggcaaacaaatatgacggatccggccagattgcgatgacaacaaatctgctctcccagccccgaggcattaatacagtcgtcaaaaatcaaaaacagcagtgcaataatccttgcgagcagtttaacggtggctgtagccatatctgcgcgcctgggcctaacggtgccgagtgtcagtgcccgcatgaaggaaactggtacctcgccaataataggaagcactgcatagtcgataacggagagcgatgtggcgcaagcagttttacatgcagtaacggcagatgtataagtgaggaatggaagtgtgacaacgataacgactgtggcgatggaagcgacgagatggaatctgtgtgcgctctgcatacttgtagccccactgcattcacatgtgccaatggaagatgtgtgcagtattcatacagatgtgactactacaacgactgtggcgacgggagcgacgaggctgggtgcttattcagggactgtaacgcaacgacagaattcatgtgcaacaacagacgctgtattccgcgagagttcatttgcaacggcgttgacaattgtcacgacaacaatacctctgacgaaaaaaactgtcctgacagaacctgtcagtctggatacactaagtgccacaattcgaacatctgcattccaagagtctatctctgtgacggagataatgactgtggcgacaactctgacgaaaacccgacatactgcacaactcacacctgctcctcttctgaattccagtgcgcatcaggtagatgtataccccagcattggtattgcgatcaggagacagattgcttcgatgctagcgatgaaccagctagttgcggacacagtgagaggacatgtcttgcagatgaattcaaatgtgacggcggtagatgcataccttccgagtggatctgcgatggagacaatgattgtggagatatgtccgatgaggataagcgacaccagtgccaaaatcaaaactgtagcgactccgaattcctttgcgtgaacgatcggccaccggatcggcgatgcataccccaaagttgggtgtgcgacggggatgtggattgcactgacgggtacgacgagaatcaaaactgtacaagacggacatgctcggagaacgagttcacttgcggctatggactgtgcattcccaaaattttccgctgcgacagacacaatgattgcggcgactattcagacgaacgcggatgcctgtatcaaacgtgtcagcagaatcaattcacgtgccagaacggccgatgcatcagcaagacatttgtttgtgatgaagataacgactgcggcgatggttcagacgaactgatgcacctgtgtcacacaccagagcctacgtgcccgcctcacgaattcaagtgcgacaatggccgttgcatagaaatgatgaaactatgtaatcatttggacgattgtctcgacaattccgacgagaaaggttgcgggatcaacgagtgtcacgatccatctatctccggctgcgaccacaattgcactgacaccctgacatccttctattgtagttgtcgccctggctacaaattaatgtcagacaaacgaacctgcgtagacattgatgagtgcaccgagatgccgttcgtctgctcccaaaagtgtgagaacgtgattggatcttacatctgcaagtgcgctcctggatacctccgggagcctgacggcaagacctgccggcagaactccaacatcgaaccctacttgattttcagtaatagatattatcttcgcaacctcaccattgatggctatttctacagcctgatcctcgaaggtctggataacgtcgtggctctggattttgaccgggtggaaaagagattatattggatcgatacccagcggcaggtgatcgaacggatgttccttaacaagacgaacaaggaaaccattattaatcaccgtctgccagccgcagagtctttagctgtggattgggttagtagaaagctgtactggcttgatgctcgcctggatggactctttgtcagcgacctaaacggtggccataggcggatgttggctcaacactgcgtggatgctaacaataccttttgtttcgataatccacgcggacttgcactgcaccctcagtatggatacctgtattgggctgattggggtcaccgtgcctatatcggccgagtcggaatggacggtaccaataaaagcgtcatcatttccactaagctcgaatggcctaatgggattactatagactatactaatgacttgctatactgggccgacgctcatctcggctacatagagtatagcgacctggaagggcatcatagacatacagtgtacgatggggcacttccgcaccctttcgccatcaccatttttgaggacactatctactggacagattggaacacacggacagtggaaaaaggaaacaagtatgacgggtctaacaggcagactctcgtaaacactacccacaggccttttgacatccacgtgtaccacccataccgacagccgattgtgtcaaatccatgcgggaccaataacggaggctgctcacacctttgcctcattaaacccggagggaaaggctttacctgtgagtgccccgatgactttcgcacgctccagctgagtggatctacttactgcatgcctatgtgttcttccacgcagtttctgtgtgccaacaatgaaaaatgcattcccatatggtggaaatgcgatgggcagaaggattgttcagacggctccgacgagctcgctctttgccctcagaggttttgtaggctaggtcagtttcagtgctctgatggaaactgtacaagtccacagacgctatgtaatgctcatcagaattgccccgatggatccgatgaggaccgcctgctgtgcgagaaccaccactgcgatagtaatgagtggcaatgcgccaacaaaaggtgcatccccgagagttggcagtgtgatacttttaacgactgcgaggataactctgatgaggactcatcacattgtgcgtcaagaacctgcaggcccggtcaattccggtgtgccaacggcaggtgtatccctcaagcatggaaatgcgacgtggacaatgactgtggtgaccactcagatgaaccgatagaagaatgcatgagtagcgcacatttgtgtgacaactttaccgaattctcttgcaaaacaaactacagatgtattcccaaatgggcggtctgcaatggggtggacgactgtcgggacaatagcgacgaacagggttgcgaggagagaacctgccaccctgtcggagactttaggtgtaaaaatcaccattgcattcccctgcgctggcagtgtgacggccaaaatgactgtggcgataacagtgacgaggaaaactgtgcaccaagagaatgtactgagagcgagttccgttgtgtcaatcagcagtgcattccctctagatggatatgtgatcattataatgactgtggcgataactcagatgagagagactgcgaaatgcgcacctgccatcctgaatatttccagtgcacaagtggccactgcgtgcattctgagctgaagtgtgacgggtccgcggattgtcttgacgcatcggatgaggcagactgccccactagatttcccgacggcgcttattgtcaggcaactatgttcgagtgcaagaaccatgtgtgcattcctccctactggaaatgtgatggagatgacgactgtggagacggctccgatgaagagctgcacctgtgcctggacgtcccttgtaacagcccgaatcggtttcggtgcgataataatcggtgtatttattcacacgaggtgtgtaacggcgttgatgattgcggagacggcactgacgagacggaagagcactgtcggaagccgacgccgaaaccttgcaccgagtacgagtataagtgcggaaacggtcactgcattcctcatgacaacgtgtgtgacgatgccgacgattgcggcgactggagtgacgaactaggatgtaacaaggggaaagagcgaacctgtgctgaaaacatctgtgaacagaattgtacgcaactaaacgagggtggattcatctgtagttgtacggccggattcgagaccaacgtgtttgatcgaacatcctgcctggacattaacgaatgcgagcagttcggtacatgtcctcagcactgccgaaatacaaagggctcttatgagtgtgtgtgcgctgatggatttacctcaatgagcgatagacctggtaagcggtgcgccgcagagggttcctcccccctcttgctactccctgataacgtaagaattagaaaatataaccttagcagcgaacggttcagcgagtacctgcaagacgaggagtacatccaggccgttgactacgactgggacccaaaggatattgggttgtccgtggtgtactatactgtgcgcggagaggggtctaggtttggagccatcaaaagggcttacatacccaacttcgagagcggccgaaacaacttggttcaggaagtggacctaaaactgaaatatgttatgcagccagacgggattgccgtagactgggtggggagacatatctattggagcgatgtgaagaacaagagaatcgaggtcgccaagctggatggtcgctatcggaagtggctgatcagcactgatctggatcagcccgcagccatcgccgttaatcccaaactcggtcttatgttctggaccgactggggtaaagagccaaagattgagtccgcctggatgaacggcgaagataggaatatcctagtcttcgaggacctcgggtggcccaccggcttgtctattgattacctcaataatgatagaatctactggagcgactttaaggaggacgttatcgagaccatcaagtatgacggcacagacagaagggtcatcgcaaaggaagctatgaacccctacagtttagatatttttgaagaccagttgtattggatcagtaaagaaaagggcgaagtgtggaagcagaataagttcggccaaggaaagaaagaaaagactctggtggttaacccatggctcactcaagttcgaattttccaccaactccgatataataagagtgtccctaatctgtgcaagcagatctgcagccacttgtgcttgctgcgacccggaggctatagctgtgcgtgccctcaaggaagcagctttattgagggatccacaacagagtgtgatgccgcaatcgagctgccaattaacttgcccccaccctgtagatgtatgcatggagggaactgctactttgacgagacagacctgcccaaatgtaaatgtccctccgggtacaccggcaagtattgtgagatggccttctccaagggtatcagcccaggaaccacagccgtggccgttttgctgacgatcctccttattgtcgtgatcggagcgcttgccatcgccggtttttttcactatcgcaggactggatccctgcttccggctctcccaaaactgccttcgctttcctcactcgtgaagccaagtgaaaacggcaacggtgtaacttttagatccggcgctgaccttaacatggacattggcgttagtggattcggacccgagaccgcaatcgaccgatccatggctatgagcgaggatttcgtgatggaaatgggtaagcagcccataattttcgaaaaccctatgtatagcgcccgagacagcgcagtgaaggtggtacagcccatccaggtgaccgtgagtgaaaatgttgataacaaaaattatgggtccccaataaacccaagcgagatcgtgccagagacgaaccctacgagtcccgctgcagatggcacacaagttacgaaatggaacctgttcaaacgaaagagcaaacagaccactaattttgaaaaccccatttacgcacagatggagaatgagcagaaggaaagcgtggcagcaacaccccctccatcaccaagtctgcctgctaagccaaagccaccatctcgcagggatcctactcctacatattctgccactgaggatacgtttaaggacacagctaaccttgtgaaagaggacagcgaggtctat

SEQ ID NO: 147131 - DNA, 3678 bp, Artificial Sequence
  derived and/or modified sequence
atggaccggggacccgcagcagttgcctgcactctgctcctcgctctcgtcgcctgcttggcgcctgctagcggtcaagaatgtgatagtgcccactttcgatgcggtagtgggcattgtattccggctgattggagatgtgacggcacaaaggattgctccgacgatgcagacgagataggttgtgcagtggttacatgccagcaggggtacttcaaatgccagtccgagggccagtgtatacctaattcctgggtgtgtgatcaggaccaagactgcgatgatgggtccgacgagcgtcaagattgttcacagagcacgtgctcttctcaccagatcacctgcagcaacggccaatgcatcccctctgaatacagatgcgatcacgtgcgcgactgtcccgatggggctgacgagaacgattgccagtatcccacgtgcgaacaactgacctgtgacaatggtgcatgctataacaccagtcagaaatgcgattggaaagtcgactgcagagactccagtgatgaaatcaattgtacagaaatttgccttcataacgagttttcgtgtggaaatggcgagtgtattccacgtgcctatgtgtgcgaccacgacaatgactgccaagacggttcagacgagcacgcctgcaattaccccacgtgtggtggctaccagttcacttgcccttctggcagatgcatctatcaaaattgggtgtgtgatggggaagatgactgcaaagataacggcgatgaggacggctgtgaaagtggaccacacgatgttcacaaatgctcgcctagagaatggagctgtccagagtctggcagatgtatttccatctataaggtgtgcgacgggattcttgactgcccgggtcgcgaggatgagaataatacttccactggaaaatattgttccatgacactgtgctctgcgctgaactgccagtatcagtgtcacgagacaccctacggcggtgcctgtttctgccctcctggctacattattaatcacaacgacagtcgcacatgcgtcgaatttgatgattgccagatatggggaatatgcgaccagaaatgcgagtcccgccctgggagacacttatgtcattgtgaggaggggtacatccttgaacgcggacaatactgtaaagcaaatgacagtttcggtgaagcaagcatcattttttctaacggacgggacctcctcatcggggatattcacgggagatcctttcgaattctcgtcgagagccagaaccgcggagtggctgtaggcgtcgcttttcactaccatttacaaagagtgttctggaccgacactgtccaaaacaaagtctttagcgtggatataaatggtctgaatatccaggaggtcttaaacgtgtcggtcgagacacccgagaatctagcagttgactgggtcaataacaagatctatcttgtcgaaactaaagtgaaccgcatcgacatggtaaacctcgacggaagctatagagtcacgctgatcactgagaacttagggcaccccaggggaattgctgtcgaccctacggtggggaaaaccgtggtgcacgggggaagtctgatacctcacccttttggcgtcagcctgttcgaggggcaggtcttctttactgactggaccaagatggccgtcctaaaggcgaacaagtttacagaaactaacccgcaggtttactatcaggcctccctccggccttacggcgtaaccgtataccactccctacgccagccttacgctactaatccttgcaaagacaataacggaggctgcgagcaggtatgtgtcctgagccatcgcacagacaatgacgggctggggtttagatgtaaatgtacttttgggtttcagttagacactgatgagcggcattgtatcggccgagaaatcttagcagcaaatagagtagagaatgtggagtctttagcttttgattggatatctaagaatctgtactggacagacagccactacaagtccatttctgttatgcggctggccgataagacgaggcgcacagttgtccagtatctgaacaatccgagaagtgtggtagtgcaccctttcgccggatatctgttcttcaccgattggttccgcccagccaaaattatgagagcgtggagtgatggatcccatcttttgcccgtgataaacaccacactcggatggccaaatggacttgcgatcgattgggcagccagccggctgtactgggtcgacgcatacttcgacaaaatcgaacacagcaccttcgatggcctggacagacggaggcttggccacattgaacagatgacacacccttttggtttagcaatcttcggtgaacaccttttcttcaccgactggcgacttggagccattatcagagtcagaaaagccgacggtggagaaatgacggtgatccggagcggaatcgcgtacatccttcacctgaagagttatgatgtgaatatccaaaccggcagcaatgcctgcaatcagccaacccaccccaatggtgactgtagccatttttgtttccccgttcctaattttcagcgcgtgtgcggttgtccatatgggatgcggttggccagcaaccacctgacctgcgaaggcgatcccacaaacgagcctccgacagagcagtgcggattattcagcttcccctgcaaaaacggaaggtgtgtccccaactattatctgtgtgacggcgtggatgattgccacgataattcggacgagcagctgtgtggtacattgaacaatacgtgctcttcctccgctttcacgtgcggtcatggagagtgtatccctgcccactggcggtgtgataaacgtaatgattgcgttgatggttctgatgagcacaactgccccacacacgccccagccagctgtctggacacacagtacacctgtgacaaccaccaatgcatttctaagaattgggtctgcgacacagacaatgactgtggtgacggttctgacgagaaaaattgtaattctacagagacatgtcagccatcccagttcaattgccctaatcacagatgcattgacctgtcctttgtctgcgacggcgataaggattgcgtggacggaagtgatgaagtggggtgtgtgttaaattgtaccgcgagtcagtttaaatgcgctagcggggacaaatgcatcggggtaactaatcggtgtgacggcgtcttcgattgcagcgacaattctgacgaagcaggatgccccaccaggccccctggaatgtgtcattcagatgagtttcagtgccaggaagatgggatatgcattcccaatttctgggagtgcgatggccaccccgactgcttatatggcagtgatgaacataatgcctgcgtgcctaaaacttgtcccagttcttacttccattgtgataatggaaattgcatccacagggcttggttatgtgatcgggataacgactgcggcgatatgagtgacgaaaaggattgtcctacccagcctttccgatgccctagttggcagtggcagtgcctcggccacaatatctgcgttaacctctccgtggtgtgcgatgggatctttgactgccccaacggtaccgacgagagtcccctttgtagcaagttcccggatcacagtctgctggctatcaattcattctag

SEQ ID NO: 147132 - DNA, 1941 bp, Artificial Sequence
  derived and/or modified sequence
atgttggcccagcattgtgtcgacgcgaacaacacattctgttttgacaacccacggggacttgccctgcaccctcagtacggctatctctactgggcagactggggccacagggcgtatatcggtcgcgtcggcatggacggaactaataaaagcgtcatcatatctacaaagctggagtggccgaatgggattaccattgactataccaacgacctgttgtattgggccgacgcgcacctcgggtatatcgagtattccgatttagaaggacaccatcggcatactgtatatgacggggctctgccccacccgtttgctatcaccatctttgaggatacaatatattggaccgactggaacacccgaaccgtcgaaaagggcaacaagtacgacggaagtaacaggcaaactctggtgaatacaacacacaggcccttcgacatccatgtgtaccacccgtaccgtcaacccatcgtgtctaacccctgtgggaccaacaacggaggctgtagtcatttgtgcctgataaagccaggcggaaagggctttacgtgcgagtgcccagacgatttccggacgctgcagctgagtggtagcacctactgtatgcctatgtgcagctcaactcaattcctgtgtgccaataacgagaaatgcatccctatttggtggaagtgcgacgggcagaaggattgttcagatggatccgatgaacttgccctgtgcccccagaggttctgccgtttggggcagttccagtgcagcgacggtaactgcacctcaccccagaccctatgtaacgctcaccaaaactgcccggacggaagtgacgaagaccgactcctgtgcgagaaccaccactgcgactcgaatgaatggcagtgtgcaaacaaacggtgtatcccagagtcctggcaatgtgatacttttaatgactgtgaggacaattccgacgaagattcttcacactgcgccagccgcacttgcaggccaggccaattcagatgcgccaacggacgctgtataccacaggcatggaaatgcgatgtggacaatgattgtggggatcattccgatgagcctatcgaagagtgtatgtctagtgcgcacctatgcgacaatttcaccgagttcagctgcaaaaccaattaccgctgcataccaaagtgggcggtgtgcaacggagttgatgattgtcgagataattccgacgaacagggctgtgaggagagaacatgccaccctgtgggcgacttcagatgtaagaaccaccattgcataccacttcggtggcagtgcgacggacaaaacgattgtggggacaattccgacgaagagaactgtgctccgcgagaatgcaccgagagcgaatttcgctgtgtgaaccagcaatgtatcccttctaggtggatttgcgatcattacaacgactgcggcgacaacagtgacgagcgggattgtggaatgcggctcatgaagctcatcgtcccacacgcatttctcatggtgcacacagcacggcttctctgtagcaatgccaaaaccatgtttgtgagccggcacattgggaacgtgatggccatgatgacggtcgctatggtgcagatgaaaaatttcacatgcgcatggatgttcccagttattcaccaaaccgtaagcggagtgacaaccattgctgcgttcatcgtcatgagatgcgcaatggtttggatgacagtggaaatggagctcatgcgacagagatcaacggtcgaaaatagacctctgaacctcgtacagaacatgaatatttccgtggcgatgggcatcgcgttccacatgacaatgtgcgtcatgatgcccatgaccgtcgtcaccgggccaatgaattgggtggcgattaaagaaaaaaaggaacatgtgctcaagatatatgcttccaagattgtgcccaactag

SEQ ID NO: 147133 - DNA, 13968 bp, Artificial Sequence
  derived and/or modified sequence
atggacagaggccccgccgccgtggcctgcaccctgctgctggccctggtggcctgcctggcccccgccagcggccaggagtgcgacagcgcccacttcagatgcggcagcggccactgcatccccgccgactggagatgcgacggcaccaaggactgcagcgacgacgccgacgagatcggctgcgccgtggtgacctgccagcagggctacttcaagtgccagagcgagggccagtgcatccccaacagctgggtgtgcgaccaggaccaggactgcgacgacggcagcgacgagagacaggactgcagccagagcacctgcagcagccaccagatcacctgcagcaacggccagtgcatccccagcgagtacagatgcgaccacgtgagagactgccccgacggcgccgacgagaacgactgccagtaccccacctgcgagcagctgacctgcgacaacggcgcctgctacaacaccagccagaagtgcgactggaaggtggactgcagagacagcagcgacgagatcaactgcaccgagatctgcctgcacaacgagttcagctgcggcaacggcgagtgcatccccagagcctacgtgtgcgaccacgacaacgactgccaggacggcagcgacgagcacgcctgcaactaccccacctgcggcggctaccagttcacctgccccagcggcagatgcatctaccagaactgggtgtgcgacggcgaggacgactgcaaggacaacggcgacgaggacggctgcgagagcggcccccacgacgtgcacaagtgcagccccagagagtggagctgccccgagagcggcagatgcatcagcatctacaaggtgtgcgacggcatcctggactgccccggcagagaggacgagaacaacaccagcaccggcaagtactgcagcatgaccctgtgcagcgccctgaactgccagtaccagtgccacgagaccccctacggcggcgcctgcttctgcccccccggctacatcatcaaccacaacgacagcagaacctgcgtggagttcgacgactgccagatctggggcatctgcgaccagaagtgcgagagcagacccggcagacacctgtgccactgcgaggagggctacatcctggagagaggccagtactgcaaggccaacgacagcttcggcgaggccagcatcatcttcagcaacggcagagacctgctgatcggcgacatccacggcagaagcttcagaatcctggtggagagccagaacagaggcgtggccgtgggcgtggccttccactaccacctgcagagagtgttctggaccgacaccgtgcagaacaaggtgttcagcgtggacatcaacggcctgaacatccaggaggtgctgaacgtgagcgtggagacccccgagaacctggccgtggactgggtgaacaacaagatctacctggtggagaccaaggtgaacagaatcgacatggtgaacctggacggcagctacagagtgaccctgatcaccgagaacctgggccaccccagaggcatcgccgtggaccccaccgtgggctacctgttcttcagcgactgggagagcctgagcggcgagcccaagctggagagagccttcatggacggcagcaacagaaaggacctggtgaagaccaagctgggctggcccgccggcgtgaccctggacatgatcagcaagagagtgtactgggtggacagcagattcgactacatcgagaccgtgacctacgacggcatccagagaaagaccgtggtgcacggcggcagcctgatcccccaccccttcggcgtgagcctgttcgagggccaggtgttcttcaccgactggaccaagatggccgtgctgaaggccaacaagttcaccgagaccaacccccaggtgtactaccaggccagcctgagaccctacggcgtgaccgtgtaccacagcctgagacagccctacgccaccaacccctgcaaggacaacaacggcggctgcgagcaggtgtgcgtgctgagccacagaaccgacaacgacggcctgggcttcagatgcaagtgcaccttcggcttccagctggacaccgacgagagacactgcatcgccgtgcagaacttcctgatcttcagcagccaggtggccatcagaggcatccccttcaccctgagcacccaggaggacgtgatggtgcccgtgagcggcaaccccagcttcttcgtgggcatcgacttcgacgcccaggacagcaccatcttcttcagcgacatgagcaagcacatgatcttcaagcagaagatcgacggcaccggcagagagatcctggccgccaacagagtggagaacgtggagagcctggccttcgactggatcagcaagaacctgtactggaccgacagccactacaagagcatcagcgtgatgagactggccgacaagaccagaagaaccgtggtgcagtacctgaacaaccccagaagcgtggtggtgcaccccttcgccggctacctgttcttcaccgactggttcagacccgccaagatcatgagagcctggagcgacggcagccacctgctgcccgtgatcaacaccaccctgggctggcccaacggcctggccatcgactgggccgccagcagactgtactgggtggacgcctacttcgacaagatcgagcacagcaccttcgacggcctggacagaagaagactgggccacatcgagcagatgacccaccccttcggcctggccatcttcggcgagcacctgttcttcaccgactggagactgggcgccatcatcagagtgagaaaggccgacggcggcgagatgaccgtgatcagaagcggcatcgcctacatcctgcacctgaagagctacgacgtgaacatccagaccggcagcaacgcctgcaaccagcccacccaccccaacggcgactgcagccacttctgcttccccgtgcccaacttccagagagtgtgcggctgcccctacggcatgagactggccagcaaccacctgacctgcgagggcgaccccaccaacgagccccccaccgagcagtgcggcctgttcagcttcccctgcaagaacggcagatgcgtgcccaactactacctgtgcgacggcgtggacgactgccacgacaacagcgacgagcagctgtgcggcaccctgaacaacacctgcagcagcagcgccttcacctgcggccacggcgagtgcatccccgcccactggagatgcgacaagagaaacgactgcgtggacggcagcgacgagcacaactgccccacccacgcccccgccagctgcctggacacccagtacacctgcgacaaccaccagtgcatcagcaagaactgggtgtgcgacaccgacaacgactgcggcgacggcagcgacgagaagaactgcaacagcaccgagacctgccagcccagccagttcaactgccccaaccacagatgcatcgacctgagcttcgtgtgcgacggcgacaaggactgcgtggacggcagcgacgaggtgggctgcgtgctgaactgcaccgccagccagttcaagtgcgccagcggcgacaagtgcatcggcgtgaccaacagatgcgacggcgtgttcgactgcagcgacaacagcgacgaggccggctgccccaccagaccccccggcatgtgccacagcgacgagttccagtgccaggaggacggcatctgcatccccaacttctgggagtgcgacggccaccccgactgcctgtacggcagcgacgagcacaacgcctgcgtgcccaagacctgccccagcagctacttccactgcgacaacggcaactgcatccacagagcctggctgtgcgacagagacaacgactgcggcgacatgagcgacgagaaggactgccccacccagcccttcagatgccccagctggcagtggcagtgcctgggccacaacatctgcgtgaacctgagcgtggtgtgcgacggcatcttcgactgccccaacggcaccgacgagagccccctgtgcaacggcaacagctgcagcgacttcaacggcggctgcacccacgagtgcgtgcaggagcccttcggcgccaagtgcctgtgccccctgggcttcctgctggccaacgacagcaagacctgcgaggacatcgacgagtgcgacatcctgggcagctgcagccagcactgctacaacatgagaggcagcttcagatgcagctgcgacaccggctacatgctggagagcgacggcagaacctgcaaggtgaccgccagcgagagcctgctgctgctggtggccagccagaacaagatcatcgccgacagcgtgaccagccaggtgcacaacatctacagcctggtggagaacggcagctacatcgtggccgtggacttcgacagcatcagcggcagaatcttctggagcgacgccacccagggcaagacctggagcgccttccagaacggcaccgacagaagagtggtgttcgacagcagcatcatcctgaccgagaccatcgccatcgactgggtgggcagaaacctgtactggaccgactacgccctggagaccatcgaggtgagcaagatcgacggcagccacagaaccgtgctgatcagcaagaacctgaccaaccccagaggcctggccctggaccccagaatgaacgagcacctgctgttctggagcgactggggccaccaccccagaatcgagagagccagcatggacggcagcatgagaaccgtgatcgtgcaggacaagatcttctggccctgcggcctgaccatcgactaccccaacagactgctgtacttcatggacagctacctggactacatggacttctgcgactacaacggccaccacagaagacaggtgatcgccagcgacctgatcatcagacacccctacgccctgaccctgttcgaggacagcgtgtactggaccgacagagccaccagaagagtgatgagagccaacaagtggcacggcggcaaccagagcgtggtgatgtacaacatccagtggcccctgggcatcgtggccgtgcaccccagcaagcagcccaacagcgtgaacccctgcgccttcagcagatgcagccacctgtgcctgctgagcagccagggcccccacttctacagctgcgtgtgccccagcggctggagcctgagccccgacctgctgaactgcctgagagacgaccagcccttcctgatcaccgtgagacagcacatcatcttcggcatcagcctgaaccccgaggtgaagagcaacgacgccatggtgcccatcgccggcatccagaacggcctggacgtggagttcgacgacgccgagcagtacatctactgggtggagaaccccggcgagatccacagagtgaagaccgacggcaccaacagaaccgtgttcgccagcatcagcatggtgggccccagcatgaacctggccctggactggatcagcagaaacctgtacagcaccaaccccagaacccagagcatcgaggtgctgaccctgcacggcgacatcagatacagaaagaccctgatcgccaacgacggcaccgccctgggcgtgggcttccccatcggcatcaccgtggaccccgccagaggcaagctgtactggagcgaccagggcaccgacagcggcgtgcccgccaagatcgccagcgccaacatggacggcaccagcgtgaagaccctgttcaccggcaacctggagcacctggagtgcgtgaccctggacatcgaggagcagaagctgtactgggccgtgaccggcagaggcgtgatcgagagaggcaacgtggacggcaccgacagaatgatcctggtgcaccagctgagccacccctggggcatcgccgtgcacgacagcttcctgtactacaccgacgagcagtacgaggtgatcgagagagtggacaaggccaccggcgccaacaagatcgtgctgagagacaacgtgcccaacctgagaggcctgcaggtgtaccacagaagaaacgccgccgagagcagcaacggctgcagcaacaacatgaacgcctgccagcagatctgcctgcccgtgcccggcggcctgttcagctgcgcctgcgccaccggcttcaagctgaaccccgacaacagaagctgcagcccctacaacagcttcatcgtggtgagcatgctgagcgccatcagaggcttcagcctggagctgagcgaccacagcgagaccatggtgcccgtggccggccagggcagaaacgccctgcacgtggacgtggacgtgagcagcggcttcatctactggtgcgacttcagcagcagcgtggccagcgacaacgccatcagaagaatcaagcccgacggcagcagcctgatgaacatcgtgacccacggcatcggcgagaacggcgtgagaggcatcgccgtggactgggtggccggcaacctgtacttcaccaacgccttcgtgagcgagaccctgatcgaggtgctgagaatcaacaccacctacagaagagtgctgctgaaggtgaccgtggacatgcccagacacatcgtggtggaccccaagaacagatacctgttctgggccgactacggccagagacccaagatcgagagaagcttcctggactgcaccaacagaaccgtgctggtgagcgagggcatcgtgacccccagaggcctggccgtggacagaagcgacggctacgtgtactgggtggacgacagcctggacatcatcgccagaatcagaatcaacggcgagaacagcgaggtgatcagatacggcagcagataccccaccccctacggcatcaccgtgttcgagaacagcatcatctgggtggacagaaacctgaagaagatcttccaggccagcaaggagcccgagaacaccgagccccccaccgtgatcagagacaacatcaactggctgagagacgtgaccatcttcgacaagcaggtgcagcccagaagccccgccgaggtgaacaacaacccctgcctggagaacaacggcggctgcagccacctgtgcttcgccctgcccggcctgcacacccccaagtgcgactgcgccttcggcaccctgcagagcgacggcaagaactgcgccatcagcaccgagaacttcctgatcttcgccctgagcaacagcctgagaagcctgcacctggaccccgagaaccacagcccccccttccagaccatcaacgtggagagaaccgtgatgagcctggactacgacagcgtgagcgacagaatctacttcacccagaacctggccagcggcgtgggccagatcagctacgccaccctgagcagcggcatccacacccccaccgtgatcgccagcggcatcggcaccgccgacggcatcgccttcgactggatcaccagaagaatctactacagcgactacctgaaccagatgatcaacagcatggccgaggacggcagcaacagaaccgtgatcgccagagtgcccaagcccagagccatcgtgctggacccctgccagggctacctgtactgggccgactgggacacccacgccaagatcgagagagccaccctgggcggcaacttcagagtgcccatcgtgaacagcagcctggtgatgcccagcggcctgaccctggactacgaggaggacctgctgtactgggtggacgccagcctgcagagaatcgagagaagcaccctgaccggcgtggacagagaggtgatcgtgaacgccgccgtgcacgccttcggcctgaccctgtacggccagtacatctactggaccgacctgtacacccagagaatctacagagccaacaagtacgacggcagcggccagatcgccatgaccaccaacctgctgagccagcccagaggcatcaacaccgtggtgaagaaccagaagcagcagtgcaacaacccctgcgagcagttcaacggcggctgcagccacatctgcgcccccggccccaacggcgccgagtgccagtgcccccacgagggcaactggtacctggccaacaacagaaagcactgcatcgtggacaacggcgagagatgcggcgccagcagcttcacctgcagcaacggcagatgcatcagcgaggagtggaagtgcgacaacgacaacgactgcggcgacggcagcgacgagatggagagcgtgtgcgccctgcacacctgcagccccaccgccttcacctgcgccaacggcagatgcgtgcagtacagctacagatgcgactactacaacgactgcggcgacggcagcgacgaggccggctgcctgttcagagactgcaacgccaccaccgagttcatgtgcaacaacagaagatgcatccccagagagttcatctgcaacggcgtggacaactgccacgacaacaacaccagcgacgagaagaactgccccgacagaacctgccagagcggctacaccaagtgccacaacagcaacatctgcatccccagagtgtacctgtgcgacggcgacaacgactgcggcgacaacagcgacgagaaccccacctactgcaccacccacacctgcagcagcagcgagttccagtgcgccagcggcagatgcatcccccagcactggtactgcgaccaggagaccgactgcttcgacgccagcgacgagcccgccagctgcggccacagcgagagaacctgcctggccgacgagttcaagtgcgacggcggcagatgcatccccagcgagtggatctgcgacggcgacaacgactgcggcgacatgagcgacgaggacaagagacaccagtgccagaaccagaactgcagcgacagcgagttcctgtgcgtgaacgacagaccccccgacagaagatgcatcccccagagctgggtgtgcgacggcgacgtggactgcaccgacggctacgacgagaaccagaactgcaccagaagaacctgcagcgagaacgagttcacctgcggctacggcctgtgcatccccaagatcttcagatgcgacagacacaacgactgcggcgactacagcgacgagagaggctgcctgtaccagacctgccagcagaaccagttcacctgccagaacggcagatgcatcagcaagaccttcgtgtgcgacgaggacaacgactgcggcgacggcagcgacgagctgatgcacctgtgccacacccccgagcccacctgccccccccacgagttcaagtgcgacaacggcagatgcatcgagatgatgaagctgtgcaaccacctggacgactgcctggacaacagcgacgagaagggctgcggcatcaacgagtgccacgaccccagcatcagcggctgcgaccacaactgcaccgacaccctgaccagcttctactgcagctgcagacccggctacaagctgatgagcgacaagagaacctgcgtggacatcgacgagtgcaccgagatgcccttcgtgtgcagccagaagtgcgagaacgtgatcggcagctacatctgcaagtgcgcccccggctacctgagagagcccgacggcaagacctgcagacagaacagcaacatcgagccctacctgatcttcagcaacagatactacctgagaaacctgaccatcgacggctacttctacagcctgatcctggagggcctggacaacgtggtggccctggacttcgacagagtggagaagagactgtactggatcgacacccagagacaggtgatcgagagaatgttcctgaacaagaccaacaaggagaccatcatcaaccacagactgcccgccgccgagagcctggccgtggactgggtgagcagaaagctgtactggctggacgccagactggacggcctgttcgtgagcgacctgaacggcggccacagaagaatgctggcccagcactgcgtggacgccaacaacaccttctgcttcgacaaccccagaggcctggccctgcacccccagtacggctacctgtactgggccgactggggccacagagcctacatcggcagagtgggcatggacggcaccaacaagagcgtgatcatcagcaccaagctggagtggcccaacggcatcaccatcgactacaccaacgacctgctgtactgggccgacgcccacctgggctacatcgagtacagcgacctggagggccaccacagacacaccgtgtacgacggcgccctgccccaccccttcgccatcaccatcttcgaggacaccatctactggaccgactggaacaccagaaccgtggagaagggcaacaagtacgacggcagcaacagacagaccctggtgaacaccacccacagacccttcgacatccacgtgtaccacccctacagacagcccatcgtgagcaacccctgcggcaccaacaacggcggctgcagccacctgtgcctgatcaagcccggcggcaagggcttcacctgcgagtgccccgacgacttcagaaccctgcagctgagcggcagcacctactgcatgcccatgtgcagcagcacccagttcctgtgcgccaacaacgagaagtgcatccccatctggtggaagtgcgacggccagaaggactgcagcgacggcagcgacgagctggccctgtgcccccagagattctgcagactgggccagttccagtgcagcgacggcaactgcaccagcccccagaccctgtgcaacgcccaccagaactgccccgacggcagcgacgaggacagactgctgtgcgagaaccaccactgcgacagcaacgagtggcagtgcgccaacaagagatgcatccccgagagctggcagtgcgacaccttcaacgactgcgaggacaacagcgacgaggacagcagccactgcgccagcagaacctgcagacccggccagttcagatgcgccaacggcagatgcatcccccaggcctggaagtgcgacgtggacaacgactgcggcgaccacagcgacgagcccatcgaggagtgcatgagcagcgcccacctgtgcgacaacttcaccgagttcagctgcaagaccaactacagatgcatccccaagtgggccgtgtgcaacggcgtggacgactgcagagacaacagcgacgagcagggctgcgaggagagaacctgccaccccgtgggcgacttcagatgcaagaaccaccactgcatccccctgagatggcagtgcgacggccagaacgactgcggcgacaacagcgacgaggagaactgcgcccccagagagtgcaccgagagcgagttcagatgcgtgaaccagcagtgcatccccagcagatggatctgcgaccactacaacgactgcggcgacaacagcgacgagagagactgcgagatgagaacctgccaccccgagtacttccagtgcaccagcggccactgcgtgcacagcgagctgaagtgcgacggcagcgccgactgcctggacgccagcgacgaggccgactgccccaccagattccccgacggcgcctactgccaggccaccatgttcgagtgcaagaaccacgtgtgcatccccccctactggaagtgcgacggcgacgacgactgcggcgacggcagcgacgaggagctgcacctgtgcctggacgtgccctgcaacagccccaacagattcagatgcgacaacaacagatgcatctacagccacgaggtgtgcaacggcgtggacgactgcggcgacggcaccgacgagaccgaggagcactgcagaaagcccacccccaagccctgcaccgagtacgagtacaagtgcggcaacggccactgcatcccccacgacaacgtgtgcgacgacgccgacgactgcggcgactggagcgacgagctgggctgcaacaagggcaaggagagaacctgcgccgagaacatctgcgagcagaactgcacccagctgaacgagggcggcttcatctgcagctgcaccgccggcttcgagaccaacgtgttcgacagaaccagctgcctggacatcaacgagtgcgagcagttcggcacctgcccccagcactgcagaaacaccaagggcagctacgagtgcgtgtgcgccgacggcttcaccagcatgagcgacagacccggcaagagatgcgccgccgagggcagcagccccctgctgctgctgcccgacaacgtgagaatcagaaagtacaacctgagcagcgagagattcagcgagtacctgcaggacgaggagtacatccaggccgtggactacgactgggaccccaaggacatcggcctgagcgtggtgtactacaccgtgagaggcgagggcagcagattcggcgccatcaagagagcctacatccccaacttcgagagcggcagaaacaacctggtgcaggaggtggacctgaagctgaagtacgtgatgcagcccgacggcatcgccgtggactgggtgggcagacacatctactggagcgacgtgaagaacaagagaatcgaggtggccaagctggacggcagatacagaaagtggctgatcagcaccgacctggaccagcccgccgccatcgccgtgaaccccaagctgggcctgatgttctggaccgactggggcaaggagcccaagatcgagagcgcctggatgaacggcgaggacagaaacatcctggtgttcgaggacctgggctggcccaccggcctgagcatcgactacctgaacaacgacagaatctactggagcgacttcaaggaggacgtgatcgagaccatcaagtacgacggcaccgacagaagagtgatcgccaaggaggccatgaacccctacagcctggacatcttcgaggaccagctgtactggatcagcaaggagaagggcgaggtgtggaagcagaacaagttcggccagggcaagaaggagaagaccctggtggtgaacccctggctgacccaggtgagaatcttccaccagctgagatacaacaagagcgtgcccaacctgtgcaagcagatctgcagccacctgtgcctgctgagacccggcggctacagctgcgcctgcccccagggcagcagcttcatcgagggcagcaccaccgagtgcgacgccgccatcgagctgcccatcaacctgccccccccctgcagatgcatgcacggcggcaactgctacttcgacgagaccgacctgcccaagtgcaagtgccccagcggctacaccggcaagtactgcgagatggccttcagcaagggcatcagccccggcaccaccgccgtggccgtgctgctgaccatcctgctgatcgtggtgatcggcgccctggccatcgccggcttcttccactacagaagaaccggcagcctgctgcccgccctgcccaagctgcccagcctgagcagcctggtgaagcccagcgagaacggcaacggcgtgaccttcagaagcggcgccgacctgaacatggacatcggcgtgagcggcttcggccccgagaccgccatcgacagaagcatggccatgagcgaggacttcgtgatggagatgggcaagcagcccatcatcttcgagaaccccatgtacagcgccagagacagcgccgtgaaggtggtgcagcccatccaggtgaccgtgagcgagaacgtggacaacaagaactacggcagccccatcaaccccagcgagatcgtgcccgagaccaaccccaccagccccgccgccgacggcacccaggtgaccaagtggaacctgttcaagagaaagagcaagcagaccaccaacttcgagaaccccatctacgcccagatggagaacgagcagaaggagagcgtggccgccacccccccccccagccccagcctgcccgccaagcccaagccccccagcagaagagaccccacccccacctacagcgccaccgaggacaccttcaaggacaccgccaacctggtgaaggaggacagcgaggtgtag

SEQ ID NO: 147134 - DNA, 3678 bp, Artificial Sequence
  derived and/or modified sequence
atggacagaggccccgccgccgtggcctgcaccctgctgctggccctggtggcctgcctggcccccgccagcggccaggagtgcgacagcgcccacttcagatgcggcagcggccactgcatccccgccgactggagatgcgacggcaccaaggactgcagcgacgacgccgacgagatcggctgcgccgtggtgacctgccagcagggctacttcaagtgccagagcgagggccagtgcatccccaacagctgggtgtgcgaccaggaccaggactgcgacgacggcagcgacgagagacaggactgcagccagagcacctgcagcagccaccagatcacctgcagcaacggccagtgcatccccagcgagtacagatgcgaccacgtgagagactgccccgacggcgccgacgagaacgactgccagtaccccacctgcgagcagctgacctgcgacaacggcgcctgctacaacaccagccagaagtgcgactggaaggtggactgcagagacagcagcgacgagatcaactgcaccgagatctgcctgcacaacgagttcagctgcggcaacggcgagtgcatccccagagcctacgtgtgcgaccacgacaacgactgccaggacggcagcgacgagcacgcctgcaactaccccacctgcggcggctaccagttcacctgccccagcggcagatgcatctaccagaactgggtgtgcgacggcgaggacgactgcaaggacaacggcgacgaggacggctgcgagagcggcccccacgacgtgcacaagtgcagccccagagagtggagctgccccgagagcggcagatgcatcagcatctacaaggtgtgcgacggcatcctggactgccccggcagagaggacgagaacaacaccagcaccggcaagtactgcagcatgaccctgtgcagcgccctgaactgccagtaccagtgccacgagaccccctacggcggcgcctgcttctgcccccccggctacatcatcaaccacaacgacagcagaacctgcgtggagttcgacgactgccagatctggggcatctgcgaccagaagtgcgagagcagacccggcagacacctgtgccactgcgaggagggctacatcctggagagaggccagtactgcaaggccaacgacagcttcggcgaggccagcatcatcttcagcaacggcagagacctgctgatcggcgacatccacggcagaagcttcagaatcctggtggagagccagaacagaggcgtggccgtgggcgtggccttccactaccacctgcagagagtgttctggaccgacaccgtgcagaacaaggtgttcagcgtggacatcaacggcctgaacatccaggaggtgctgaacgtgagcgtggagacccccgagaacctggccgtggactgggtgaacaacaagatctacctggtggagaccaaggtgaacagaatcgacatggtgaacctggacggcagctacagagtgaccctgatcaccgagaacctgggccaccccagaggcatcgccgtggaccccaccgtgggcaagaccgtggtgcacggcggcagcctgatcccccaccccttcggcgtgagcctgttcgagggccaggtgttcttcaccgactggaccaagatggccgtgctgaaggccaacaagttcaccgagaccaacccccaggtgtactaccaggccagcctgagaccctacggcgtgaccgtgtaccacagcctgagacagccctacgccaccaacccctgcaaggacaacaacggcggctgcgagcaggtgtgcgtgctgagccacagaaccgacaacgacggcctgggcttcagatgcaagtgcaccttcggcttccagctggacaccgacgagagacactgcatcggcagagagatcctggccgccaacagagtggagaacgtggagagcctggccttcgactggatcagcaagaacctgtactggaccgacagccactacaagagcatcagcgtgatgagactggccgacaagaccagaagaaccgtggtgcagtacctgaacaaccccagaagcgtggtggtgcaccccttcgccggctacctgttcttcaccgactggttcagacccgccaagatcatgagagcctggagcgacggcagccacctgctgcccgtgatcaacaccaccctgggctggcccaacggcctggccatcgactgggccgccagcagactgtactgggtggacgcctacttcgacaagatcgagcacagcaccttcgacggcctggacagaagaagactgggccacatcgagcagatgacccaccccttcggcctggccatcttcggcgagcacctgttcttcaccgactggagactgggcgccatcatcagagtgagaaaggccgacggcggcgagatgaccgtgatcagaagcggcatcgcctacatcctgcacctgaagagctacgacgtgaacatccagaccggcagcaacgcctgcaaccagcccacccaccccaacggcgactgcagccacttctgcttccccgtgcccaacttccagagagtgtgcggctgcccctacggcatgagactggccagcaaccacctgacctgcgagggcgaccccaccaacgagccccccaccgagcagtgcggcctgttcagcttcccctgcaagaacggcagatgcgtgcccaactactacctgtgcgacggcgtggacgactgccacgacaacagcgacgagcagctgtgcggcaccctgaacaacacctgcagcagcagcgccttcacctgcggccacggcgagtgcatccccgcccactggagatgcgacaagagaaacgactgcgtggacggcagcgacgagcacaactgccccacccacgcccccgccagctgcctggacacccagtacacctgcgacaaccaccagtgcatcagcaagaactgggtgtgcgacaccgacaacgactgcggcgacggcagcgacgagaagaactgcaacagcaccgagacctgccagcccagccagttcaactgccccaaccacagatgcatcgacctgagcttcgtgtgcgacggcgacaaggactgcgtggacggcagcgacgaggtgggctgcgtgctgaactgcaccgccagccagttcaagtgcgccagcggcgacaagtgcatcggcgtgaccaacagatgcgacggcgtgttcgactgcagcgacaacagcgacgaggccggctgccccaccagaccccccggcatgtgccacagcgacgagttccagtgccaggaggacggcatctgcatccccaacttctgggagtgcgacggccaccccgactgcctgtacggcagcgacgagcacaacgcctgcgtgcccaagacctgccccagcagctacttccactgcgacaacggcaactgcatccacagagcctggctgtgcgacagagacaacgactgcggcgacatgagcgacgagaaggactgccccacccagcccttcagatgccccagctggcagtggcagtgcctgggccacaacatctgcgtgaacctgagcgtggtgtgcgacggcatcttcgactgccccaacggcaccgacgagagccccctgtgcagcaagttccccgaccacagcctgctggccatcaacagcttctag

SEQ ID NO: 147135 - DNA, 1941 bp, Artificial Sequence
  derived and/or modified sequence
atgctggcccagcactgcgtggacgccaacaacaccttctgcttcgacaaccccagaggcctggccctgcacccccagtacggctacctgtactgggccgactggggccacagagcctacatcggcagagtgggcatggacggcaccaacaagagcgtgatcatcagcaccaagctggagtggcccaacggcatcaccatcgactacaccaacgacctgctgtactgggccgacgcccacctgggctacatcgagtacagcgacctggagggccaccacagacacaccgtgtacgacggcgccctgccccaccccttcgccatcaccatcttcgaggacaccatctactggaccgactggaacaccagaaccgtggagaagggcaacaagtacgacggcagcaacagacagaccctggtgaacaccacccacagacccttcgacatccacgtgtaccacccctacagacagcccatcgtgagcaacccctgcggcaccaacaacggcggctgcagccacctgtgcctgatcaagcccggcggcaagggcttcacctgcgagtgccccgacgacttcagaaccctgcagctgagcggcagcacctactgcatgcccatgtgcagcagcacccagttcctgtgcgccaacaacgagaagtgcatccccatctggtggaagtgcgacggccagaaggactgcagcgacggcagcgacgagctggccctgtgcccccagagattctgcagactgggccagttccagtgcagcgacggcaactgcaccagcccccagaccctgtgcaacgcccaccagaactgccccgacggcagcgacgaggacagactgctgtgcgagaaccaccactgcgacagcaacgagtggcagtgcgccaacaagagatgcatccccgagagctggcagtgcgacaccttcaacgactgcgaggacaacagcgacgaggacagcagccactgcgccagcagaacctgcagacccggccagttcagatgcgccaacggcagatgcatcccccaggcctggaagtgcgacgtggacaacgactgcggcgaccacagcgacgagcccatcgaggagtgcatgagcagcgcccacctgtgcgacaacttcaccgagttcagctgcaagaccaactacagatgcatccccaagtgggccgtgtgcaacggcgtggacgactgcagagacaacagcgacgagcagggctgcgaggagagaacctgccaccccgtgggcgacttcagatgcaagaaccaccactgcatccccctgagatggcagtgcgacggccagaacgactgcggcgacaacagcgacgaggagaactgcgcccccagagagtgcaccgagagcgagttcagatgcgtgaaccagcagtgcatccccagcagatggatctgcgaccactacaacgactgcggcgacaacagcgacgagagagactgcggcatgagactgatgaagctgatcgtgccccacgccttcctgatggtgcacaccgccagactgctgtgcagcaacgccaagaccatgttcgtgagcagacacatcggcaacgtgatggccatgatgaccgtggccatggtgcagatgaagaacttcacctgcgcctggatgttccccgtgatccaccagaccgtgagcggcgtgaccaccatcgccgccttcatcgtgatgagatgcgccatggtgtggatgaccgtggagatggagctgatgagacagagaagcaccgtggagaacagacccctgaacctggtgcagaacatgaacatcagcgtggccatgggcatcgccttccacatgaccatgtgcgtgatgatgcccatgaccgtggtgaccggccccatgaactgggtggccatcaaggagaagaaggagcacgtgctgaagatctacgccagcaagatcgtgcccaactag

SEQ ID NO: 147136 - protein, 904 aa, Artificial Sequence
  derived and/or modified sequence
MAESSESFTMASSPAQRRRGNDPLTSSPGRSSRRTDALTSSPGRDLPPFEDESEGLLGTEGPLEEEEDGEELIGDGMERDYRAIPELDAYEAEGLALDDEDVEELTASQREAAERAMRQRDREAGRGLGRMRRGLLYDSDEEDEERPARKRRQVERATEDGEEDEEMIESIENLEDLKGHSVREWVSMAGPRLEIHHRFKNFLRTHVDSHGHNVFKERISDMCKENRESLVVNYEDLAAREHVLAYFLPEAPAELLQIFDEAALEVVLAMYPKYDRITNHIHVRISHLPLVEELRSLRQLHLNQLIRTSGVVTSCTGVLPQLSMVKYNCNKCNFVLGPFCQSQNQEVKPGSCPECQSAGPFEVNMEETIYQNYQRIRIQESPGKVAAGRLPRSKDAILLADLVDSCKPGDEIELTGIYHNNYDGSLNTANGFPVFATVILANHVAKKDNKVAVGELTDEDVKMITSLSKDQQIGEKIFASIAPSIYGHEDIKRGLALALFGGEPKNPGGKHKVRGDINVLLCGDPGTAKSQFLKYIEKVSSRAIFTTGQGASAVGLTAYVQRHPVSREWTLEAGALVLADRGVCLIDEFDKMNDQDRTSIHEAMEQQSISISKAGIVTSLQARCTVIAAANPIGGRYDPSLTFSENVDLTEPIISRFDILCVVRDTVDPVQDEMLARFVVGSHVRHHPSNKEEEGLANGSAAEPAMPNTYGVEPLPQEVLKKYIIYAKERVHPKLNQMDQDKVAKMYSDLRKESMATGSIPITVRHIESMIRMAEAHARIHLRDYVIEDDVNMAIRVMLESFIDTQKFSVMRSMRKTFARYLSFRRDNNELLLFILKQLVAEQVTYQRNRFGAQQDTIEVPEKDLVDKARQINIHNLSAFYDSELFRMNKFSHDLKRKMILQQF

SEQ ID NO: 147137 - protein, 808 aa, Artificial Sequence
  derived and/or modified sequence
MAESSESFTMASSPAQRRRGNDPLTSSPGWGLGRMRRGLLYDSDEEDEERPARKRRQVERATEDGEEDEEMIESIENLEDLKGHSVREWVSMAGPRLEIHHRFKNFLRTHVDSHGHNVFKERISDMCKENRESLVVNYEDLAAREHVLAYFLPEAPAELLQIFDEAALEVVLAMYPKYDRITNHIHVRISHLPLVEELRSLRQLHLNQLIRTSGVVTSCTGVLPQLSMVKYNCNKCNFVLGPFCQSQNQEVKPGSCPECQSAGPFEVNMEETIYQNYQRIRIQESPGKVAAGRLPRSKDAILLADLVDSCKPGDEIELTGIYHNNYDGSLNTANGFPVFATVILANHVAKKDNKVAVGELTDEDVKMITSLSKDQQIGEKIFASIAPSIYGHEDIKRGLALALFGGEPKNPGGKHKVRGDINVLLCGDPGTAKSQFLKYIEKVSSRAIFTTGQGASAVGLTAYVQRHPVSREWTLEAGALVLADRGVCLIDEFDKMNDQDRTSIHEAMEQQSISISKAGIVTSLQARCTVIAAANPIGGRYDPSLTFSENVDLTEPIISRFDILCVVRDTVDPVQDEMLARFVVGSHVRHHPSNKEEEGLANGSAAEPAMPNTYGVEPLPQEVLKKYIIYAKERVHPKLNQMDQDKVAKMYSDLRKESMATGSIPITVRHIESMIRMAEAHARIHLRDYVIEDDVNMAIRVMLESFIDTQKFSVMRSMRKTFARYLSFRRDNNELLLFILKQLVAEQVTYQRNRFGAQQDTIEVPEKDLVDKARQINIHNLSAFYDSELFRMNKFSHDLKRKMILQQF

SEQ ID NO: 147138 - protein, 954 aa, Artificial Sequence
  derived and/or modified sequence
MAESSESFTMASSPAQRRRGNDPLTSSPGRSSRRTDALTSSPGRDLPPFEDESEGLLGTEGPLEEEEDGEELIGDGMERDYRAIPELDAYEAEGLALDDEDVEELTASQREAGRGLLYDSDEEDEERPARKRRQVERATEDGEEDEEMIESIENLEDLKGHSVREWVSMAGPRLEIHHRFKNFLRTHVDSHGHNVFKERISDMCKENRESLVVNYEDLAAREHVLAYFLPEAPAELLQIFDEAALEVVLAMYPKYDRITNHIHVRISHLPLVEELRSLRQLHLNQLIRTSGVVTSCTGVLPQLSMVKYNCNKCNFVLGPFCQSQNQEVKPGSCPECQSAGPFEVNMEETIYQNYQRIRIQESPGKVAAGRLPRSKDAILLADLVDSCKPGDEIELTGIYHNNYDGSLNTANGFPVFATVILANHVAKKDNKVAVGELTDEDVKMITSLSKDQQIGEKESSRNASLAEAGIGAIPSQLLAIEPSLRRSGVPIGEVGVSQRQEARSFSSANTHWFLEDLLGPSCRDTMIFASIAPSIYGHEDIKRGLALALFGGEPKNPGGKHKVRGDINVLLCGDPGTAKSQFLKYIEKVSSRAIFTTGQGASAVGLTAYVQRHPVSREWTLEAGALVLADRGVCLIDEFDKMNDQDRTSIHEAMEQQSISISKAGIVTSLQARCTVIAAANPIGGRYDPSLTFSENVDLTEPIISRFDILCVVRDTVDPVQDEMLARFVVGSHVRHHPSNKEEEGLANGSAAEPAMPNTYGVEPLPQEVLKKYIIYAKERVHPKLNQMDQDKVAKMYSDLRKESMATGSIPITVRHIESMIRMAEAHARIHLRDYVIEDDVNMAIRVMLESFIDTQKFSVMRSMRKTFARYLSFRRDNNELLLFILKQLVAEQVTYQRNRFGAQQDTIEVPEKDLVDKARQINIHNLSAFYDSELFRMNKFSHDLKRKMILQQF

SEQ ID NO: 147139 - DNA, 2715 bp, Artificial Sequence
  derived and/or modified sequence
atggccgagagcagcgagagcttcaccatggccagcagccccgcccagagaagaagaggcaacgaccccctgaccagcagccccggcagaagcagcagaagaaccgacgccctgaccagcagccccggcagagacctgccccccttcgaggacgagagcgagggcctgctgggcaccgagggccccctggaggaggaggaggacggcgaggagctgatcggcgacggcatggagagagactacagagccatccccgagctggacgcctacgaggccgagggcctggccctggacgacgaggacgtggaggagctgaccgccagccagagagaggccgccgagagagccatgagacagagagacagagaggccggcagaggcctgggcagaatgagaagaggcctgctgtacgacagcgacgaggaggacgaggagagacccgccagaaagagaagacaggtggagagagccaccgaggacggcgaggaggacgaggagatgatcgagagcatcgagaacctggaggacctgaagggccacagcgtgagagagtgggtgagcatggccggccccagactggagatccaccacagattcaagaacttcctgagaacccacgtggacagccacggccacaacgtgttcaaggagagaatcagcgacatgtgcaaggagaacagagagagcctggtggtgaactacgaggacctggccgccagagagcacgtgctggcctacttcctgcccgaggcccccgccgagctgctgcagatcttcgacgaggccgccctggaggtggtgctggccatgtaccccaagtacgacagaatcaccaaccacatccacgtgagaatcagccacctgcccctggtggaggagctgagaagcctgagacagctgcacctgaaccagctgatcagaaccagcggcgtggtgaccagctgcaccggcgtgctgccccagctgagcatggtgaagtacaactgcaacaagtgcaacttcgtgctgggccccttctgccagagccagaaccaggaggtgaagcccggcagctgccccgagtgccagagcgccggccccttcgaggtgaacatggaggagaccatctaccagaactaccagagaatcagaatccaggagagccccggcaaggtggccgccggcagactgcccagaagcaaggacgccatcctgctggccgacctggtggacagctgcaagcccggcgacgagatcgagctgaccggcatctaccacaacaactacgacggcagcctgaacaccgccaacggcttccccgtgttcgccaccgtgatcctggccaaccacgtggccaagaaggacaacaaggtggccgtgggcgagctgaccgacgaggacgtgaagatgatcaccagcctgagcaaggaccagcagatcggcgagaagatcttcgccagcatcgcccccagcatctacggccacgaggacatcaagagaggcctggccctggccctgttcggcggcgagcccaagaaccccggcggcaagcacaaggtgagaggcgacatcaacgtgctgctgtgcggcgaccccggcaccgccaagagccagttcctgaagtacatcgagaaggtgagcagcagagccatcttcaccaccggccagggcgccagcgccgtgggcctgaccgcctacgtgcagagacaccccgtgagcagagagtggaccctggaggccggcgccctggtgctggccgacagaggcgtgtgcctgatcgacgagttcgacaagatgaacgaccaggacagaaccagcatccacgaggccatggagcagcagagcatcagcatcagcaaggccggcatcgtgaccagcctgcaggccagatgcaccgtgatcgccgccgccaaccccatcggcggcagatacgaccccagcctgaccttcagcgagaacgtggacctgaccgagcccatcatcagcagattcgacatcctgtgcgtggtgagagacaccgtggaccccgtgcaggacgagatgctggccagattcgtggtgggcagccacgtgagacaccaccccagcaacaaggaggaggagggcctggccaacggcagcgccgccgagcccgccatgcccaacacctacggcgtggagcccctgccccaggaggtgctgaagaagtacatcatctacgccaaggagagagtgcaccccaagctgaaccagatggaccaggacaaggtggccaagatgtacagcgacctgagaaaggagagcatggccaccggcagcatccccatcaccgtgagacacatcgagagcatgatcagaatggccgaggcccacgccagaatccacctgagagactacgtgatcgaggacgacgtgaacatggccatcagagtgatgctggagagcttcatcgacacccagaagttcagcgtgatgagaagcatgagaaagaccttcgccagatacctgagcttcagaagagacaacaacgagctgctgctgttcatcctgaagcagctggtggccgagcaggtgacctaccagagaaacagattcggcgcccagcaggacaccatcgaggtgcccgagaaggacctggtggacaaggccagacagatcaacatccacaacctgagcgccttctacgacagcgagctgttcagaatgaacaagttcagccacgacctgaagagaaagatgatcctgcagcagttctag

SEQ ID NO: 147140 - DNA, 2427 bp, Artificial Sequence
  derived and/or modified sequence
atggccgagagcagcgagagcttcaccatggccagcagccccgcccagagaagaagaggcaacgaccccctgaccagcagccccggctggggcctgggcagaatgagaagaggcctgctgtacgacagcgacgaggaggacgaggagagacccgccagaaagagaagacaggtggagagagccaccgaggacggcgaggaggacgaggagatgatcgagagcatcgagaacctggaggacctgaagggccacagcgtgagagagtgggtgagcatggccggccccagactggagatccaccacagattcaagaacttcctgagaacccacgtggacagccacggccacaacgtgttcaaggagagaatcagcgacatgtgcaaggagaacagagagagcctggtggtgaactacgaggacctggccgccagagagcacgtgctggcctacttcctgcccgaggcccccgccgagctgctgcagatcttcgacgaggccgccctggaggtggtgctggccatgtaccccaagtacgacagaatcaccaaccacatccacgtgagaatcagccacctgcccctggtggaggagctgagaagcctgagacagctgcacctgaaccagctgatcagaaccagcggcgtggtgaccagctgcaccggcgtgctgccccagctgagcatggtgaagtacaactgcaacaagtgcaacttcgtgctgggccccttctgccagagccagaaccaggaggtgaagcccggcagctgccccgagtgccagagcgccggccccttcgaggtgaacatggaggagaccatctaccagaactaccagagaatcagaatccaggagagccccggcaaggtggccgccggcagactgcccagaagcaaggacgccatcctgctggccgacctggtggacagctgcaagcccggcgacgagatcgagctgaccggcatctaccacaacaactacgacggcagcctgaacaccgccaacggcttccccgtgttcgccaccgtgatcctggccaaccacgtggccaagaaggacaacaaggtggccgtgggcgagctgaccgacgaggacgtgaagatgatcaccagcctgagcaaggaccagcagatcggcgagaagatcttcgccagcatcgcccccagcatctacggccacgaggacatcaagagaggcctggccctggccctgttcggcggcgagcccaagaaccccggcggcaagcacaaggtgagaggcgacatcaacgtgctgctgtgcggcgaccccggcaccgccaagagccagttcctgaagtacatcgagaaggtgagcagcagagccatcttcaccaccggccagggcgccagcgccgtgggcctgaccgcctacgtgcagagacaccccgtgagcagagagtggaccctggaggccggcgccctggtgctggccgacagaggcgtgtgcctgatcgacgagttcgacaagatgaacgaccaggacagaaccagcatccacgaggccatggagcagcagagcatcagcatcagcaaggccggcatcgtgaccagcctgcaggccagatgcaccgtgatcgccgccgccaaccccatcggcggcagatacgaccccagcctgaccttcagcgagaacgtggacctgaccgagcccatcatcagcagattcgacatcctgtgcgtggtgagagacaccgtggaccccgtgcaggacgagatgctggccagattcgtggtgggcagccacgtgagacaccaccccagcaacaaggaggaggagggcctggccaacggcagcgccgccgagcccgccatgcccaacacctacggcgtggagcccctgccccaggaggtgctgaagaagtacatcatctacgccaaggagagagtgcaccccaagctgaaccagatggaccaggacaaggtggccaagatgtacagcgacctgagaaaggagagcatggccaccggcagcatccccatcaccgtgagacacatcgagagcatgatcagaatggccgaggcccacgccagaatccacctgagagactacgtgatcgaggacgacgtgaacatggccatcagagtgatgctggagagcttcatcgacacccagaagttcagcgtgatgagaagcatgagaaagaccttcgccagatacctgagcttcagaagagacaacaacgagctgctgctgttcatcctgaagcagctggtggccgagcaggtgacctaccagagaaacagattcggcgcccagcaggacaccatcgaggtgcccgagaaggacctggtggacaaggccagacagatcaacatccacaacctgagcgccttctacgacagcgagctgttcagaatgaacaagttcagccacgacctgaagagaaagatgatcctgcagcagttctag

SEQ ID NO: 147141 - DNA, 2865 bp, Artificial Sequence
  derived and/or modified sequence
atggccgagagcagcgagagcttcaccatggccagcagccccgcccagagaagaagaggcaacgaccccctgaccagcagccccggcagaagcagcagaagaaccgacgccctgaccagcagccccggcagagacctgccccccttcgaggacgagagcgagggcctgctgggcaccgagggccccctggaggaggaggaggacggcgaggagctgatcggcgacggcatggagagagactacagagccatccccgagctggacgcctacgaggccgagggcctggccctggacgacgaggacgtggaggagctgaccgccagccagagagaggccggcagaggcctgctgtacgacagcgacgaggaggacgaggagagacccgccagaaagagaagacaggtggagagagccaccgaggacggcgaggaggacgaggagatgatcgagagcatcgagaacctggaggacctgaagggccacagcgtgagagagtgggtgagcatggccggccccagactggagatccaccacagattcaagaacttcctgagaacccacgtggacagccacggccacaacgtgttcaaggagagaatcagcgacatgtgcaaggagaacagagagagcctggtggtgaactacgaggacctggccgccagagagcacgtgctggcctacttcctgcccgaggcccccgccgagctgctgcagatcttcgacgaggccgccctggaggtggtgctggccatgtaccccaagtacgacagaatcaccaaccacatccacgtgagaatcagccacctgcccctggtggaggagctgagaagcctgagacagctgcacctgaaccagctgatcagaaccagcggcgtggtgaccagctgcaccggcgtgctgccccagctgagcatggtgaagtacaactgcaacaagtgcaacttcgtgctgggccccttctgccagagccagaaccaggaggtgaagcccggcagctgccccgagtgccagagcgccggccccttcgaggtgaacatggaggagaccatctaccagaactaccagagaatcagaatccaggagagccccggcaaggtggccgccggcagactgcccagaagcaaggacgccatcctgctggccgacctggtggacagctgcaagcccggcgacgagatcgagctgaccggcatctaccacaacaactacgacggcagcctgaacaccgccaacggcttccccgtgttcgccaccgtgatcctggccaaccacgtggccaagaaggacaacaaggtggccgtgggcgagctgaccgacgaggacgtgaagatgatcaccagcctgagcaaggaccagcagatcggcgagaaggagagcagcagaaacgccagcctggccgaggccggcatcggcgccatccccagccagctgctggccatcgagcccagcctgagaagaagcggcgtgcccatcggcgaggtgggcgtgagccagagacaggaggccagaagcttcagcagcgccaacacccactggttcctggaggacctgctgggccccagctgcagagacaccatgatcttcgccagcatcgcccccagcatctacggccacgaggacatcaagagaggcctggccctggccctgttcggcggcgagcccaagaaccccggcggcaagcacaaggtgagaggcgacatcaacgtgctgctgtgcggcgaccccggcaccgccaagagccagttcctgaagtacatcgagaaggtgagcagcagagccatcttcaccaccggccagggcgccagcgccgtgggcctgaccgcctacgtgcagagacaccccgtgagcagagagtggaccctggaggccggcgccctggtgctggccgacagaggcgtgtgcctgatcgacgagttcgacaagatgaacgaccaggacagaaccagcatccacgaggccatggagcagcagagcatcagcatcagcaaggccggcatcgtgaccagcctgcaggccagatgcaccgtgatcgccgccgccaaccccatcggcggcagatacgaccccagcctgaccttcagcgagaacgtggacctgaccgagcccatcatcagcagattcgacatcctgtgcgtggtgagagacaccgtggaccccgtgcaggacgagatgctggccagattcgtggtgggcagccacgtgagacaccaccccagcaacaaggaggaggagggcctggccaacggcagcgccgccgagcccgccatgcccaacacctacggcgtggagcccctgccccaggaggtgctgaagaagtacatcatctacgccaaggagagagtgcaccccaagctgaaccagatggaccaggacaaggtggccaagatgtacagcgacctgagaaaggagagcatggccaccggcagcatccccatcaccgtgagacacatcgagagcatgatcagaatggccgaggcccacgccagaatccacctgagagactacgtgatcgaggacgacgtgaacatggccatcagagtgatgctggagagcttcatcgacacccagaagttcagcgtgatgagaagcatgagaaagaccttcgccagatacctgagcttcagaagagacaacaacgagctgctgctgttcatcctgaagcagctggtggccgagcaggtgacctaccagagaaacagattcggcgcccagcaggacaccatcgaggtgcccgagaaggacctggtggacaaggccagacagatcaacatccacaacctgagcgccttctacgacagcgagctgttcagaatgaacaagttcagccacgacctgaagagaaagatgatcctgcagcagttctag

SEQ ID NO: 147142 - DNA, 2715 bp, Artificial Sequence
  derived and/or modified sequence
atggccgaatcttccgagagtttcaccatggcaagctccccggcacagcgtcgccggggcaacgacccgttgacgagttcgccaggtcggtctagccgaagaactgacgctctcacctctagtccaggcagagatttaccaccctttgaagatgagtctgaaggcttactcgggactgaggggccgctcgaagaagaggaggatggcgaggaacttatcggggacggcatggaaagggactaccgagctatacccgagctcgacgcttacgaggccgagggcttggcactggacgatgaggatgtggaggagctcactgcatctcagagagaggctgccgagagggccatgcggcagcgtgaccgggaggctggaagaggattgggtcgcatgcggcgcggcctgctctacgattcggatgaggaagacgaggagcgtccggcacgaaaacggcggcaggtggagcgggccacagaggacggagaggaggatgaggaaatgatcgagagtatagagaacctcgaggacctaaagggccattccgttagagaatgggtttccatggcggggcctcgtctggaaattcaccatcgatttaaaaatttcttacggactcacgttgacagccatggacataacgtgttcaaagagagaattagtgatatgtgtaaagaaaatagggaatccttggtggtcaattatgaagatctcgcagccagggaacacgtactcgcatattttctacccgaggctcccgccgagttactgcagatctttgacgaagctgccctcgaagtggtcctggccatgtaccctaagtacgataggattaccaaccacatacatgttagaatatctcacctacctctcgtcgaagagctgaggtctctccgccagctacacctcaaccaattgatccgcacttcaggggttgtgacttcctgcactggtgtcctgccacaactttcaatggtgaaatataactgcaataaatgtaacttcgtgcttggccctttctgccagtcccaaaatcaggaagtgaagcctggttcctgtcccgagtgccaaagcgctggacccttcgaggtcaacatggaagaaaccatctaccagaactatcaacgaatacgtattcaggaaagccctggtaaggtcgctgccgggcgtctgccgcgtagcaaggatgctattctgctggccgacctcgtggattcatgcaagccaggagatgagatcgaactaactgggatctaccataacaattatgatggcagcctaaatacagccaacggctttcctgtctttgcaactgttattttagctaatcacgtagctaaaaaggacaacaaggtcgctgttggggagttaaccgacgaggatgttaagatgatcacatcactgtccaaggaccaacagatcggagagaagatctttgcatcaattgcacccagcatctacggccacgaggacattaaacgcggactggccctcgcactgtttggaggcgagcctaagaatccaggtggtaaacacaaggtcagaggcgatatcaatgtcttgctctgtggagatcctggcacagctaaaagccaatttctaaaatacatcgaaaaagtttcatccagggcaatttttacaaccggacagggcgcatcggcagtcgggctcactgcttatgtgcagagacacccagttagtagagaatggacattggaagcgggcgctctggtgctggcggatcgaggcgtgtgcttgatagatgagttcgataagatgaatgaccaagacagaacaagcatccacgaggccatggaacaacagagtatttctatctcgaaagccggaatagtaacctcgctgcaagctcgatgtactgtaattgcagcggctaaccctatcgggggccgatatgatccatctttgacgtttagcgaaaatgtggatctgacagagcctattatttctcggtttgacatcctttgcgtagtgcgtgatactgtcgatccagtacaggacgaaatgctggcccgatttgtggtggggtctcatgtgcgccaccatccatcaaataaggaggaagaaggtttggcaaacggatcggctgcagagccagccatgccgaacacttacggggtggagccgctcccacaagaggtgctaaagaagtacataatttatgccaaggaaagggttcatcccaagttaaaccagatggatcaagataaggtcgccaagatgtacagtgacttaagaaaggagtccatggcaaccggctcgatccccattaccgttcgtcacattgagagcatgattcgcatggccgaggctcatgctcggatccatctgagagattacgtaatagaggatgacgtcaatatggccatacgggtaatgcttgagagttttatagatacgcagaaattctctgtaatgcgttctatgaggaagaccttcgcgaggtacctctcatttagacgtgataataacgaactgctactttttatcctcaagcagttggtcgcagagcaggtgacatatcaaaggaataggttcggagctcaacaggatactatagaggttccagagaaggatctcgttgataaggcccggcaaatcaacattcataatttgtctgcattttacgactcggagctattcagaatgaacaaattcagccacgacctgaagcgtaaaatgattcttcagcagttctag

SEQ ID NO: 147143 - DNA, 2427 bp, Artificial Sequence
  derived and/or modified sequence
atggccgaatcgagcgagagctttactatggcaagctcgcctgcgcagcgccggagaggcaacgacccactgacctccagcccaggctggggcctgggcagaatgcggaggggtttactctatgattctgacgaggaggatgaggagcggccagccagaaaaagacggcaagtggaacgcgcaacagaggacggggaggaggacgaagagatgatcgagtcaatcgagaacctggaagacttaaagggccattcagtccgagagtgggtcagtatggccggcccgcgcctcgagattcaccaccgctttaaaaattttcttcgcacacatgttgactctcatggacacaacgtgtttaaagagaggatttccgacatgtgcaaagaaaaccgcgagagcttggtcgtgaactacgaagatctggctgctagggagcatgtgctggcttatttcctccctgaggcccctgctgagctactccagatttttgacgaagctgcgttggaggtcgtcctggctatgtaccccaaatatgatcggatcaccaatcatatccatgttaggatctctcatttaccactcgtcgaggagctccggtccctcagacagttgcaccttaaccagctcatacggaccagcggggtggtgacctcctgtaccggagtgttgccacagctgtcgatggtgaaatacaactgcaataagtgtaactttgtcttggggcccttctgccagagtcagaaccaagaagtcaagcctgggagttgcccagaatgccagagcgccggaccatttgaagttaacatggaagaaacgatctatcagaactaccaaagaattagaatccaggaatcccccgggaaagtggcggcaggccggttgccccgctcaaaggatgccatactgctggccgacttggtggacagctgcaaaccgggtgacgagatcgaattgaccggaatttaccacaataattacgatggtagcctcaacactgcaaatggctttcccgtgttcgccacagtcatcctggctaatcacgtcgcgaagaaagataataaagtggccgtgggcgagttaactgatgaggacgtaaagatgatcaccagcttgtctaaggaccaacagatcggcgagaaaatcttcgcctccatcgccccttcaatctatggccacgaagatatcaagcgtggcctggcactcgctttgttcggaggggagccgaaaaaccctggaggaaagcacaaagtcagaggagatattaacgtgctactctgcggagaccctggcaccgccaaaagccagttcctgaaatatattgaaaaagtgtcttcccgggcgattttcacaacaggccagggcgccagcgctgtcggactgaccgcctatgtgcagcgccatccagtgtctagggagtggacactcgaggccggggcacttgtactcgccgaccggggggtgtgcttgatcgacgagtttgataagatgaatgaccaggacaggacctccatccacgaagctatggagcagcagagtatcagcatctccaaagccgggatcgtcacctctctgcaagccagatgcacagtcattgccgccgcaaaccccatcggcggcaggtatgatccaagcttgaccttcagtgagaacgttgatttgactgagcctattatttctcgctttgacattttgtgtgttgtgcgagatactgtggaccctgtgcaagacgaaatgctggcccggttcgtcgtgggcagtcacgttaggcatcaccccagtaacaaagaagaagagggcctcgcgaatggcagcgctgccgagccagctatgcccaacacatatggtgtagagccattaccccaagaagtgctgaagaaatacattatctacgcaaaagaaagggtgcaccctaaattgaaccagatggaccaggacaaggtggccaagatgtactcagaccttaggaaggaaagcatggccacggggtctatccctatcacagtgagacacatcgagtcaatgatccgcatggctgaggcccacgccaggattcatttgagagattacgtgatcgaggacgatgtgaacatggcgattagggtcatgctggagagtttcattgatacacagaagtttagtgtcatgcgctcgatgcggaaaacgtttgctcggtacttgtcctttcggcgggacaacaacgaattattgctctttattctaaagcagctggtcgccgagcaggtgacgtaccagcgcaatcgattcggtgcacaacaggatacaatcgaagtcccagagaaggacctagtcgacaaggcccggcagataaatatccataatctttcagccttctacgactccgaactattcaggatgaataagttctctcacgatctgaaacgaaagatgatcttgcaacagttctag

SEQ ID NO: 147144 - DNA, 2865 bp, Artificial Sequence
  derived and/or modified sequence
atggcagagagttccgaatcattcaccatggcatccagtcccgcacagcgacgtagagggaatgaccctttgacatcatctcccggaagatccagcagacggactgatgccttgacctccagccctggtcgggacttgcctcccttcgaagatgaaagcgaggggcttttggggaccgaaggaccgcttgaagaggaggaggatggcgaagagcttatcggcgacggtatggagcgcgactatagggccataccggaactcgacgcttacgaggctgaggggctcgccctggacgacgaggatgtggaggagctgacagctagccagcgggaagccggaagggggctgctgtacgattctgacgaagaggacgaggaaagacctgcccggaaaagaaggcaggttgaaagagcaaccgaagatggcgaagaggatgaagaaatgattgaatccattgagaacctggaagacctgaagggacatagcgtcagggagtgggtgagtatggctggtccgaggttagaaatccaccatcgatttaaaaacttcctcaggactcacgtagattcccacgggcataacgtgtttaaggagaggatttcagatatgtgcaaggaaaacagggagtccctcgtcgtcaactacgaagacctcgccgcaagggaacacgttctcgcgtacttcctacccgaagcgcccgctgagctgttgcagatctttgatgaagctgcattggaggtggtcctggccatgtacccaaagtatgatcgaatcactaaccacattcacgtccgcatatctcatcttccattagtggaagaactgaggtcactgaggcagctccacctgaatcagctgatacgcacctcaggagtagtaacctcttgcactggcgtattgccacagttgtcaatggtgaagtacaattgtaacaagtgcaacttcgtgctgggccccttttgccagtcccagaatcaagaggtcaaaccgggcagctgtcccgagtgtcagagcgccgggccctttgaagttaacatggaagagacaatctatcagaattaccagcggattagaatccaggaatcaccaggaaaagtggcggccggccggctaccacgcagcaaggacgctatcttactcgcggacctggtcgattcctgcaagcctggggacgaaatagagttaactgggatctaccacaataactacgatggcagcctcaacacagccaacggctttccagtttttgccaccgttatccttgccaaccatgtggcaaaaaaggacaataaggttgccgtcggtgagcttacggatgaggatgtgaaaatgatcacaagcctctctaaagatcagcagataggcgaaaaggaatcctctcgcaatgcaagtctcgccgaggctggtattggagctattcctagtcagctcttggctatcgagccatcgctccgacgatccggggtacccatcggcgaagtgggagtctcccagagacaggaggcacgttccttcagctcagcaaacactcattggtttttggaggacctgctgggccccagttgccgcgacaccatgattttcgccagtatcgcaccgtctatatacgggcatgaagacatcaagcgagggctcgcattggcccttttcggcggggagcctaagaatcccgggggaaagcacaaggttcgaggcgacatcaacgtgttgctttgtggggatccaggcaccgcaaagagccagttcctgaagtacattgagaaggtcagcagcagggccatatttaccactggtcagggcgctagcgcagtgggcctgacagcttacgtgcagcgacacccagtaagcagagagtggacgctcgaggccggggctctcgtactggccgacagaggagtatgtctcatagacgagtttgataaaatgaacgatcaggatcgaacgtcgatacatgaggccatggagcaacagtccatcagcataagcaaggccgggatcgtcacaagtctccaggctcggtgcacagtcatcgcggccgctaatcccatcggggggcggtacgatccaagtctgacattctctgagaatgttgacctcactgaacctataatttcccgtttcgacatcctttgtgtcgtgcgggatactgtcgatccagtccaggacgaaatgctcgccagatttgtggttggaagtcacgttagacaccatccttccaacaaggaggaggagggacttgctaacggaagtgcggccgagcctgccatgccgaacacttatggcgtggagcctcttccacaagaagttcttaagaagtacatcatctatgcaaaagagcgcgttcatcctaaactaaaccagatggatcaggataaggttgctaagatgtactccgacctcaggaaagaatccatggctaccggtagcataccaatcaccgtacggcacattgagtccatgataaggatggccgaggcgcatgctaggatacatctgagagactacgtgatcgaagacgatgtgaacatggcaattagggtgatgcttgagtccttcatcgacacgcagaaattctccgtaatgagaagtatgaggaaaacttttgcacggtacctgagtttcaggcgggataataacgagctgctcttgtttatcctgaagcagctggtggccgaacaggttacttaccaacgaaataggttcggagcccagcaagataccattgaagtgcctgagaaagacctggttgacaaggctcgtcaaatcaatattcataatctttctgcgttctacgacagcgaactgtttcgcatgaacaaattttctcacgacctgaaaagaaagatgatcctgcagcaattctag

SEQ ID NO: 147145 - DNA, 2715 bp, Artificial Sequence
  derived and/or modified sequence
atggccgagagcagcgagagcttcaccatggccagcagccctgcccagaggagaagaggaaatgaccccctgaccagcagccctggccgcagcagcagaagaacagatgccctgaccagcagccctggccgggacctgcccccatttgaagatgaaagtgagggcctgctgggcacagagggccccctggaggaggaggaggatggagaggagctgattggagatggcatggagcgggactaccgggccatccctgagctggatgcctatgaggccgagggcctggccctggatgatgaagatgtggaggagctgacagccagccagcgggaggccgctgagcgggccatgaggcagagggaccgggaggccggccggggcctgggccgcatgaggcggggcctgctgtatgacagtgatgaggaggatgaggagaggcctgccaggaagaggcggcaggtggagcgggccacagaagatggagaagaagatgaggagatgattgagagcattgagaacctggaggacctgaagggccacagcgtgcgggagtgggtgtccatggccggcccccggctggagatccaccaccgcttcaagaacttcctgcggacccacgtggacagccacggccacaacgtgttcaaggagcgcatcagtgacatgtgcaaggaaaatcgggagagcctggtggtgaactatgaggacctggccgcccgggagcacgtgctggcctacttcctgcctgaggccccagctgagctgctgcagatctttgatgaggccgccctggaggtggtgctggccatgtaccccaagtatgaccgcatcaccaaccacatccacgtgcgcatcagccacctgcccctggtggaggagctgcggagcctgcggcagctgcacctgaaccagctgatccgcaccagcggcgtggtgaccagctgcaccggggtgctgccccagctgtccatggtgaagtacaactgcaacaagtgcaactttgtgctgggccccttctgccagagccagaaccaggaggtgaagccaggcagctgcccagagtgccagagcgctggcccctttgaggtgaacatggaggagaccatctaccagaactaccagaggatccgcatccaggagagccctgggaaggtggccgccggccgcctgcccaggagcaaggatgccatcctgctggccgacctggtggacagctgcaagccaggagatgaaattgagctgaccggcatctaccacaacaactatgatggcagcctgaacacagccaacggcttccctgtgtttgccaccgtcatcctggccaaccacgtggccaagaaggacaacaaggtggccgtgggggagctgacagatgaagatgtgaagatgatcaccagcctgagcaaggaccagcagattggagagaagatctttgccagcatcgcccccagcatctacggccacgaggacatcaagaggggcctggccctggccctgtttggaggagagcccaagaaccctgggggcaagcacaaggtgcggggggacatcaacgtgctgctgtgtggggaccctggaacagccaagagccagttcctgaagtacatcgagaaggtgagcagccgggccatcttcaccaccggccagggcgccagcgctgtgggcctgacagcctacgtgcagaggcaccctgtgtcccgggagtggaccctggaggccggggccctggtgctggccgaccggggcgtgtgcctgattgatgaatttgacaagatgaatgaccaggacaggaccagcatccacgaggccatggagcagcagagcatcagcatcagcaaggccggcatcgtgaccagcctgcaggcccgctgcaccgtgattgctgctgccaaccccatcggcggccgctatgaccccagcctgaccttctctgaaaatgtggacctgacagagcccatcatcagcagatttgacatcctgtgtgtggtgcgggacacagtggaccctgtgcaggatgagatgctggccaggtttgtggtgggcagccacgtgcgccaccaccccagcaacaaggaggaggagggcctggccaacggcagcgctgctgagcccgccatgcccaacacctacggcgtggagcccctgccccaggaggtgctgaagaagtacatcatctatgccaaggagcgggtgcaccccaagctgaaccagatggaccaggacaaggtggccaagatgtacagcgacctgaggaaggagagcatggccaccggcagcatccccatcaccgtgcgccacattgaatccatgatccgcatggccgaggcccacgcccgcatccacctgcgggactatgtgattgaagatgatgtgaacatggccatccgggtgatgctggagagcttcatcgacacccagaagttctctgtgatgaggtccatgaggaagacctttgcccgctacctgtccttcagaagagacaacaatgagctgctgctcttcatcctgaagcagctggtggccgagcaggtgacctaccagaggaacagatttggagcccagcaggacaccatcgaggtgcctgagaaggacctggtggacaaggcccggcagatcaacatccacaacctgagcgccttctatgattctgagctgttcaggatgaacaagttcagccatgacctgaagaggaagatgatcctgcagcagttctag

SEQ ID NO: 147146 - DNA, 2427 bp, Artificial Sequence
  derived and/or modified sequence
atggccgagagcagcgagagcttcaccatggccagcagccctgcccagaggagaagaggaaatgaccccctgaccagcagccctggctggggcctgggccgcatgaggcggggcctgctgtatgacagtgatgaggaggatgaggagaggcctgccaggaagaggcggcaggtggagcgggccacagaagatggagaagaagatgaggagatgattgagagcattgagaacctggaggacctgaagggccacagcgtgcgggagtgggtgtccatggccggcccccggctggagatccaccaccgcttcaagaacttcctgcggacccacgtggacagccacggccacaacgtgttcaaggagcgcatcagtgacatgtgcaaggaaaatcgggagagcctggtggtgaactatgaggacctggccgcccgggagcacgtgctggcctacttcctgcctgaggccccagctgagctgctgcagatctttgatgaggccgccctggaggtggtgctggccatgtaccccaagtatgaccgcatcaccaaccacatccacgtgcgcatcagccacctgcccctggtggaggagctgcggagcctgcggcagctgcacctgaaccagctgatccgcaccagcggcgtggtgaccagctgcaccggggtgctgccccagctgtccatggtgaagtacaactgcaacaagtgcaactttgtgctgggccccttctgccagagccagaaccaggaggtgaagccaggcagctgcccagagtgccagagcgctggcccctttgaggtgaacatggaggagaccatctaccagaactaccagaggatccgcatccaggagagccctgggaaggtggccgccggccgcctgcccaggagcaaggatgccatcctgctggccgacctggtggacagctgcaagccaggagatgaaattgagctgaccggcatctaccacaacaactatgatggcagcctgaacacagccaacggcttccctgtgtttgccaccgtcatcctggccaaccacgtggccaagaaggacaacaaggtggccgtgggggagctgacagatgaagatgtgaagatgatcaccagcctgagcaaggaccagcagattggagagaagatctttgccagcatcgcccccagcatctacggccacgaggacatcaagaggggcctggccctggccctgtttggaggagagcccaagaaccctgggggcaagcacaaggtgcggggggacatcaacgtgctgctgtgtggggaccctggaacagccaagagccagttcctgaagtacatcgagaaggtgagcagccgggccatcttcaccaccggccagggcgccagcgctgtgggcctgacagcctacgtgcagaggcaccctgtgtcccgggagtggaccctggaggccggggccctggtgctggccgaccggggcgtgtgcctgattgatgaatttgacaagatgaatgaccaggacaggaccagcatccacgaggccatggagcagcagagcatcagcatcagcaaggccggcatcgtgaccagcctgcaggcccgctgcaccgtgattgctgctgccaaccccatcggcggccgctatgaccccagcctgaccttctctgaaaatgtggacctgacagagcccatcatcagcagatttgacatcctgtgtgtggtgcgggacacagtggaccctgtgcaggatgagatgctggccaggtttgtggtgggcagccacgtgcgccaccaccccagcaacaaggaggaggagggcctggccaacggcagcgctgctgagcccgccatgcccaacacctacggcgtggagcccctgccccaggaggtgctgaagaagtacatcatctatgccaaggagcgggtgcaccccaagctgaaccagatggaccaggacaaggtggccaagatgtacagcgacctgaggaaggagagcatggccaccggcagcatccccatcaccgtgcgccacattgaatccatgatccgcatggccgaggcccacgcccgcatccacctgcgggactatgtgattgaagatgatgtgaacatggccatccgggtgatgctggagagcttcatcgacacccagaagttctctgtgatgaggtccatgaggaagacctttgcccgctacctgtccttcagaagagacaacaatgagctgctgctcttcatcctgaagcagctggtggccgagcaggtgacctaccagaggaacagatttggagcccagcaggacaccatcgaggtgcctgagaaggacctggtggacaaggcccggcagatcaacatccacaacctgagcgccttctatgattctgagctgttcaggatgaacaagttcagccatgacctgaagaggaagatgatcctgcagcagttctag

SEQ ID NO: 147147 - DNA, 2865 bp, Artificial Sequence
  derived and/or modified sequence
atggccgagagcagcgagagcttcaccatggccagcagccctgcccagaggagaagaggaaatgaccccctgaccagcagccctggccgcagcagcagaagaacagatgccctgaccagcagccctggccgggacctgcccccatttgaagatgaaagtgagggcctgctgggcacagagggccccctggaggaggaggaggatggagaggagctgattggagatggcatggagcgggactaccgggccatccctgagctggatgcctatgaggccgagggcctggccctggatgatgaagatgtggaggagctgacagccagccagcgggaggccggccggggcctgctgtatgacagtgatgaagaagatgaggagaggcctgccaggaagaggcggcaggtggagcgggccacagaagatggagaggaggatgaggagatgattgagagcattgagaacctggaggacctgaagggccacagcgtgcgggagtgggtgtccatggccggcccccggctggagatccaccaccgcttcaagaacttcctgcggacccacgtggacagccacggccacaacgtgttcaaggagcgcatcagtgacatgtgcaaggagaaccgggagagcctggtggtgaactatgaggacctggccgcccgggagcacgtgctggcctacttcctgcctgaggccccagctgagctgctgcagatctttgatgaagctgccctggaggtggtgctggccatgtaccccaagtatgaccgcatcaccaaccacatccacgtgcgcatcagccacctgcccctggtggaggagctgcggagcctgcggcagctgcacctgaaccagctgatccgcaccagcggcgtggtgaccagctgcacaggagtgctgccccagctgtccatggtgaagtacaactgcaacaagtgcaactttgtgctgggccccttctgccagagccagaaccaggaggtgaagccaggcagctgcccagagtgccagagcgctggcccctttgaggtgaacatggaggagaccatctaccagaactaccagaggatccgcatccaggagagccctgggaaggtggccgccggccgcctgcccaggagcaaggatgccatcctgctggccgacctggtggacagctgcaagccaggagatgaaattgagctgaccggcatctaccacaacaactatgatggcagcctgaacacagccaacggcttccctgtgtttgccaccgtcatcctggccaaccacgtggccaagaaggacaacaaggtggccgtgggggagctgacagatgaagatgtgaagatgatcaccagcctgagcaaggaccagcagatcggggagaaggagagcagcagaaatgccagcctggccgaggccggcatcggggccatccccagccagctgctggccatcgagcccagcctgcggcgctctggagtgcccatcggggaggtgggcgtgtcccagaggcaggaggcccggagcttcagcagcgccaacacccactggttcctggaggacctgctgggccccagctgccgggacaccatgatctttgccagcatcgcccccagcatctacggccacgaggacatcaagaggggcctggccctggccctgtttggaggagagcccaagaaccctgggggcaagcacaaggtgcggggggacatcaacgtgctgctgtgtggggaccctggaacagccaagagccagttcctgaagtacatcgagaaggtgagcagccgggccatcttcaccaccggccagggcgccagcgctgtgggcctgacagcctacgtgcagaggcaccctgtgtcccgggagtggaccctggaggccggggccctggtgctggccgaccggggcgtgtgcctgattgatgaatttgacaagatgaatgaccaggacaggaccagcatccacgaggccatggagcagcagagcatcagcatcagcaaggccggcatcgtgaccagcctgcaggcccgctgcaccgtgattgctgctgccaaccccatcggcggccgctatgaccccagcctgaccttctctgaaaatgtggacctgacagagcccatcatcagcagatttgacatcctgtgtgtggtgcgggacacagtggaccctgtgcaggatgagatgctggccaggtttgtggtgggcagccacgtgcgccaccaccccagcaacaaggaggaggagggcctggccaacggcagcgctgctgagcccgccatgcccaacacctacggcgtggagcccctgccccaggaggtgctgaagaagtacatcatctatgccaaggagcgggtgcaccccaagctgaaccagatggaccaggacaaggtggccaagatgtacagcgacctgaggaaggagagcatggccaccggcagcatccccatcaccgtgcgccacattgaatccatgatccgcatggccgaggcccacgcccgcatccacctgcgggactatgtgattgaagatgatgtgaacatggccatccgggtgatgctggagagcttcatcgacacccagaagttctctgtgatgaggtccatgaggaagacctttgcccgctacctgtccttcagaagagacaacaatgagctgctgctcttcatcctgaagcagctggtggccgagcaggtgacctaccagaggaacagatttggagcccagcaggacaccatcgaggtgcctgagaaggacctggtggacaaggcccggcagatcaacatccacaacctgagcgccttctatgattctgagctgttcaggatgaacaagttcagccatgacctgaagaggaagatgatcctgcagcagttctag

SEQ ID NO: 147148 - DNA, 3619 bp, Artificial Sequence
  derived and/or modified sequence
ggcgagcgcacgcgcacagcgccgggccgcacacctccgggctctgggcggagcgcctcgggcgttgtaggcgggaccggaccctctggcccgcccctccgtgtcccttctggtcgccagtggacgccgacgtcatgacgtcgcgttccgtagggctcttcccgggctttggtgggtcacgtgaaccacttttcgcgcgaaacctggttgttgctgtagtggcggagaggatcgtggtactgctatggcggaatcatcggaatccttcaccatggcatccagcccggcccagcgtcggcgaggcaatgatcctctcacctccagccctggccgaagctcccggcgtactgatgccctcacctccagccctggccgtgaccttccaccatttgaggatgagtccgaggggctcctaggcacagaggggcccctggaggaagaagaggatggagaggagctcattggagatggcatggaaagggactaccgcgccatcccagagctggacgcctatgaggccgagggactggctctggatgatgaggacgtagaggagctgacggccagtcagagggaggcagcagagcgggccatgcggcagcgtgaccgggaggctggccggggcctgggccgcatgcgccgtgggctcctgtatgacagcgatgaggaggacgaggagcgccctgcccgcaagcgccgccaggtggagcgggccacggaggacggcgaggaggacgaggagatgatcgagagcatcgagaacctggaggatctcaaaggccactctgtgcgcgagtgggtgagcatggcgggcccccggctggagatccaccaccgcttcaagaacttcctgcgcactcacgtcgacagccacggccacaacgtcttcaaggagcgcatcagcgacatgtgcaaagagaaccgtgagagcctggtggtgaactatgaggacttggcagccagggagcacgtgctggcctacttcctgcctgaggcaccggcggagctgctgcagatctttgatgaggctgccctggaggtggtactggccatgtaccccaagtacgaccgcatcaccaaccacatccatgtccgcatctcccacctgcctctggtggaggagctgcgctcgctgaggcagctgcatctgaaccagctgatccgcaccagtggggtggtgaccagctgcactggcgtcctgccccagctcagcatggtcaagtacaactgcaacaagtgcaatttcgtcctgggtcctttctgccagtcccagaaccaggaggtgaaaccaggctcctgtcctgagtgccagtcggccggcccctttgaggtcaacatggaggagaccatctatcagaactaccagcgtatccgaatccaggagagtccaggcaaagtggcggctggccggctgccccgctccaaggacgccattctcctcgcagatctggtggacagctgcaagccaggagacgagatagagctgactggcatctatcacaacaactatgatggctccctcaacactgccaatggcttccctgtctttgccactgtcatcctagccaaccacgtggccaagaaggacaacaaggttgctgtaggggaactgaccgatgaagatgtgaagatgatcactagcctctccaaggatcagcagatcggagagaagatctttgccagcattgctccttccatctatggtcatgaagacatcaagagaggcctggctctggccctgttcggaggggagcccaaaaacccaggtggcaagcacaaggtacgtggtgatatcaacgtgctcttgtgcggagaccctggcacagcgaagtcgcagtttctcaagtatattgagaaagtgtccagccgagccatcttcaccactggccagggggcgtcggctgtgggcctcacggcgtatgtccagcggcaccctgtcagcagggagtggaccttggaggctggggccctggttctggctgaccgaggagtgtgtctcattgatgaatttgacaagatgaatgaccaggacagaaccagcatccatgaggccatggagcaacagagcatctccatctcgaaggctggcatcgtcacctccctgcaggctcgctgcacggtcattgctgccgccaaccccataggagggcgctacgacccctcgctgactttctctgagaacgtggacctcacagagcccatcatctcacgctttgacatcctgtgtgtggtgagggacaccgtggacccagtccaggacgagatgctggcccgcttcgtggtgggcagccacgtcagacaccaccccagcaacaaggaggaggaggggctggccaatggcagcgctgctgagcccgccatgcccaacacgtatggcgtggagcccctgccccaggaggtcctgaagaagtacatcatctacgccaaggagagggtccacccgaagctcaaccagatggaccaggacaaggtggccaagatgtacagtgacctgaggaaagaatctatggcgacaggcagcatccccattacggtgcggcacatcgagtccatgatccgcatggcggaggcccacgcgcgcatccatctgcgggactatgtgatcgaagacgacgtcaacatggccatccgcgtgatgctggagagcttcatagacacacagaagttcagcgtcatgcgcagcatgcgcaagacttttgcccgctacctttcattccggcgtgacaacaatgagctgttgctcttcatactgaagcagttagtggcagagcaggtgacatatcagcgcaaccgctttggggcccagcaggacactattgaggtccctgagaaggacttggtggataaggctcgtcagatcaacatccacaacctctctgcattttatgacagtgagctcttcaggatgaacaagttcagccacgacctgaaaaggaaaatgatcctgcagcagttctgaggccctatgccatccataaggattccttgggattctggtttggggtggtcagtgccctctgtgctttatggacacaaaaccagagcacttgatgaactcggggtactagggtcagggcttatagcaggatgtctggctgcacctggcatgactgtttgtttctccaagcctgctttgtgcttctcacctttgggtgggatgccttgccagtgtgtcttacttggttgctgaacatcttgccacctccgagtgctttgtctccactcagtaccttggatcagagctgctgagttcaggatgcctgcgtgtggtttaggtgttagccttcttacatggatgtcaggagagctgctgccctcttggcgtgagttgcgtattcaggctgcttttgctgcctttggccagagagctggttgaagatgtttgtaatcgttttcagtctcctgcaggtttctgtgcccctgtggtggaagagggcacgacagtgccagcgcagcgttctgggctcctcagtcgcaggggtgggatgtgagtcatgcggattatccactcgccacagttatcagctgccattgctccctgtctgtttccccactctcttatttgtgcattcggtttggtttctgtagttttaatttttaataaagttgaataaaatat

SEQ ID NO: 147149 - DNA, 3144 bp, Artificial Sequence
  derived and/or modified sequence
acttttcgcgcgaaacctggttgttgctgtagtggcggagaggatcgtggtactgctatggcggaatcatcggaatccttcaccatggcatccagcccggcccagcgtcggcgaggcaatgatcctctcacctccagccctggctggggcctgggccgcatgcgccgtgggctcctgtatgacagcgatgaggaggacgaggagcgccctgcccgcaagcgccgccaggtggagcgggccacggaggacggcgaggaggacgaggagatgatcgagagcatcgagaacctggaggatctcaaaggccactctgtgcgcgagtgggtgagcatggcgggcccccggctggagatccaccaccgcttcaagaacttcctgcgcactcacgtcgacagccacggccacaacgtcttcaaggagcgcatcagcgacatgtgcaaagagaaccgtgagagcctggtggtgaactatgaggacttggcagccagggagcacgtgctggcctacttcctgcctgaggcaccggcggagctgctgcagatctttgatgaggctgccctggaggtggtactggccatgtaccccaagtacgaccgcatcaccaaccacatccatgtccgcatctcccacctgcctctggtggaggagctgcgctcgctgaggcagctgcatctgaaccagctgatccgcaccagtggggtggtgaccagctgcactggcgtcctgccccagctcagcatggtcaagtacaactgcaacaagtgcaatttcgtcctgggtcctttctgccagtcccagaaccaggaggtgaaaccaggctcctgtcctgagtgccagtcggccggcccctttgaggtcaacatggaggagaccatctatcagaactaccagcgtatccgaatccaggagagtccaggcaaagtggcggctggccggctgccccgctccaaggacgccattctcctcgcagatctggtggacagctgcaagccaggagacgagatagagctgactggcatctatcacaacaactatgatggctccctcaacactgccaatggcttccctgtctttgccactgtcatcctagccaaccacgtggccaagaaggacaacaaggttgctgtaggggaactgaccgatgaagatgtgaagatgatcactagcctctccaaggatcagcagatcggagagaagatctttgccagcattgctccttccatctatggtcatgaagacatcaagagaggcctggctctggccctgttcggaggggagcccaaaaacccaggtggcaagcacaaggtacgtggtgatatcaacgtgctcttgtgcggagaccctggcacagcgaagtcgcagtttctcaagtatattgagaaagtgtccagccgagccatcttcaccactggccagggggcgtcggctgtgggcctcacggcgtatgtccagcggcaccctgtcagcagggagtggaccttggaggctggggccctggttctggctgaccgaggagtgtgtctcattgatgaatttgacaagatgaatgaccaggacagaaccagcatccatgaggccatggagcaacagagcatctccatctcgaaggctggcatcgtcacctccctgcaggctcgctgcacggtcattgctgccgccaaccccataggagggcgctacgacccctcgctgactttctctgagaacgtggacctcacagagcccatcatctcacgctttgacatcctgtgtgtggtgagggacaccgtggacccagtccaggacgagatgctggcccgcttcgtggtgggcagccacgtcagacaccaccccagcaacaaggaggaggaggggctggccaatggcagcgctgctgagcccgccatgcccaacacgtatggcgtggagcccctgccccaggaggtcctgaagaagtacatcatctacgccaaggagagggtccacccgaagctcaaccagatggaccaggacaaggtggccaagatgtacagtgacctgaggaaagaatctatggcgacaggcagcatccccattacggtgcggcacatcgagtccatgatccgcatggcggaggcccacgcgcgcatccatctgcgggactatgtgatcgaagacgacgtcaacatggccatccgcgtgatgctggagagcttcatagacacacagaagttcagcgtcatgcgcagcatgcgcaagacttttgcccgctacctttcattccggcgtgacaacaatgagctgttgctcttcatactgaagcagttagtggcagagcaggtgacatatcagcgcaaccgctttggggcccagcaggacactattgaggtccctgagaaggacttggtggataaggctcgtcagatcaacatccacaacctctctgcattttatgacagtgagctcttcaggatgaacaagttcagccacgacctgaaaaggaaaatgatcctgcagcagttctgaggccctatgccatccataaggattccttgggattctggtttggggtggtcagtgccctctgtgctttatggacacaaaaccagagcacttgatgaactcggggtactagggtcagggcttatagcaggatgtctggctgcacctggcatgactgtttgtttctccaagcctgctttgtgcttctcacctttgggtgggatgccttgccagtgtgtcttacttggttgctgaacatcttgccacctccgagtgctttgtctccactcagtaccttggatcagagctgctgagttcaggatgcctgcgtgtggtttaggtgttagccttcttacatggatgtcaggagagctgctgccctcttggcgtgagttgcgtattcaggctgcttttgctgcctttggccagagagctggttgaagatgtttgtaatcgttttcagtctcctgcaggtttctgtgcccctgtggtggaagagggcacgacagtgccagcgcagcgttctgggctcctcagtcgcaggggtgggatgtgagtcatgcggattatccactcgccacagttatcagctgccattgctccctgtctgtttccccactctcttatttgtgcattcggtttggtttctgtagttttaatttttaataaagttgaataaaatat

SEQ ID NO: 147150 - DNA, 3237 bp, Artificial Sequence
  derived and/or modified sequence
gttgttgctgtagtggcggagaggatcgtggtactgctatggcggaatcatcggaatccttcaccatggcatccagcccggcccagcgtcggcgaggcaatgatcctctcacctccagccctggccgaagctcccggcgtactgatgccctcacctccagccctggccgtgaccttccaccatttgaggatgagtccgaggggctcctaggcacagaggggcccctggaggaagaagaggatggagaggagctcattggagatggcatggaaagggactaccgcgccatcccagagctggacgcctatgaggccgagggactggctctggatgatgaggacgtagaggagctgacggccagtcagagggaggcaggccgtgggctcctgtatgacagcgatgaggaggacgaggagcgccctgcccgcaagcgccgccaggtggagcgggccacggaggacggcgaggaggacgaggagatgatcgagagcatcgagaacctggaggatctcaaaggccactctgtgcgcgagtgggtgagcatggcgggcccccggctggagatccaccaccgcttcaagaacttcctgcgcactcacgtcgacagccacggccacaacgtcttcaaggagcgcatcagcgacatgtgcaaagagaaccgtgagagcctggtggtgaactatgaggacttggcagccagggagcacgtgctggcctacttcctgcctgaggcaccggcggagctgctgcagatctttgatgaggctgccctggaggtggtactggccatgtaccccaagtacgaccgcatcaccaaccacatccatgtccgcatctcccacctgcctctggtggaggagctgcgctcgctgaggcagctgcatctgaaccagctgatccgcaccagtggggtggtgaccagctgcactggcgtcctgccccagctcagcatggtcaagtacaactgcaacaagtgcaatttcgtcctgggtcctttctgccagtcccagaaccaggaggtgaaaccaggctcctgtcctgagtgccagtcggccggcccctttgaggtcaacatggaggagaccatctatcagaactaccagcgtatccgaatccaggagagtccaggcaaagtggcggctggccggctgccccgctccaaggacgccattctcctcgcagatctggtggacagctgcaagccaggagacgagatagagctgactggcatctatcacaacaactatgatggctccctcaacactgccaatggcttccctgtctttgccactgtcatcctagccaaccacgtggccaagaaggacaacaaggttgctgtaggggaactgaccgatgaagatgtgaagatgatcactagcctctccaaggatcagcagatcggagagaaggaaagctccagaaatgcatccctggcagaggctggtattggtgccattccttcccagctcttggccatcgaacctagtctgcgaagatctggggttcccataggagaggtgggtgtttctcagcgtcaggaagccaggagcttcagttcagccaacacacattggttcctggaagacctcctagggccaagttgtagggatacaatgatctttgccagcattgctccttccatctatggtcatgaagacatcaagagaggcctggctctggccctgttcggaggggagcccaaaaacccaggtggcaagcacaaggtacgtggtgatatcaacgtgctcttgtgcggagaccctggcacagcgaagtcgcagtttctcaagtatattgagaaagtgtccagccgagccatcttcaccactggccagggggcgtcggctgtgggcctcacggcgtatgtccagcggcaccctgtcagcagggagtggaccttggaggctggggccctggttctggctgaccgaggagtgtgtctcattgatgaatttgacaagatgaatgaccaggacagaaccagcatccatgaggccatggagcaacagagcatctccatctcgaaggctggcatcgtcacctccctgcaggctcgctgcacggtcattgctgccgccaaccccataggagggcgctacgacccctcgctgactttctctgagaacgtggacctcacagagcccatcatctcacgctttgacatcctgtgtgtggtgagggacaccgtggacccagtccaggacgagatgctggcccgcttcgtggtgggcagccacgtcagacaccaccccagcaacaaggaggaggaggggctggccaatggcagcgctgctgagcccgccatgcccaacacgtatggcgtggagcccctgccccaggaggtcctgaagaagtacatcatctacgccaaggagagggtccacccgaagctcaaccagatggaccaggacaaggtggccaagatgtacagtgacctgaggaaagaatctatggcgacaggcagcatccccattacggtgcggcacatcgagtccatgatccgcatggcggaggcccacgcgcgcatccatctgcgggactatgtgatcgaagacgacgtcaacatggccatccgcgtgatgctggagagcttcatagacacacagaagttcagcgtcatgcgcagcatgcgcaagacttttgcccgctacctttcattccggcgtgacaacaatgagctgttgctcttcatactgaagcagttagtggcagagcaggtgacatatcagcgcaaccgctttggggcccagcaggacactattgaggtccctgagaaggacttggtggataaggctcgtcagatcaacatccacaacctctctgcattttatgacagtgagctcttcaggatgaacaagttcagccacgacctgaaaaggaaaatgatcctgcagcagttctgaggccctatgccatccataaggattccttgggattctggtttggggtggtcagtgccctctgtgctttatggacacaaaaccagagcacttgatgaactcggggtactagggtcagggcttatagcaggatgtctggctgcacctggcatgactgtttgtttctccaagcctgctttgtgcttctcacctttgggtgggatgccttgccagtgtgtcttacttggttgctgaacatcttgccacctccgagtgctttgtctccactcagtaccttggatcagagctgctgagttcaggatgcctgcgtgtggtttaggtgttagccttcttacat

SEQ ID NO: 147151 - DNA, 2715 bp, Artificial Sequence
  derived and/or modified sequence
atggccgagagcagcgagagcttcaccatggccagcagccccgcccaacgccgtcgcggcaatgaccctctgaccagtagccctggccggtcaagtaggcggactgatgctctgacttcctcaccgggccgggaccttcccccattcgaagatgaaagtgagggcttgctcggcactgagggtcccctcgaagaggaggaggatggggaagagctgattggggatggcatggaacgcgattacagggctatacccgagctggacgcctatgaggccgaaggattggcattagacgatgaagacgtcgaagaattaacagcttcccaacgcgaagccgccgagcgcgccatgcggcagagggatcgagaagctgggcgaggcctaggccgcatgagaagaggccttctttacgacagcgatgaggaagatgaggagcgccccgctcgtaaacgtcgccaggtcgaacgggctacagaggacggtgaggaggacgaggaaatgatcgagtctatagagaacttggaggacctgaaaggtcactcagtacgggaatgggtgtctatggccggcccgcgactggaaatccaccatcgtttcaagaacttcctgcgaacacacgtggattcacatgggcacaacgtattcaaggaacggatatccgacatgtgtaaggagaacagagagtctctcgtggtaaactacgaagatttggccgctcgcgagcacgttttggcttatttcttgccagaggctcctgccgaattactccagattttcgatgaggcagctctcgaggtggtgctggcaatgtatccaaaatatgacaggattactaaccatatacacgtcaggatttctcacctgcccctagtggaggagctcaggagcttgcgccagctccacctgaatcaactgatccggactagcggcgtggtgacaagctgtaccggagtgttacctcagctctcgatggtcaagtataactgtaacaaatgcaacttcgtgctggggcccttttgtcaaagccagaaccaagaggttaagccagggagctgccccgaatgccagagtgccgggccctttgaagtgaatatggaagagaccatctatcagaattatcaacgaattagaatccaggagtcgcccggcaaggttgctgccgggcgattgcctagatctaaggatgccatccttctggctgatttggtggactcttgcaagccaggggatgaaatcgagctgaccggaatctatcataacaactacgacggttctctgaatacagctaatgggttcccggtgttcgcgaccgtcatcctggccaaccacgtggcaaagaaggataacaaggttgctgtcggtgagctgaccgacgaagacgtgaaaatgatcacatctttgtctaaggaccagcagattggcgagaaaatcttcgccagtatcgctccaagcatttacggccacgaggacatcaaaagagggctcgccctggctttattcgggggagaaccgaagaaccctggtgggaagcataaagtcagaggggacatcaatgtgctgctgtgcggagaccccggcacggctaaatcccagtttctgaaatatatcgagaaggtgtctagtagagctattttcacgaccgggcagggggcctctgctgtgggactaaccgcatatgtccagcgacaccctgtgagcagagagtggactctagaggcaggagccttagtgctggccgatcgcggcgtatgcctcatcgatgagtttgacaaaatgaatgatcaggacaggacatcaattcacgaggccatggaacaacagagtatcagcatatctaaggcaggtatcgtgacctcactgcaggctaggtgcactgtgattgctgcagccaatcctattgggggaagatacgacccctcgctcacctttagtgaaaacgtggatctgactgaacccatcatttctcgttttgacatcttatgtgtggtacgcgacaccgtggaccccgtccaggatgaaatgctcgccaggtttgtcgtcggttcacacgtgcgacaccaccctagtaacaaggaggaggaaggtctggccaacggctccgcagctgagcccgctatgccgaacacctacggagtcgagccactccctcaagaggtcctcaagaaatacattatctatgctaaagagcgggtccatccaaagctaaatcagatggaccaggataaagtggctaaaatgtattccgatctacgcaaggagtccatggctacaggctcaatcccaattacggtacgccatattgaatcgatgatccgcatggctgaagcacacgcaaggatccacctgcgggactatgtgatagaagacgacgtcaatatggcaatccgcgtgatgcttgagtcgttcatagacacacaaaaattctcggttatgagatcgatgcggaagacttttgcacgatacctctcattcagaagggataacaacgaattgctgctgtttatcctcaagcagctggtagcggaacaggtgacatatcaacgtaaccgtttcggcgcacagcaggatactatcgaggtgccagaaaaggacctggtggataaagcacgccagattaatatccataatttgtccgccttttatgactcagaactgtttaggatgaacaagttttcccatgacctcaagcggaaaatgatcctccagcagttctag

SEQ ID NO: 147152 - DNA, 2427 bp, Artificial Sequence
  derived and/or modified sequence
atggccgagagcagcgagagcttcaccatggccagcagccccgcccagagacgcagaggcaatgaccccctgaccagcagccccgggtggggtctcggcaggatgagaagagggctgctctacgacagtgacgaggaagatgaggaaagaccggcacgtaagcgaaggcaggtagagagagccactgaggatggggaggaagacgaggagatgattgaatccatagagaacctggaagacctgaaaggccattcagtgagagaatgggttagcatggccggcccgcggcttgagatccaccatagatttaagaactttttaaggacacacgtcgactcccacggacataacgtttttaaggaaaggatctcagacatgtgtaaggagaaccgggagtctctcgtcgttaactacgaagatctggctgccagggagcacgtactcgcatacttcctacctgaggcgccagccgagcttctgcagatcttcgacgaagccgctctggaggtggtgttggccatgtatccaaaatatgataggataactaatcacatccatgtgaggataagccatctcccactggtggaggagctgaggtcactgcggcagctgcatctgaatcagttaatccgaacctcaggcgtggttaccagttgtacaggagtgcttccccagctgtcaatggtgaagtacaactgtaataagtgtaattttgtgctcggccctttttgtcaatcccagaaccaagaggtgaagcccgggtcgtgcccagaatgccagagtgcagggcctttcgaagtgaacatggaagaaaccatctaccagaattatcagcggatacggatccaggagtctccggggaaggtcgccgccggccgcctcccgagaagcaaagacgctatcctgttagccgatctcgtggattcgtgcaaaccaggcgacgagatagagctgacaggtatatatcacaacaactacgacggctctctaaatactgccaacggattccccgttttcgctacagtgatacttgctaatcacgtggcaaagaaagataataaggttgccgtgggtgagctcacagacgaagacgtcaaaatgatcacaagcctaagtaaagaccagcagataggtgagaaaattttcgcaagcatcgcaccaagtatatacggtcatgaggatatcaagcgaggcctcgcccttgccttgtttggaggggagcccaagaaccccggcggcaagcataaggtcagaggagatatcaatgtccttttatgcggagaccctggaacagccaagtcccagttcctgaagtatattgagaaggtgtcaagcagggcgattttcactaccggtcagggtgcctcagctgtcgggctcacggcatacgtgcaaagacaccctgtctctagggagtggacactggaagccggggccctggttctggcggaccgcggcgtgtgcctgatcgacgagtttgacaaaatgaatgaccaggatagaacatcaatccatgaggcgatggagcagcagagcatttcgataagcaaagcaggaatcgtcacctcccttcaggcacggtgtactgtgatcgcagctgctaatcctatcggtgggcgatacgatccatccctgacctttagcgagaacgtggacctgaccgagcctataatctctagattcgacatactctgtgtggtgagagataccgtggacccggtccaggatgagatgttggcgaggttcgtagtgggtagccacgtccggcaccacccgtccaacaaagaagaggaaggcttggccaacgggtcagccgccgagccagccatgccaaatacctacggagtggaacccttgccgcaggaggttctcaagaagtatatcatctacgcaaaggaaagggtgcatcccaaactgaatcagatggatcaggataaggtcgccaaaatgtactctgatctcagaaaagaatccatggcaacaggcagtatacccatcaccgttaggcatattgagagcatgatacggatggctgaagcgcacgcacgaatccacctccgagactacgtgatcgaagatgatgtgaacatggcaatccgggtgatgttggaaagtttcatcgatacccagaagtttagtgtaatgagatccatgcgcaagacttttgcacggtatctctccttccgccgagacaacaacgagctcctgctgttcattcttaagcaactggttgcagagcaggtgacctaccagagaaatcgctttggcgcccagcaagacacgattgaggtccccgagaaggacttggtagataaggctaggcaaattaatatacataatttgagcgcgttttacgattcagaactgtttcggatgaataaattttctcacgacctcaagcgcaagatgattcttcagcagttctag

SEQ ID NO: 147153 - DNA, 2865 bp, Artificial Sequence
  derived and/or modified sequence
atggccgagagcagcgagagcttcaccatggccagcagccccgcccaaaggaggagggggaatgaccctctaacctcgtcccctgggcgtagttctagacgcacagacgccctaacgtcctcgcccggacgtgacctgcccccatttgaagacgaatctgagggattgttggggaccgaggggcctctcgaggaggaagaagatggcgaggagctgataggagacgggatggagcgagactaccgtgcaatccctgagctcgatgcatacgaagccgaaggactggcgctggatgatgaagacgtggaagagttaactgcgtcccaaagggaggcgggacgggggctcctgtacgattccgacgaagaagacgaggagaggcccgctcgtaagagacgccaagtcgagcgagctaccgaggatggggaggaagacgaagagatgattgaatcgattgaaaacctagaagatctgaagggacacagtgttagagaatgggtgagcatggccgggcctagactggaaatccatcataggtttaagaacttcctccgcacccacgttgactcccatggacataacgtgttcaaggagcggatcagcgacatgtgtaaagagaatagggagtccctcgtggttaattacgaggatctggctgctagagaacacgtactggcctatttcttgcctgaggctccagctgaactgctgcagatctttgacgaagccgccctagaagttgtcctcgccatgtatccaaagtatgatcgtattactaaccacattcacgttcgaataagccacttacccttggttgaggaactccggtcactcaggcagctacacttgaatcaattgatacgcacaagtggagtcgtgaccagctgcactggggtactgccccagctgagcatggtaaagtacaactgcaacaaatgcaacttcgtgctgggacctttctgccaatcccagaaccaggaggttaaacctgggtcttgtccggagtgccaatctgctgggccattcgaggtgaacatggaagagacaatctaccaaaactaccaacgcatcagaatccaggagtctcccggaaaggtggctgctggccgtctccccaggagcaaagatgcaatattattggcagatctggtcgacagctgcaagccgggcgatgagatcgaactcactgggatttaccataacaactatgacggttcactgaacactgccaacggcttccctgtatttgcaaccgttatattggcgaaccacgtcgccaagaaagacaacaaggtagccgtgggagagctcacagatgaggatgtgaagatgataactagtctatcaaaggaccagcagatcggcgagaaggaatcatctaggaatgcatccctggcggaggccggcataggcgcaatcccctcccagctgctggcgattgagccgagcctgagacggagcggcgttccgataggagaggtgggagtcagtcagaggcaggaagcgcgatcattcagcagcgctaatacccactggttcctagaagacctccttggccccagctgtagggacaccatgatctttgccagcattgctcccagtatctatggccatgaagatatcaaaaggggactcgccttggccctgtttggcggcgaacctaagaacccaggcggaaagcacaaggtcaggggagatatcaatgttttgctgtgcggagatcccggaacagccaaatcacaattcctgaagtacattgaaaaggtcagcagccgtgcaatctttactactggccaaggagcctccgccgtcgggctaactgcttacgtgcagcgtcacccagtgtctcgggaatggacattggaagcgggggcactggtgctggcggatcgtggcgtttgtctaatcgatgagttcgataaaatgaacgatcaggacagaacatcaattcacgaggcgatggaacaacagtctatttccatcagcaaagctggtatcgtgacctcccttcaggcccgttgtacagtgatcgctgccgccaaccccatcggcggcagatatgaccctagcctgacgtttagcgagaatgtggacttgaccgaaccgattatcagccggtttgacatactctgcgtggtccgggacacggtggaccctgtccaagatgaaatgctggccaggttcgtggtgggttcccatgtgcggcatcacccaagcaacaaggaggaggaaggcctcgccaacgggagcgctgccgagcccgctatgcctaacacctatggtgtcgaaccactcccacaggaggttctgaaaaagtacattatttatgccaaagagagagtgcaccctaagttaaatcagatggatcaggataaggttgcaaagatgtactcagacctacggaaggagtctatggcaaccggttccatcccaatcaccgtgcgacacatcgagagcatgatcaggatggctgaggctcatgcacgaatccatttgcgggattacgtgatagaggatgatgttaatatggcaatcagagtgatgttggaatcttttatcgacacacagaaattttcagtcatgaggtccatgaggaaaacctttgctcgctacctgtcctttcgcagggacaataatgagctgctccttttcatcttgaagcagctggtcgccgagcaggtgacctaccagcgtaaccgttttggagcccagcaggacaccattgaagttccggagaaggaccttgttgacaaggctcggcaaatcaatatccataatctatctgcattctatgactcagaactgtttcgcatgaacaaattctcccatgacctcaagcgtaagatgattctgcagcaattttag

SEQ ID NO: 147154 - DNA, 2715 bp, Artificial Sequence
  derived and/or modified sequence
atggccgagtcatctgagtcctttaccatggcatcttcccccgctcagaggcgcagaggcaatgaccccctgaccagctctccagggagatctagcagacggaccgatgctctcacaagctcaccaggccgagacctgccacctttcgaagacgagagtgagggtttgctaggcacggagggacccctggaagaggaagaagacggggaggaacttattggagatggtatggagcgcgattaccgagctattccggagctggacgcatacgaggctgagggactggcactggacgacgaggacgtggaggagctgacagcctctcagcgggaggcagccgaaagagctatgagacagcgggatcgagaagccggaaggggcttgggacgtatgcggagaggtctgctttatgacagcgatgaagaggatgaggaacggccagctcgaaagcgcaggcaggtagaacgggcaacagaggatggcgaggaagacgaggaaatgattgaatctatagagaatctggaggatctgaaggggcattccgtgagggagtgggtgtcaatggctggccctcgcctagaaattcaccatcgtttcaagaactttctgcggacacacgtggactcacatggccataacgtgtttaaggagcgtatatccgatatgtgcaaagaaaacagggagagcctcgtggtcaattacgaggatttggcggcacgggaacatgtcctggcatactttctccctgaagcgcctgcagagttactccagattttcgatgaggctgccttggaagtggtccttgctatgtacccgaaatatgatagaatcacaaatcatatacatgtgagaatttctcacctgcctctcgtagaggagctgagatctctgcgccagcttcacctgaaccagctcatcaggacgtcaggagttgtaacatcctgcacaggagtgcttccccaactgtcaatggtcaaatacaactgcaataagtgcaacttcgttctaggtccattttgtcagagtcagaatcaggaggtcaaaccgggatcttgtccagagtgccagtccgcaggccctttcgaggtgaatatggaggaaaccatataccagaactaccagcgcatcaggatccaagagtcccctgggaaggtggctgccggaagacttccccgatccaaggacgccatcttactcgccgaccttgtggattcttgtaaaccaggcgacgagatcgaactgaccgggatctatcataacaattatgatggtagcctgaatacggcgaacggttttcccgtctttgcaaccgtcatactcgccaatcatgtcgcaaagaaggataataaggtcgcggtcggcgagttgaccgacgaggacgtcaaaatgataacgtctctgtctaaagatcaacagatcggcgagaaaattttcgcttcaatagcacccagcatctacgggcacgaagatattaaacgaggcctggcgctggccctgtttggtggagagccaaagaacccaggaggtaagcacaaggttaggggagacattaacgttctcctctgcggtgacccaggaacagctaagtcacagttcctaaagtatatcgaaaaagtgtcctcccgtgctatattcaccaccgggcaaggcgcttccgccgtgggcttaaccgcctatgtgcaaagacatcctgtgagccgcgaatggacattagaggcaggcgctctggtcctcgctgatcggggtgtgtgcctgatcgacgagtttgacaaaatgaatgaccaggaccgcacaagtatccacgaagcgatggagcagcaaagcatctcaatctcaaaggctggcatcgtcacaagcctgcaagccagatgcacagtcatcgcagccgctaaccccattgggggacgttatgatccgtccttgactttctcagaaaacgtggacttgacagaacctatcataagccggtttgacatactgtgtgtggtcagagacaccgtggacccagtacaggacgaaatgctggcaagattcgtggtgggatctcatgtgcgccatcatccctcaaataaagaggaagagggcctggcaaacggctccgccgctgaacccgcaatgccgaatacatacggcgtggaacctcttccccaggaggttctgaagaagtacattatatacgccaaagagagagtacatccgaagctcaaccaaatggaccaggacaaggtggccaagatgtacagcgatctccggaaagagtcaatggcaacaggctcaattccgatcactgtcaggcacattgaatcgatgatcagaatggctgaggcacacgccagaatacacttacgggactacgtaatagaagatgacgttaatatggcaatacgagtgatgctcgagtctttcatcgacacacagaagttttccgtcatgcgctccatgcgcaagacgtttgctcgatacctgagcttcagacgcgacaataacgaattacttctgtttatactgaagcagctggtagcagaacaggtgacgtaccagagaaatcgctttggcgctcaacaggacacgatcgaggtgcccgaaaaggatctggttgacaaggcacgacagatcaacatccataatctgtctgcattttacgattccgagctttttcggatgaacaaatttagtcatgacctgaagaggaagatgatcttgcagcagttttag

SEQ ID NO: 147155 - DNA, 2427 bp, Artificial Sequence
  derived and/or modified sequence
atggcagagagctctgagagcttcacaatggcttcatcccccgctcagcgcaggcgcggaaacgacccgctcactagttcacctgggtggggtttagggcgaatgaggagaggcttactctacgattccgatgaggaggatgaggaacggcctgcacgtaagaggcgtcaggtggagagagccactgaggatggagaagaggatgaggagatgatcgagtccatcgaaaacctggaggacttgaagggccactcggtccgcgagtgggtttccatggctggcccacgcctggaaatacatcaccgtttcaagaattttctccgaactcacgtcgacagccacggccacaatgtcttcaaagagcgaatcagcgacatgtgtaaagagaatcgtgaatcactcgtggtgaattatgaggacttggcagcacgggagcatgtgctcgcctactttctgccagaagcacctgcggaactgctccaaatctttgacgaggccgctcttgaggtcgtgttggccatgtaccccaaatacgatcgtatcaccaaccatatccatgtgcgcattagccatctgccccttgtcgaggagttgaggtccctgcgccagctgcatttgaaccagcttatcaggaccagtggcgtggtcacaagctgcactggagtattacctcagctgtctatggtgaaatataactgtaacaagtgcaactttgttctgggaccattttgccaaagtcaaaaccaagaagtgaagccgggttcttgcccagaatgccaatctgccggtccattcgaggtcaatatggaggagaccatctatcaaaattaccagcggattcgtatccaagagagtcccggtaaggtggccgctgggaggctcccgagatccaaggacgccatactgctcgcagaccttgttgactcgtgcaaaccaggggacgagattgagttaaccggaatttaccataacaactacgacgggtctctcaataccgccaatggcttccctgtattcgctacagttatccttgcgaaccatgtggccaagaaagacaataaagtggctgtcggggaattaaccgatgaggatgttaaaatgatcacctccttaagcaaggaccaacagatcggagagaagatatttgcatctattgcaccctcgatctacggccacgaggatattaaaaggggactggccttggcactgttcgggggagaacccaagaatccaggcggaaagcacaaggtgcgcggtgacatcaacgtgcttttgtgcggagaccccggtacggccaaatcacagtttttaaagtatattgagaaggttagcagtcgcgcaatcttcactacaggccagggcgcatctgctgtaggattgacggcctatgtccagcggcatccagtgtctagagaatggacattggaagccggagctctcgtcctggctgaccgaggcgtatgccttatcgacgagtttgataagatgaacgatcaggaccgaacttctatacacgaggccatggagcagcagtctattagcatttcaaaagcaggcattgttacctccctgcaagccagatgtactgtgattgcagccgctaatcccatcggaggcaggtacgatccctctctgactttcagcgaaaatgtggatttaacggaacctattatttcccggtttgacattttatgcgtcgtgagagataccgtcgatccagtgcaggatgaaatgctggctcggtttgtggtggggtctcatgtccgacaccatccctccaataaggaggaagaaggattggcgaatggatctgcagctgaacccgcaatgccaaatacctatggagtcgagccactgccacaagaagtcttaaaaaagtacataatctacgccaaggaaagggttcatcctaagctgaaccagatggaccaggataaggtcgccaagatgtactcggacctgcgcaaagagtccatggccactggtagcatcccaatcactgtccggcacatcgagagcatgattaggatggccgaagcacacgcacgaatccacctgcgggactatgtcatcgaggacgacgtcaatatggctatacgtgttatgctggaatcatttattgacacccagaagttcagtgtcatgcgctccatgcgaaagaccttcgccagatacctgtcctttcgcagagataacaacgagctgttgctgttcatcttaaaacaattggtggccgaacaggttacctaccagagaaaccgcttcggggctcagcaggacactatcgaggtcccagaaaaggatttggttgataaggcacgacaaatcaatattcataatctttctgcattttacgatagtgaattgttccgcatgaataagttcagtcacgacctgaaacgcaaaatgatccttcaacagttctag

SEQ ID NO: 147156 - DNA, 2865 bp, Artificial Sequence
  derived and/or modified sequence
atggccgagtcttccgagtcctttacaatggcctcaagcccagcgcaaagacggagggggaacgaccctctaaccagctcacccggaagatccagtagacggaccgatgcactaacttcctcccccggaagggacctgccaccatttgaagatgagagtgagggcctgctcggaactgaaggaccactggaagaggaggaggatggagaggaactgatcggggacgggatggaaagagactatcgcgcaatcccagagctcgatgcctacgaggcggagggcctggccctggatgatgaggacgttgaagaactgacagcaagtcagcgtgaagctgggaggggcctattatatgattctgacgaagaggacgaggagcgcccagccagaaaacggaggcaagtagagagagccaccgaggatggcgaagaggacgaggagatgattgagagcatagagaacctcgaagacctgaaggggcacagtgtgcgggagtgggtgtccatggcgggacctaggctggaaatccatcacaggtttaagaactttcttaggacccatgtggacagccacgggcataatgtgtttaaggaacggatatccgatatgtgtaaggaaaaccgggagagccttgtggtgaactatgaggacttggcagctcgcgaacacgtcttggcgtattttctgccagaggcacctgccgagctcctgcagatttttgacgaggccgcactcgaagtggtcctcgccatgtatccaaaatacgaccgcatcacgaaccacatccatgtacgaatctctcatctgcccttggtagaggagctgcggtccctgagacagctccacctgaatcagctgattcgcacaagtggagtggtgacttcttgcaccggggtcctccctcaattgtctatggtcaagtacaactgtaacaagtgtaactttgtgctaggcccattttgccagagtcagaatcaggaggtgaagccaggctcatgcccagaatgtcagtcagccggtccattcgaagtcaacatggaggagactatataccagaattatcagcggattcggatacaggagagcccgggaaaggtggcagcaggtcggttgccccgatcaaaggacgccattctgctggctgacctggtggatagttgcaagcctggggacgagattgaactcaccgggatataccataataattatgatggcagtctcaacaccgccaatggctttcccgtgttcgctactgttattttggccaatcacgtggcaaaaaaagacaataaagtggcggtaggagaactgaccgacgaagatgtcaaaatgattacctctcttagcaaagatcaacagataggggagaaggagtcatccagaaatgctagtttagccgaagccggtattggcgcaatcccaagccagctgcttgcgattgagccgagcctaaggaggtctggcgttcctattggtgaggtcggcgtgagtcagagacaggaagcacggtctttcagctccgctaatactcattggttccttgaggaccttctggggccaagctgccgcgatacaatgatctttgcctcaattgccccttcgatttacgggcacgaagatattaagagaggcctggcgcttgctctctttggaggcgagcctaaaaaccccggagggaaacacaaggttcggggtgacatcaacgtattattgtgtggtgaccccggaactgccaagtcccaatttctgaaatacatagaaaaggtgtcatcgcgggctatttttaccacgggacaaggcgcttctgcggtcgggttaacggcctacgtgcagagacaccccgtgagtcgggaatggacactggaagccggtgccctcgtacttgccgatagaggcgtatgcctcatcgacgagttcgataagatgaacgatcaggaccgcacttccattcacgaggctatggaacagcagtccatttctatctccaaggccggtatcgtcacatcattgcaggccagatgcacagtcatcgctgctgccaatcctataggtggtcggtacgatccctcactgaccttcagtgaaaacgtcgatctcaccgagccaattataagtagatttgatatcttatgtgtagtccgcgatacagtggaccctgtccaggatgaaatgctagccaggtttgtggtcggcagccatgtccggcaccacccttctaacaaagaagaagaagggctagctaatggctccgctgctgaaccggctatgccaaacacgtacggggtagagccgttaccacaggaagttcttaaaaaatatatcatttacgccaaggaaagggtgcacccaaaacttaatcaaatggaccaggacaaagtggccaagatgtactcggacctgaggaaagagtccatggccacaggctcaatccctattactgtacgccacatcgagagtatgatccgcatggccgaggcgcacgccaggatccatctgcgcgattacgtgatagaggatgacgtgaatatggcgattagggtcatgctggaatcgttcatcgacacccagaagttcagcgtgatgcggagcatgcgcaaaacgtttgctcgatatctgagcttccgaagagataataacgagctgctattgtttattctcaagcagctagttgcagagcaggtcacttaccagaggaacagattcggcgctcaacaggacacgatagaggtccctgagaaagacctggtggacaaggccagacagatcaatatccacaatctttctgccttttacgactcggaactctttagaatgaacaagtttagtcacgatctcaaacgaaagatgatcctgcagcagttctag

SEQ ID NO: 147157 - protein, 254 aa, Artificial Sequence
  derived and/or modified sequence
MDPAASSCMRSLQPPAPVWGCLRNPHSEGNGASGLPHYPPTPFSFHQKPDFLATATAAYPDFSASCLAATPHSLPQEEHIFTEQHPAFPQSPNWHFPVSDARRRPNSGPAGGSKEMGTSSLGLVDTTGGPGDDYGVLGSTANETEKKSSRRRKESSDNQENRGKPEGSSKARKERTAFTKEQLRELEAEFAHHNYLTRLRRYEIAVNLDLSERQVKVWFQNRRMKWKRVKGGQPISPNGQDPEDGDSTASPSSE

SEQ ID NO: 147158 - protein, 139 aa, Artificial Sequence
  derived and/or modified sequence
MGTSSLGLVDTTGGPGDDYGVLGSTANETEKKSSRRRKESSDNQENRGKPEGSSKARKERTAFTKEQLRELEAEFAHHNYLTRLRRYEIAVNLDLSERQVKVWFQNRRMKWKRVKGGQPISPNGQDPEDGDSTASPSSE

SEQ ID NO: 147159 - DNA, 2330 bp, Artificial Sequence
  derived and/or modified sequence
aaaggaccgaggcgtgcagcggacagcagatggatcccgcggccagcagctgcatgaggagcctccagcccccagcccctgtctggggctgccttcgaaacccccactcggaaggcaatggggcctcagggctaccccactacccgcccaccccgttctccttccaccagaaaccagacttcctggcgacagcgacggcagcgtaccctgacttctcagcctcctgcctggcagccaccccacacagcctgccccaggaggagcacatcttcactgagcagcaccccgctttcccacagtcccccaactggcacttccctgtctcagacgcccggcgcaggcccaactcaggcccggcagggggttccaaggaaatggggaccagcagcctgggcctggtggacaccacaggaggcccaggcgatgactacggggtgcttgggagcactgccaatgagacagagaagaaatcatccaggcggagaaaggagagttcagacaaccaggagaacagagggaagccggagggcagcagcaaagcccgcaaggagaggacggccttcaccaaggagcagctgcgagagctggaggcagagtttgcccatcataactacctgactcggctccgcagatatgagattgcggtaaacctggacctctctgagcgccaggtcaaagtgtggttccagaaccgaaggatgaagtggaagcgtgtgaagggaggtcagcccatctcccccaatgggcaggaccctgaggatggggactccacagcctctccaagttcagagtgagattctgcatggaggaaaaatgactaaggactgagccccctacccaactacccccaccccaatcccaccttcaccctcttccttccccagccagggcagcctctccacatctttccctgactcttggatatgaaactgcccagcattcctgggagtcttaggattttctaggaagttctgtccagcctcttagcagcctcttccctagggcctttgctcccacactctcatggaatcagacagagatcctaccgggccggatgaatctggaaacagcttcagagatactgcttctcagcgtctcttggctgccacccatgcctcctcctaccgctgttctcctaggtcagccaggcctcctcctggtctggacaccacctggcctggtgggagaggagctttggaaccagctggcgactcggaaagtaaatgcttcaaaaggaaggaaatgacagagacacacgcccttgcccaccttcctctgtaggctgcacatctgaggctttggggccccttagttgtcccgaaaccccaagaaaaatcagaatgaggagagtcaaggacagcaactcagctgctgcaagccagaaacacatccctgtctccaaatttgttggctaagtggagacacttctgagaactgactagagaagacagaaaaatagcccgatgtaggtttcggtgtccccatataggcccgtccacacaggcttgactgggtggacaagaatgaacccatgacagcacctgctgcttcaaaatcaaaatcaatttagggatacagcaggggctgttgggctgtgctccagagaaaaggagcagctactccttttaaatccacgatttctggattgaaaacctgtccagatgctgagttgttgggctgaacaactaggagctgaaaacaacgtagaggctggaaagtgtcccctgcattctggaggggaggggagataataaggagggctgctgggtgagggcctggagatgtggaaccctggagtggaaggttctccagtgacagtgtcctgtgactgcaaaaggggacaagaaaatccctcttcctccatgggatggatttaagctcttgctgtgtgttctacaaatgctgttattgtgggaggaaatgctaggtttttgtgtgtggactgcccagacctcagccaggtcttctggagatgacatttgaggactgatggccaaagagcatgggggactgaagccctggctgcctcagcgctctgtctcccaacaccagctggtgttgcagagggaggtcaacgtgagtttggatctcttgtacgcagatgtaatcattcacatgtaaaaataaccccacctccccaccccaaaaagggcaagagctgtggaaaatgattgccaaatgagatggctggttagagcatgattttttctaaagcatacttcatatattttcttaagattacatcaagctaattgtgcgagctcaattcactttgtaagaaaactctcggagaaataaaatcaataaaaagcaaaaaaaaaaaaaaaaaa

SEQ ID NO: 147160 - DNA, 765 bp, Artificial Sequence
  derived and/or modified sequence
atggaccctgcagcctcttcttgcatgcggagtctccagcctcccgcaccagtgtggggatgcctgcgaaatccgcactcggaaggaaacggtgccagcggcttgccacactatccccctactcctttttcgtttcatcaaaaacctgattttctcgctacagccaccgctgcgtaccccgacttctctgcatcgtgccttgcagcaactccacactcacttccacaggaggaacatatctttacggaacaacacccagcatttccgcagtcccctaattggcacttcccagtaagtgatgctagacggaggcccaacagcggccctgcaggtggaagcaaggagatgggtacaagctctctggggctcgtggacactaccggaggacctggcgatgactacggtgtgttagggtccaccgctaatgaaaccgagaagaagtcctctaggcgaaggaaggagtcgagcgataaccaggaaaatagagggaagccagaaggttcaagcaaggcccggaaagaaaggacagccttcaccaaagagcaactgcgggagcttgaggccgagttcgcccatcataattacctcacccgcttaagacgttatgaaatcgccgtcaacctggacctgtcggagagacaggtgaaggtgtggttccagaatcgccgaatgaagtggaagcgggtcaagggcgggcagcctattagtcctaacggccaggatccagaagatggcgacagcacagccagcccgagttccgagtag

SEQ ID NO: 147161 - DNA, 765 bp, Artificial Sequence
  derived and/or modified sequence
atggaccctgctgccagcagctgcatgaggagcctgcagcccccagcccctgtgtggggctgcctgaggaacccccacagcgagggcaatggagccagcggcctgccccactacccacccacccccttctccttccaccagaagccagacttcctggccacagccacagctgcctacccagacttcagcgccagctgcctggccgccaccccccacagcctgccccaggaggagcacatcttcacagagcagcacccagccttcccccagagccccaactggcacttccctgtgtctgatgccaggagaagacccaacagcggccctgctgggggcagcaaggagatgggcaccagcagcctgggcctggtggacaccactggaggccctggagatgattatggagtgctgggcagcacagccaatgaaacagagaagaagagcagcagaagaaggaaggagagcagtgacaaccaggagaacagaggcaagccagagggcagcagcaaggccaggaaggagaggacagccttcaccaaggagcagctgcgggagctggaggccgagtttgcccaccacaactacctgacccggctgcggcgctatgaaattgctgtgaacctggacctgtctgagcggcaggtgaaggtgtggttccagaacagaaggatgaagtggaagagggtgaagggcggccagcccatcagccccaacggccaggaccctgaagatggagacagcacagccagccccagcagcgagtag

SEQ ID NO: 147162 - DNA, 2707 bp, Artificial Sequence
  derived and/or modified sequence
gatttaaaagtgtgtcccagcagccctggtccagccctctgcaggcatttgctctgggctccaggacgaactcctcgtcagctggtgcgtctgggttgggacagtgaaaatgtttagtgtcattggcgacaaatacacatacaggggatcccagtaggtaggctggtgcattggaggggcaggagcaagcccgacataggtgtgtgcacacacataggagtagctggccacatgtgtgtgtactttaaggagagactttagttttgggtttttttttttttttggttcctggggtaaattttctgttgaacatttttccctcctatttagttttttttcttttgcatttttaaaaatttgaacataaaaagtataaagaatcaaatctttgaaaggaccgaggcgtgcagcggacagcagatggatcccgcggccagcagctgcatgaggagcctccagcccccagcccctgtctggggctgccttcgaaacccccactcggaaggcaatggggcctcagggctaccccactacccgcccaccccgttctccttccaccagaaaccagacttcctggcgacagcgacggcagcgtaccctgacttctcagcctcctgcctggcagccaccccacacagcctgccccaggaggagcacatcttcactgagcagcaccccgctttcccacagtcccccaactggcacttccctgtctcagacgcccggcgcaggcccaactcaggcccggcagggggttccaaggaaatggggaccagcagcctgggcctggtggacaccacaggaggcccaggcgatgactacggggtgcttgggagcactgccaatgagacagagaagaaatcatccaggcggagaaaggagagttcagacaaccaggagaacagagggaagccggagggcagcagcaaagcccgcaaggagaggacggccttcaccaaggagcagctgcgagagctggaggcagagtttgcccatcataactacctgactcggctccgcagatatgagattgcggtaaacctggacctctctgagcgccaggtcaaagtgtggttccagaaccgaaggatgaagtggaagcgtgtgaagggaggtcagcccatctcccccaatgggcaggaccctgaggatggggactccacagcctctccaagttcagagtgagattctgcatggaggaaaaatgactaaggactgagccccctacccaactacccccaccccaatcccaccttcaccctcttccttccccagccagggcagcctctccacatctttccctgactcttggatatgaaactgcccagcattcctgggagtcttaggattttctaggaagttctgtccagcctcttagcagcctcttccctagggcctttgctcccacactctcatggaatcagacagagatcctaccgggccggatgaatctggaaacagcttcagagatactgcttctcagcgtctcttggctgccacccatgcctcctcctaccgctgttctcctaggtcagccaggcctcctcctggtctggacaccacctggcctggtgggagaggagctttggaaccagctggcgactcggaaagtaaatgcttcaaaaggaaggaaatgacagagacacacgcccttgcccaccttcctctgtaggctgcacatctgaggctttggggccccttagttgtcccgaaaccccaagaaaaatcagaatgaggagagtcaaggacagcaactcagctgctgcaagccagaaacacatccctgtctccaaatttgttggctaagtggagacacttctgagaactgactagagaagacagaaaaatagcccgatgtaggtttcggtgtccccatataggcccgtccacacaggcttgactgggtggacaagaatgaacccatgacagcacctgctgcttcaaaatcaaaatcaatttagggatacagcaggggctgttgggctgtgctccagagaaaaggagcagctactccttttaaatccacgatttctggattgaaaacctgtccagatgctgagttgttgggctgaacaactaggagctgaaaacaacgtagaggctggaaagtgtcccctgcattctggaggggaggggagataataaggagggctgctgggtgagggcctggagatgtggaaccctggagtggaaggttctccagtgacagtgtcctgtgactgcaaaaggggacaagaaaatccctcttcctccatgggatggatttaagctcttgctgtgtgttctacaaatgctgttattgtgggaggaaatgctaggtttttgtgtgtggactgcccagacctcagccaggtcttctggagatgacatttgaggactgatggccaaagagcatgggggactgaagccctggctgcctcagcgctctgtctcccaacaccagctggtgttgcagagggaggtcaacgtgagtttggatctcttgtacgcagatgtaatcattcacatgtaaaaataaccccacctccccaccccaaaaagggcaagagctgtggaaaatgattgccaaatgagatggctggttagagcatgattttttctaaagcatacttcatatattttcttaagattacatcaagctaattgtgcgagctcaattcactttgtaagaaaactctcggagaaataaaatcaataaaaagcaaag

SEQ ID NO: 147163 - DNA, 1206 bp, Artificial Sequence
  derived and/or modified sequence
agccctctgcaggcatttgctctgggctccaggacgaactcctcgtcagctgaaaccagacttcctggcgacagcgacggcagcgtaccctgacttctcagcctcctgcctggcagccaccccacacagcctgccccaggaggagcacatcttcactgagcagcaccccgctttcccacagtcccccaactggcacttccctgtctcagacgcccggcgcaggcccaactcaggcccggcagggggttccaaggaaatggggaccagcagcctgggcctggtggacaccacaggaggcccaggcgatgactacggggtgcttgggagcactgccaatgagacagagaagaaatcatccaggcggagaaaggagagttcagacaaccaggagaacagagggaagccggagggcagcagcaaagcccgcaaggagaggacggccttcaccaaggagcagctgcgagagctggaggcagagtttgcccatcataactacctgactcggctccgcagatatgagattgcggtaaacctggacctctctgagcgccaggtcaaagtgtggttccagaaccgaaggatgaagtggaagcgtgtgaagggaggtcagcccatctcccccaatgggcaggaccctgaggatggggactccacagcctctccaagttcagagtgagattctgcatggaggaaaaatgactaaggactgagccccctacccaactacccccaccccaatcccaccttcaccctcttccttccccagccagggcagcctctccacatctttccctgactcttggatatgaaactgcccagcattcctgggagtcttaggattttctaggaagttctgtccagcctcttagcagcctcttccctagggcctttgctcccacactctcatggaatcagacagagatcctaccgggccggatgaatctggaaacagcttcagagatactgcttctcagcgtctcttggctgccacccatgcctcctcctaccgctgttctcctaggtcagccaggcctcctcctggtctggacaccacctggcctggtgggagaggagctttggaaccagctggcgactcggaaagtaaatgcttcaaaaggaaggaaatgacagagacacacgcccttgcccaccttcctctgtaggctgcacatctgaggctttggggccccttagttgtcccgaaac

SEQ ID NO: 147164 - DNA, 765 bp, Artificial Sequence
  derived and/or modified sequence
atggaccccgccgccagcagctgcatgcggagcctgcagccccccgcaccagtttgggggtgtctgcggaacccacattcggagggaaatggggcatctgggctaccgcactatcctcctactccattctcatttcaccagaagcccgactttcttgctacggccaccgctgcctatcccgattttagcgccagttgcctggcggctactccccactccctgccacaggaagagcatatttttactgaacaacatccagcctttcctcagtcacctaactggcacttccctgtttccgatgcccgcagaaggccgaattctggccccgctggcggatctaaggaaatgggaacaagctcactcggcctggtcgatacgaccgggggacccggcgacgactacggagttctgggcagtacggccaacgagacagaaaaaaagtcttcaaggcggcgcaaggagtctagtgataatcaagaaaatagggggaagcctgaagggtctagcaaagcaaggaaggagaggactgcctttacaaaggaacagttgagggagttggaggcagagttcgcccatcataattatctcactcgcctgcgacggtacgagatcgctgtaaatctggaccttagcgaacgccaagttaaggtgtggtttcagaaccgccgaatgaagtggaagcgcgtgaagggcggacaacccatttccccaaacggtcaggaccctgaggacggggacagtacagctagcccttcctccgagtag

SEQ ID NO: 147165 - DNA, 765 bp, Artificial Sequence
  derived and/or modified sequence
atggaccctgctgcatcgtcttgtatgcgctcgttgcaacctcctgcacccgtttgggggtgtttgaggaatccccatagcgaagggaacggagcctctggactaccccactatccacccacccctttttccttccatcaaaagccagacttcttagcaacggcaacggctgcgtatcccgacttctctgcgagctgtctggcggctactccccacagcctgccccaagaggagcatatctttaccgagcagcacccagcatttccccaatcaccgaattggcattttcccgtgtccgacgctcgaagaaggcccaactcaggccctgctgggggatctaaggagatgggcacgtcctccctcggtttagtggatacaaccggtgggccaggagatgactacggcgttctggggtctacagctaacgagaccgagaaaaaatcttcccgtagaaggaaagaaagctctgacaatcaggaaaatagggggaagcctgaggggagctccaaagctcggaaggaacgcacagcgtttaccaaggagcagctgagggagctggaagccgagtttgctcatcataactacctcaccaggctccgcagatacgagattgccgtcaatctagacttaagcgagagacaggtgaaggtctggttccagaatcggagaatgaagtggaagagagttaagggcggacagccaatctcgccgaacgggcaggaccccgaagacggcgacagcacagctagcccctctagcgaatag

SEQ ID NO: 147166 - DNA, 765 bp, Artificial Sequence
  derived and/or modified sequence
atggaccccgccgccagcagctgcatgagaagcctgcagccccccgcccccgtgtggggctgcctgagaaacccccacagcgagggcaacggcgccagcggcctgccccactacccccccacccccttcagcttccaccagaagcccgacttcctggccaccgccaccgccgcctaccccgacttcagcgccagctgcctggccgccaccccccacagcctgccccaggaggagcacatcttcaccgagcagcaccccgccttcccccagagccccaactggcacttccccgtgagcgacgccagaagaagacccaacagcggccccgccggcggcagcaaggagatgggcaccagcagcctgggcctggtggacaccaccggcggccccggcgacgactacggcgtgctgggcagcaccgccaacgagaccgagaagaagagcagcagaagaagaaaggagagcagcgacaaccaggagaacagaggcaagcccgagggcagcagcaaggccagaaaggagagaaccgccttcaccaaggagcagctgagagagctggaggccgagttcgcccaccacaactacctgaccagactgagaagatacgagatcgccgtgaacctggacctgagcgagagacaggtgaaggtgtggttccagaacagaagaatgaagtggaagagagtgaagggcggccagcccatcagccccaacggccaggaccccgaggacggcgacagcaccgccagccccagcagcgagtag

SEQ ID NO: 147167 - protein, 166 aa, Artificial Sequence
  derived and/or modified sequence
MPWRGRRFRLCRRKMAVLSKEYGFVLLTGAASFIMVAHLAINVSKARKKYKVEYPIMYSTDPENGHIFNCIQRAHQNTLEVYPPFLFFLAVGGVYHPRIASGLGLAWIVGRVLYAYGYYTGEPSKRSRGALGSIALLGLVGTTVCSAFQHLGWVKSGLGSGPKCCH

SEQ ID NO: 147168 - protein, 152 aa, Artificial Sequence
  derived and/or modified sequence
MAVLSKEYGFVLLTGAASFIMVAHLAINVSKARKKYKVEYPIMYSTDPENGHIFNCIQRAHQNTLEVYPPFLFFLAVGGVYHPRIASGLGLAWIVGRVLYAYGYYTGEPSKRSRGALGSIALLGLVGTTVCSAFQHLGWVKSGLGSGPKCCH

SEQ ID NO: 147169 - DNA, 501 bp, Artificial Sequence
  derived and/or modified sequence
atgccttggcgtggcaggcgcttcaggctctgtaggcggaaaatggctgtgctttcgaaggaatacggctttgtactcctgacaggcgccgcctcttttatcatggtggcccacttggcaattaatgtgtcaaaggcacggaaaaaatacaaggtggagtatcccatcatgtatagtactgatccagaaaatggacacatattcaactgcatccagagggcacaccagaacaccctggaggtgtaccccccatttcttttttttttagctgtgggtggcgtgtatcacccaaggatagcttcagggttagggctggcgtggatagtaggccgcgtactttatgcatatggctattacactggggaacctagtaaacgaagtaggggggcactcgggtctatcgctttgctcgggcttgttggcacaaccgtgtgcagtgcgttccagcatctcgggtgggtcaagagtggcctggggtctgggcccaaatgctgccactag

SEQ ID NO: 147170 - DNA, 459 bp, Artificial Sequence
  derived and/or modified sequence
atggccgtgctgagcaaggaatacggatttgttctactcaccggggcagcgagctttattatggtggcacacttggcaatcaatgtctccaaagcacgaaagaagtataaggttgagtaccctattatgtactcaaccgatccagaaaacgggcacatttttaattgtatccagcgggctcatcagaataccctggaagtgtatccgccctttctgtttttcctggccgttggcggcgtgtatcacccgcggatcgccagcggattaggactggcctggattgtcggacgcgtgctttacgcctacggttactacactggcgaaccatctaagcgcagccgcggcgcactcggctccattgctctgctcgggttggtggggaccactgtatgttctgcattccaacatttaggctgggtgaagtcgggcctggggtccggccctaaatgttgccattag

SEQ ID NO: 147171 - DNA, 501 bp, Artificial Sequence
  derived and/or modified sequence
atgccttggcgaggccgccggtttagactatgccggagaaaaatggcggttctcagcaaagagtatggcttcgtgcttttgacaggcgctgcctctttcatcatggtagctcatctcgcaatcaatgtctctaaagccagaaaaaagtacaaggtagaatatcctatcatgtacagcacagatcctgaaaatgggcatatttttaattgcattcagcgtgcccatcaaaatacattggaggtctatcctcccttcttgttttttcttgccgtgggtggagtgtaccatccccgcatcgcatcgggtttaggtctcgcgtggatcgtaggaagagtcttgtatgcttatggttactatacgggagaaccttccaagcgatctcggggcgctctgggcagtattgccctcttgggcttagtgggcactacagtgtgctctgctttccagcacttaggctgggtgaagagcggattaggatccggtcctaaatgttgtcactag

SEQ ID NO: 147172 - DNA, 501 bp, Artificial Sequence
  derived and/or modified sequence
atgccatggcgcggccggcggttccgactgtgccgacgaaaaatggcggtcctgagcaaggaatatgggtttgtccttttgaccggcgcagccagttttattatggttgcccacctcgccatcaatgtaagtaaagcacgaaagaaatataaggttgagtacccaataatgtactctaccgaccctgaaaatggtcacattttcaactgtattcagagagctcaccaaaataccctcgaggtgtacccgccctttctgtttttcctggctgtcggcggggtgtaccacccgagaatcgcttccgggctcggccttgcatggatcgtcggccgcgtgctatatgcatatggatattatactggggagcccagtaagcggtcgaggggagccctgggatcgattgcattactgggtctggtcggcactacggtgtgtagtgccttccaacaccttggttgggtgaaaagcggactcgggtccggtcctaaatgctgccattag

SEQ ID NO: 147173 - DNA, 459 bp, Artificial Sequence
  derived and/or modified sequence
atggccgtgctgtctaaggaatatgggtttgtacttttaactggggcagctagctttatcatggtcgcccacttggctattaatgtgagcaaggcaagaaagaaatataaggttgagtaccccattatgtattcgaccgaccccgagaatggacacattttcaactgcatacaacgggctcaccagaacaccttggaagtgtatccaccctttctgttctttcttgcagtggggggagtgtatcacccccgtattgcttcagggctgggcttggcctggattgtgggaagagtgctgtacgcttatgggtactatactggtgagcccagtaagaggagcagaggtgccctgggatcaattgctttactcgggctcgtgggcaccaccgtttgctctgcttttcagcacctgggttgggtcaaatcaggcctgggatctggccctaaatgctgtcactag

SEQ ID NO: 147174 - DNA, 501 bp, Artificial Sequence
  derived and/or modified sequence
atgccgtggagaggccgccgctttagattatgcagacggaagatggctgtactcagcaaagagtatggcttcgtgctgttgactggtgccgctagcttcatcatggtagcccacttagctattaacgtttccaaggccaggaagaaatataaagtcgaatacccaatcatgtacagtactgatccagagaatgggcacatctttaactgcatccaacgggctcatcaaaataccttggaggtgtatccacctttcctgttcttccttgccgtggggggtgtgtatcacccccgcatcgcgagcggtcttggtttggcctggattgtggggagagtgctctatgcctacggctattataccggtgagccttccaaaagatcccgcggcgccctcgggtctattgctctgcttggcctggtgggcactactgtctgcagtgcatttcaacacctgggatgggtgaaatccggtcttggctccggccccaaatgttgtcactag

SEQ ID NO: 147175 - DNA, 501 bp, Artificial Sequence
  derived and/or modified sequence
atgccctggaggggccgccgcttccggctgtgcaggaggaagatggctgtgctgagcaaggagtatggctttgtgctgctgaccggggccgccagcttcatcatggtggcccacctggccatcaacgtgtccaaggccaggaagaagtacaaggtggagtaccccatcatgtacagcacagatcctgaaaatggccacatcttcaactgcatccagagggcccaccagaacaccctggaggtgtacccacccttcctgttcttcctggccgtgggcggcgtgtaccaccccagaattgccagcggcctgggcctggcctggatcgtgggccgggtgctgtatgcctacggctactacaccggggagcccagcaagaggagcagaggagccctgggcagcatcgccctgctgggcctggtgggcaccaccgtgtgcagcgccttccagcacctgggctgggtgaagagcggcctgggcagcggccccaagtgctgccactag

SEQ ID NO: 147176 - DNA, 459 bp, Artificial Sequence
  derived and/or modified sequence
atggctgtgctgagcaaggagtatggctttgtgctgctgaccggggccgccagcttcatcatggtggcccacctggccatcaacgtgtccaaggccaggaagaagtacaaggtggagtaccccatcatgtacagcacagatcctgaaaatggccacatcttcaactgcatccagagggcccaccagaacaccctggaggtgtacccacccttcctgttcttcctggccgtgggcggcgtgtaccaccccagaattgccagcggcctgggcctggcctggatcgtgggccgggtgctgtatgcctacggctactacaccggggagcccagcaagaggagcagaggagccctgggcagcatcgccctgctgggcctggtgggcaccaccgtgtgcagcgccttccagcacctgggctgggtgaagagcggcctgggcagcggccccaagtgctgccactag

SEQ ID NO: 147177 - DNA, 706 bp, Artificial Sequence
  derived and/or modified sequence
attccccgaagttgtggcttctgctgatactttccttgagagtcacgagtttacaagctacataatagcgtcgggggcaaggacaggagatgccctggaggggaaggcgcttccggctctgcagacgcaagatggctgtcctctctaaggaatatggttttgtgcttctaactggtgctgccagctttataatggtggcccacctagccatcaatgtttccaaggcccgcaagaagtacaaagtggagtatcctatcatgtacagcacggaccctgaaaatgggcacatcttcaactgcattcagcgagcccaccagaacacgttggaagtgtatcctcccttcttattttttctagctgttggaggtgtttaccacccgcgtatagcttctggcctgggcttggcctggattgttggacgagttctttatgcttatggctattacacgggagaacccagcaagcgtagtcgaggagccctggggtccatcgccctcctgggcttggtgggcacaactgtgtgctctgctttccagcatcttggttgggttaaaagtggcttgggcagtggacccaaatgctgccattaaagaattataggggtttaaaaactctcattcattttaaatgacttacctttatttccagttacattttttttctaaatataataaaaacttacctggcatcagcctcatacctaaaa

SEQ ID NO: 147178 - DNA, 717 bp, Artificial Sequence
  derived and/or modified sequence
gcagttttgttctgctccagctgttcgaaggtgatccagggacagatcttccatcctcctaacatatagttagcttccactctccaaatattccaccagcaacattgatgaatattgaagactatggactgtgagacgcaagatggctgtcctctctaaggaatatggttttgtgcttctaactggtgctgccagctttataatggtggcccacctagccatcaatgtttccaaggcccgcaagaagtacaaagtggagtatcctatcatgtacagcacggaccctgaaaatgggcacatcttcaactgcattcagcgagcccaccagaacacgttggaagtgtatcctcccttcttattttttctagctgttggaggtgtttaccacccgcgtatagcttctggcctgggcttggcctggattgttggacgagttctttatgcttatggctattacacgggagaacccagcaagcgtagtcgaggagccctggggtccatcgccctcctgggcttggtgggcacaactgtgtgctctgctttccagcatcttggttgggttaaaagtggcttgggcagtggacccaaatgctgccattaaagaattataggggtttaaaaactctcattcattttaaatgacttacctttatttccagttacattttttttctaaatataataaaaacttacctggcatcagcctcatacctaaaa

SEQ ID NO: 147179 - DNA, 680 bp, Artificial Sequence
  derived and/or modified sequence
cccacaccgcgctgcgcagttttgttctgctccagctgttcgaaggtgatccagggacaggagatgccctggaggggaaggcgcttccggctctgcagacgcaagatggctgtcctctctaaggaatatggttttgtgcttctaactggtgctgccagctttataatggtggcccacctagccatcaatgtttccaaggcccgcaagaagtacaaagtggagtatcctatcatgtacagcacggaccctgaaaatgggcacatcttcaactgcattcagcgagcccaccagaacacgttggaagtgtatcctcccttcttattttttctagctgttggaggtgtttaccacccgcgtatagcttctggcctgggcttggcctggattgttggacgagttctttatgcttatggctattacacgggagaacccagcaagcgtagtcgaggagccctggggtccatcgccctcctgggcttggtgggcacaactgtgtgctctgctttccagcatcttggttgggttaaaagtggcttgggcagtggacccaaatgctgccattaaagaattataggggtttaaaaactctcattcattttaaatgacttacctttatttccagttacattttttttctaaatataataaaaacttacctggcatcagcctcatacctaaaa

SEQ ID NO: 147180 - DNA, 613 bp, Artificial Sequence
  derived and/or modified sequence
atgccctggaggggaaggcgcttccggctctgcagacgcaagatggctgtcctctctaaggaatatggttttgtgcttctaactggtgctgccagctttataatggtggcccacctagccatcaatgtttccaaggcccgcaagaagtacaaagtggagtatcctatcatgtacagcacggaccctgaaaatgggcacatcttcaactgcattcagcgagcccaccagaacacgttggaagtgtatcctcccttcttattttttctagctgttggaggtgtttaccacccgcgtatagcttctggcctgggcttggcctggattgttggacgagttctttatgcttatggctattacacgggagaacccagcaagcgtagtcgaggagccctggggtccatcgccctcctgggcttggtgggcacaactgtgtgctctgctttccagcatcttggttgggttaaaagtggcttgggcagtggacccaaatgctgccattaaagaattataggggtttaaaaactctcattcattttaaatgacttacctttatttccagttacattttttttctaaatataataaaaacttacctggcatcagcctcatacct

SEQ ID NO: 147181 - DNA, 1015 bp, Artificial Sequence
  derived and/or modified sequence
atgcccgtgcttcgcccttacagcagagcgcctaaaaccgctacggtggctctgctggggacaaattattcacgtcccactgttctgcaaacccaatccgggaggtatgacctggctgggacagtttaggaagatggccacgaaggcacctgggggagtagatatatgtttttgagaatgagaggagtaaatcgctggacgaccatgagcaggaagaaaattaggcctccacctcccaaccagtggccctgagttggcaacttagacagcgcgcgccagcgccaggagccccgccttgggggcgtggccgcgcgctggtcggctggggcggggcctgcttctggcctcatctagccccgccccaggcgagggcgccgcacccacaccgcgctgcgcagttttgttctgctccagctgttcgaaggtgatccagacgcaagatggctgtcctctctaaggaatatggttttgtgcttctaactggtgctgccagctttataatggtggcccacctagccatcaatgtttccaaggcccgcaagaagtacaaagtggagtatcctatcatgtacagcacggaccctgaaaatgggcacatcttcaactgcattcagcgagcccaccagaacacgttggaagtgtatcctcccttcttattttttctagctgttggaggtgtttaccacccgcgtatagcttctggcctgggcttggcctggattgttggacgagttctttatgcttatggctattacacgggagaacccagcaagcgtagtcgaggagccctggggtccatcgccctcctgggcttggtgggcacaactgtgtgctctgctttccagcatcttggttgggttaaaagtggcttgggcagtggacccaaatgctgccattaaagaattataggggtttaaaaactctcattcattttaaatgacttacctttatttccagttacattttttttctaaatataataaaaacttacctggcatcagcctcatacctaaaa

SEQ ID NO: 147182 - DNA, 678 bp, Artificial Sequence
  derived and/or modified sequence
cccacaccgcgctgcgcagttttgttctgctccagctgttcgaaggtgatccaggtgagagatgccctggaggggaaggcgcttccggctctgcagacgcaagatggctgtcctctctaaggaatatggttttgtgcttctaactggtgctgccagctttataatggtggcccacctagccatcaatgtttccaaggcccgcaagaagtacaaagtggagtatcctatcatgtacagcacggaccctgaaaatgggcacatcttcaactgcattcagcgagcccaccagaacacgttggaagtgtatcctcccttcttattttttctagctgttggaggtgtttaccacccgcgtatagcttctggcctgggcttggcctggattgttggacgagttctttatgcttatggctattacacgggagaacccagcaagcgtagtcgaggagccctggggtccatcgccctcctgggcttggtgggcacaactgtgtgctctgctttccagcatcttggttgggttaaaagtggcttgggcagtggacccaaatgctgccattaaagaattataggggtttaaaaactctcattcattttaaatgacttacctttatttccagttacattttttttctaaatataataaaaacttacctggcatcagcctcatacctaaaa

SEQ ID NO: 147183 - DNA, 501 bp, Artificial Sequence
  derived and/or modified sequence
atgccctggcggggccggcggttccggctgtgccggcggaagatggccgtcctctctaaggagtatggattcgttctcttgaccggtgccgcaagcttcattatggtagcgcatctcgcaattaacgtgtctaaggcccgtaaaaagtacaaagtggagtatcccatcatgtacagcacggaccctgaaaatggtcacatcttcaactgcattcagcgtgctcatcagaacacgctggaggtgtatcctcccttcctgtttttcctggcggtgggaggcgtgtaccatccccgaattgcctcaggcctgggcttggcgtggattgtgggcagggtcctgtacgcctacggttactataccggggagcctagcaagaggtccagaggagctctaggatcaatcgccttgcttggcctagttggtacaaccgtttgctccgctttccaacacctgggctgggtgaagtctggactgggatccggccctaaatgctgccactag

SEQ ID NO: 147184 - DNA, 459 bp, Artificial Sequence
  derived and/or modified sequence
atggccgtgctgagcaaggagtacggcttcgtgctgctgaccggcgccgcctcgttcatcatggtggctcacctcgccataaacgtctcaaaggcaaggaagaagtacaaggtggagtatcctatcatgtactcgaccgacccagaaaacggtcacattttcaattgtatccagcgagcgcaccagaatacactggaagtttatcctcccttcctgttctttcttgctgttggaggtgtctatcatccccgcatagcctcagggctgggactggcctggattgtaggaagggtactgtatgcatacggatattacaccggcgaaccctccaaaagatctcgaggagctcttggtagcatagctctgttgggactcgtcggaacgaccgtgtgttctgcttttcagcatttgggttgggtgaaatcaggtctcggctcgggacccaaatgttgccattag

SEQ ID NO: 147185 - DNA, 501 bp, Artificial Sequence
  derived and/or modified sequence
atgccctggcggggccggcggttccggctgtgccggcggaagatggctgtactttcgaaggaatacggatttgtgttattgacgggagcagccagttttattatggtggcccatctagctattaacgttagcaaggctcgcaaaaaatataaagtcgaataccctattatgtattcaacagaccccgagaacggtcacatcttcaattgcatccagagggctcaccagaatacccttgaggtttacccaccgttcctgtttttcctcgcagtcggaggagtgtaccacccacgcatcgcatccgggttgggtctggcctggatagttggaagagtattgtatgcttatggctattatactggcgagcccagtaagcggagccgcggcgccttagggagcatcgcactcctgggcctggtgggtacaacagtgtgttcagcattccaacatctcggatgggtgaaatcaggccttgggagtggaccaaagtgctgtcattag

SEQ ID NO: 147186 - DNA, 501 bp, Artificial Sequence
  derived and/or modified sequence
atgccctggcggggccggcggttccggctgtgccggcggaagatggccgtgctttcaaaagaatatgggttcgtcttactgaccggagcagctagttttattatggtggctcaccttgctatcaacgtgagcaaggcaaggaaaaaatacaaggtggaatatcccattatgtactctacggaccctgagaacgggcacatttttaattgtatccagcgggcacaccagaacacactcgaggtctatcctccgtttcttttcttcttggcagtgggcggcgtctatcacccccggatcgcctccgggctcggtctggcttggatagtaggcagagtgctgtatgcttatggatactacacaggagagccgtccaagaggagtaggggggcactgggctccatcgcactactcggcctggtcggaaccacggtttgctctgctttccagcacctcggctgggtgaagtcggggctcggatcaggaccgaaatgttgtcactag

SEQ ID NO: 147187 - DNA, 459 bp, Artificial Sequence
  derived and/or modified sequence
atggccgtgctgagcaaggagtacggcttcgtgctgctgaccggcgcagcaagtttcataatggtggcccatctggctatcaatgtgtccaaagcaagaaagaagtacaaagtcgaataccccatcatgtactccacggaccccgagaacggtcacatttttaactgtattcagcgcgcacatcaaaataccctcgaggtgtacccacctttcctattcttcctagctgttgggggggtctatcacccgagaatcgctagtggactcggactggcttggattgtgggacgggtcctgtacgcctacggatattacactggtgagccctcgaaaagaagcaggggggctcttggttccattgccttgttaggccttgtaggtaccacagtgtgctccgccttccagcaccttggctgggtgaaatcaggcctaggttcaggtcctaaatgttgccactag

SEQ ID NO: 147188 - DNA, 501 bp, Artificial Sequence
  derived and/or modified sequence
atgccctggcggggccggcggttccggctgtgccggcggaagatggccgtcctgagcaaagagtacgggtttgtgctgctaacgggggcagcctcatttataatggtagcccacttggccataaacgtcagcaaagcacgcaagaagtacaaagttgagtacccgatcatgtattctactgatcctgagaatggccatatcttcaattgtattcagcgcgcccaccagaacaccctggaggtatatcctccttttctattcttcttagctgtcggtggtgtttaccacccacggattgcctccggcctgggcttggcttggatcgtgggacgggttctctatgcttatggatattatacaggtgaaccatcaaagaggtctcgcggtgccctcggtagtattgctctcttaggcctggttggcaccactgtttgttccgcttttcaacacctggggtgggttaaatcagggctgggctcaggccccaagtgctgtcactag

SEQ ID NO: 147189 - DNA, 501 bp, Artificial Sequence
  derived and/or modified sequence
atgccttggcgcggacgtagattccgactgtgtcggcgaaagatggcagtgctctccaaagaatatggtttcgtgctactaacgggggcagcaagcttcatcatggtcgcccacctggcaatcaatgtctccaaagcacgtaaaaaatataaagtggagtaccccattatgtattcaacagaccccgagaatggtcatatttttaattgtatacaacgtgcccaccaaaacacccttgaggtctatccacccttcctcttcttcctggccgtcggcggagtatatcaccccagaatcgctagtggcctggggctggcatggattgttggtagggtactgtacgcttacggttattacaccggggagccgtccaaaaggagtcgcggagctctggggtcaattgctctcctcggcttagtcgggaccaccgtgtgcagcgcatttcaacacctgggttgggtgaagagtgggcttggatccgggccaaagtgttgtcactag

SEQ ID NO: 147190 - DNA, 459 bp, Artificial Sequence
  derived and/or modified sequence
atggccgtgttgagtaaggagtatggcttcgtgctcctgacaggagccgcatcttttataatggttgcacatctcgcgattaacgtttctaaggcccgaaaaaaatataaggttgaataccctattatgtacagcaccgatccagagaacggtcacattttcaactgcatacagagggcgcatcagaatacccttgaggtgtaccccccttttctttttttcctggccgtgggaggggtgtaccacccgagaatagcgtctggccttgggttagcatggattgtggggagagtgctgtacgcttacggatactacaccggagagccctcgaagagaagcaggggcgctttaggttcaatagccttgttgggtctcgttggcacgaccgtgtgttccgcatttcagcacctggggtgggttaagtctggcctggggagcggcccaaaatgctgccattag

SEQ ID NO: 147191 - DNA, 501 bp, Artificial Sequence
  derived and/or modified sequence
atgccttggcggggacgtaggtttaggttatgccgaagaaagatggccgtcttgtccaaagagtatgggttcgtgctattgactggtgcagcttcttttattatggtagcccatctcgccattaatgtttccaaggccaggaaaaagtataaggtcgaatatcccattatgtattcaactgatccagagaacggtcacatctttaactgcatccagagagcgcatcagaacacactagaagtgtaccccccttttctgttttttctggcagttgggggagtctatcacccgcgaatcgctagtggtctcggtttggcgtggatcgtgggtagagtgctgtatgcttatgggtattacacgggagagccctccaagaggagtcgtggagccttgggaagcatcgctttattaggcttggtgggtacgacagtttgctcagccttccagcatctcggctgggttaagtctggactcggttccggtccaaaatgttgccattag

SEQ ID NO: 147192 - DNA, 501 bp, Artificial Sequence
  derived and/or modified sequence
atgccctggagaggtaggcgatttcggttatgtagacggaagatggccgtcttgtcaaaagaatatggctttgtcctgcttactggcgcagcgtcctttatcatggtggcacatctagccatcaacgtgtcaaaagccaggaaaaagtacaaagtggaatacccaattatgtactcgacagaccccgaaaacggacacatctttaattgcatccagcgggcacatcagaatacacttgaggtttaccccccatttctgttttttctcgccgtggggggtgtgtaccatccaaggatagctagtgggctaggacttgcctggatagtgggtcgagtgttgtacgcctacgggtactacaccggtgaaccatctaagcggtctcgtggcgcactcggatcaattgctctcttggggttagttggaactacagtgtgttccgcgttccagcatctgggttgggttaaatctggattgggtagcgggcctaagtgttgccactag

SEQ ID NO: 147193 - DNA, 459 bp, Artificial Sequence
  derived and/or modified sequence
atggcagtccttagcaaggaatatgggtttgtcttactgactggcgctgcatcctttataatggtggcacatctggctattaacgtgagtaaagctcggaagaagtataaagtcgagtaccctattatgtactccacagaccctgagaacggtcacatatttaactgcatccagagagcccatcagaacactctggaggtgtaccctccctttctttttttcctagctgtaggcggtgtctaccacccacggatagcatcaggcctcgggttagcctggatcgtggggagagtgctgtacgcttacggatactatacaggcgagcctagtaagcgctcaaggggcgctcttggatcaatcgccctgctgggcctggtgggtacaaccgtgtgtagcgcctttcagcatctggggtgggttaagtccggcttgggctccggtcccaaatgttgtcactag

SEQ ID NO: 147194 - DNA, 501 bp, Artificial Sequence
  derived and/or modified sequence
atgccatggcgtggacgcagattcaggttgtgccgccgtaaaatggctgtgttgtcaaaagaatatggcttcgtactcttgactggggcagcttccttcataatggtggctcatctggcaataaacgtctctaaagctagaaagaaatataaggtggagtatccaattatgtatagcacagaccctgaaaacggtcacattttcaattgcattcagcgggctcatcagaataccctcgaggtctacccacctttcctgttctttctcgccgtagggggtgtgtaccacccacgaatcgcatccggtctaggactggcatggatcgtgggaagagtgctctatgcctatgggtattacaccggggaaccctccaaaaggtctagaggggctctgggatccatcgctcttcttggtctggtgggcactaccgtgtgctccgcctttcaacacctgggatgggtaaaaagtggactcggatcaggcccaaagtgttgtcactag

SEQ ID NO: 147195 - DNA, 501 bp, Artificial Sequence
  derived and/or modified sequence
atgccctggagaggcagaagattcagactgtgcagaagaaagatggccgtgctgagcaaggagtacggcttcgtgctgctgaccggcgccgccagcttcatcatggtggcccacctggccatcaacgtgagcaaggccagaaagaagtacaaggtggagtaccccatcatgtacagcaccgaccccgagaacggccacatcttcaactgcatccagagagcccaccagaacaccctggaggtgtacccccccttcctgttcttcctggccgtgggcggcgtgtaccaccccagaatcgccagcggcctgggcctggcctggatcgtgggcagagtgctgtacgcctacggctactacaccggcgagcccagcaagagaagcagaggcgccctgggcagcatcgccctgctgggcctggtgggcaccaccgtgtgcagcgccttccagcacctgggctgggtgaagagcggcctgggcagcggccccaagtgctgccactag

SEQ ID NO: 147196 - DNA, 459 bp, Artificial Sequence
  derived and/or modified sequence
atggccgtgctgagcaaggagtacggcttcgtgctgctgaccggcgccgccagcttcatcatggtggcccacctggccatcaacgtgagcaaggccagaaagaagtacaaggtggagtaccccatcatgtacagcaccgaccccgagaacggccacatcttcaactgcatccagagagcccaccagaacaccctggaggtgtacccccccttcctgttcttcctggccgtgggcggcgtgtaccaccccagaatcgccagcggcctgggcctggcctggatcgtgggcagagtgctgtacgcctacggctactacaccggcgagcccagcaagagaagcagaggcgccctgggcagcatcgccctgctgggcctggtgggcaccaccgtgtgcagcgccttccagcacctgggctgggtgaagagcggcctgggcagcggccccaagtgctgccactag

SEQ ID NO: 147197 - protein, 138 aa, Artificial Sequence
  derived and/or modified sequence
MKDLHSDDNEEESDEVEDNDNDSEMERPVNRGGSRSRRVSLSDGSDSESSSASSPLHHEPPPPLLKTNNNQILEVKSPIKQSKSDKQIKNGECDKIVNLIEETGHFHITNTTFDFDLCSLDKTTVRKLQSYLETSGTS

SEQ ID NO: 147198 - protein, 162 aa, Artificial Sequence
  derived and/or modified sequence
MKDLHSDDNEEESDEVEDNDNDSEMERPVNRGGSRSRRVSLSDGSDSESSSASSPLHHEPPPPLLKTNNNQILEVKSPIKQSKSDKQIKNGECDKAYLDELVELHRRLMTLRERHILQQIVNLIEETGHFHITNTTFDFDLCSLDKTTVRKLQSYLETSGTS

SEQ ID NO: 147199 - protein, 568 aa, Artificial Sequence
  derived and/or modified sequence
MASSCAVQVKLELGHRAQVRKKPTVEGFTHDWMVFVRGPEHSNIQHFVEKVVFHLHESFPRPKRVCKDPPYKVEESGYAGFILPIEVYFKNKEEPRKVRFDYDLFLHLEGHPPVNHLRCEKLTFNNPTEDFRRKLLKAGGDPNRSIHTSSSSSSSSSSSSSSSSSSSSSSSSSSSSSSSSSSSSSSSSSSTSFSKPHKLMKEHKEKPSKDSREHKSAFKEPSRDHNKSSKESSKKPKENKPLKEEKIVPKMAFKEPKPMSKEPKPDSNLLTITSGQDKKAPSKRPPISDSEELSAKKRKKSSSEALFKSFSSAPPLILTCSADKKQIKDKSHVKMGKVKIESETSEKKKSTLPPFDDIVDPNDSDVEENISSKSDSEQPSPASSSSSSSSSFTPSQTRQQGPLRSIMKDLHSDDNEEESDEVEDNDNDSEMERPVNRGGSRSRRVSLSDGSDSESSSASSPLHHEPPPPLLKTNNNQILEVKSPIKQSKSDKQIKNGECDKAYLDELVELHRRLMTLRERHILQQIVNLIEETGHFHITNTTFDFDLCSLDKTTVRKLQSYLETSGTS

SEQ ID NO: 147200 - DNA, 3439 bp, Artificial Sequence
  derived and/or modified sequence
acggcgcatgctccgcaatcatcttctttaccctggagctgctgctgctgctgctgcttttgcttttggggctgagtttaataagcgagcgagcgagcaagcgagcgcggggggaaaaaggcagagaatgtccgccatctaccctccgctcctgggcgcgctctcattcatagcagcctcttcatgaattacagctgagggggggcggaggaggggggggtaccacacaacaccccagcaaacctccgggcccccaggcatggctagctcgtgtgccgtgcaggtgaagctggagctggggcaccgcgcccaggtgaggaaaaaacccaccgtggagggcttcacccacgactggatggtgttcgtacgcggtccggagcacagtaacatacagcactttgtggagaaagtcgtcttccacttgcacgaaagctttcctaggccaaaaagagtgtgcaaagatccaccttacaaagtagaagaatctgggtatgctggtttcattttgccaattgaagtttattttaaaaacaaggaagaacctaggaaagtccgctttgattatgacttattcctgcatcttgaaggccatccaccagtgaatcacctccgctgtgaaaagctaactttcaacaaccccacagaggactttaggagaaagttgctgaaggcaggaggggaccctaataggagtattcataccagcagcagcagcagcagcagcagtagcagcagcagcagcagcagcagcagcagcagtagcagcagcagcagcagcagcagcagcagcagtagcagcagcagtagcagcagcagcagcagcagtagtaccagtttttcaaagcctcacaaattaatgaaggagcacaaggaaaaaccttctaaagactccagagaacataaaagtgccttcaaagaaccttccagggatcacaacaaatcttccaaagaatcctctaagaaacccaaagaaaataaaccactgaaagaagagaaaatagttcctaagatggccttcaaggaacctaaacccatgtcaaaagagccaaaaccagatagtaacttactcaccatcaccagtggacaagataagaaggctcctagtaaaaggccgcccatttcagattctgaagaactctcagccaaaaaaaggaaaaagagtagctcagaggctttatttaaaagtttttctagcgcaccaccactgatactcacttgttctgctgacaaaaaacagataaaagataaatctcatgtcaagatgggaaaggtcaaaattgaaagtgagacatcagagaagaagaaatcaacgttaccgccatttgatgatattgtggatcccaatgattcagatgtggaggagaatatatcctctaaatctgattctgaacaacccagtcctgccagctccagctccagctccagctccagcttcacaccatcccagaccaggcaacaaggtcctttgaggtctataatgaaagatctgcattctgatgacaatgaggaggaatcagatgaagtggaggataacgacaatgactctgaaatggagaggcctgtaaatagaggaggcagccgaagtcgcagagttagcttaagtgatggcagcgatagtgaaagcagttctgcttcttcacccctacatcacgaacctccaccacccttactaaaaaccaacaacaaccagattcttgaagtgaaaagtccaataaagcaaagcaaatcagataagcaaataaagaatggtgaatgtgacaaggcatacctagatgaactggtagagcttcacagaaggttaatgacattgagagaaagacacattctgcagcagatcgtgaaccttatagaagaaactggacactttcatatcacaaacacaacatttgattttgatctttgctcgctggacaaaaccacagtccgtaaactacagagttacctggaaacatctggaacatcctgaggatataacaactggatgcatcaagaactattgtgttttttttttttggttttttttttttttggttgtgattttttgttcttgttgtttatatgaaaacactcaaaatgatgcaaccaaaagggaaaaaataaaaatcaaacaaccttcagctttatttttctttaaagccagtcatcatctcttgataaaggagaggttaaagcaaaccagcctcagcggaccactcttctctccaaggaaatccccgggaagagttagcctggatagccttgaaaacaaacaaatcaaacacaacacaagaaaactcaaagaatgtgtatggtatcatgtatctctctgtggtggttcattccacaggacgaatgcatattcaacacactgccttattacataactgatctatttattatcgcatacagatattctaagtcgttgagggaatgacaccatcagacattataagtacttggtcccgtggatgctctttcaatgcagcacccttgccatcccaagcccagtgaccttactcgtataccgtgccactttccaccaactttttccaagtcctttaactcgttgcagtctgtattttccaccttttgtttttccagttccaggacacagattatcaactggggggaccaaatagccaccttgattttcttctttgtggtctttttcctgaaagttggggcccagtccttggctgtatccatgtaatgatcttggaccatggtagaaaatgcaccaaataggatcatatgaattgctgtctagccttagtcaataaacttgtaggacttttaaacaaaagtgtacctgtaaatgtcctgaatccagcattgttgagctgtcatcaacattcttgtgtctgttttactgttacaatattaggtgaatatggaagtaaaggcattccacaggatcatcatttaaaaaaaaagaattctggtcctgttttctaaaaaaaaaaactgttgtagaaattcttaatttggatctatttattagtcagagtttcagctttcttcagctgccagtgtgttactcatctttatcctaaaaatctggaatcagagatttttgtttgttcacatatgattctcttagacacttttatatttgaaaaaattaaaatctttctttggggaaaaattcttggttattctgccataacagattatgtattaacttgtagattcagtggttcaatacctgtttagttgcttgctaatatttccagaaggatttcttgtattggtgaaagacggttggggatggggggatttttttgttcttgttgtacccttgttttgaaactagaaatctgtcctgtggcatgcaaaagaaagcaaattatttttaaaagaaaaaaaccaaagtacttttggtgtcattattccatcttctccataagtggagaaatgaaaagtaagaacagctcatcttcaaagtttttactagaaattc

SEQ ID NO: 147201 - DNA, 1707 bp, Artificial Sequence
  derived and/or modified sequence
atggccagtagctgtgccgttcaagtgaagctggaactcggccatcgtgcccaagtccggaaaaagcctactgtcgaagggtttacccatgactggatggtatttgtgcggggcccagagcactccaacattcagcacttcgtggagaaagtggtgttccaccttcacgagtcttttccacggccaaagagagtatgtaaggacccaccatacaaggttgaagagtcagggtacgcaggcttcatccttccaatagaagtgtactttaagaacaaagaggaaccgagaaaggtccgatttgactacgatctgttcttgcatttggagggtcatcctccagtgaaccatctgaggtgcgagaaactgacatttaataaccccacagaggatttcagacgcaagcttctgaaggcaggaggggaccccaaccgaagcatccatacatctagttcctcgtcctcaagctcatctagtagtagctcgtcgagtagctccagctcctcgagctcaagtagttccagcagtagctccagctcaagctcaagctcatcatcctcatcctcatcttctacttctttctcaaaaccacataagctcatgaaagaacacaaagagaaaccctctaaagactcccgtgaacacaaatcagcgttcaaagaaccttccagagaccataataagagtagcaaggaatcttctaagaagcctaaagagaacaagccacttaaagaggaaaagatcgtccccaaaatggctttcaaggaacctaagccaatgtccaaggagcccaagccagatagtaaccttttgaccattaccagtggtcaagataagaaggcaccatcaaagcgccccccaatcagcgattctgaggagctctcagccaagaaacggaaaaagagctcttctgaagctctctttaaatcctttagcagcgccccccctctgatcctgacctgctccgccgataagaagcagattaaggataagtcccacgtaaaaatggggaaggtcaaaatcgaaagcgagaccagtgagaagaaaaagtcgacgctccccccatttgatgatattgtggatcccaatgactctgatgtagaggaaaacatcagctccaagtcagatagtgagcagcccagtcccgcaagtagctctagcagtagtagttcttccttcaccccatcacagacacgtcaacagggcccgctgcgcagtattatgaaggacctccactcggatgataacgaggaggaatccgacgaggttgaggacaatgataatgatagcgaaatggagaggccagtcaatcggggtgggtcacgaagtcgccgagtgtccctaagcgacggcagcgattcagagtcatcctccgccagctcaccactgcaccacgaaccacctcctccgttacttaaaaccaacaacaaccaaattctcgaagtgaagtcacccatcaaacagtcaaagtctgataaacagataaagaatggtgaatgtgataaagcgtacctagacgaactcgtagagttacacagacgtctgatgacgctacgggagcggcacatcttgcagcagatagtgaaccttattgaagagacaggccacttccacattacaaataccacatttgacttcgacctgtgcagtctggacaaaacgactgtgagaaaactgcagtcgtatctggaaacttccggcaccagttag

SEQ ID NO: 147202 - DNA, 1707 bp, Artificial Sequence
  derived and/or modified sequence
atggccagcagctgtgctgtgcaggtgaagctggagctgggccaccgggcccaggtgaggaagaagcccaccgtggagggcttcacccatgactggatggtgtttgtgcggggccctgagcacagcaacatccagcactttgtggagaaggtggtgttccacctgcacgagagcttcccccggcccaagagggtgtgcaaggaccccccctacaaggtggaggagagcggctacgccggcttcatcctgcccatcgaggtgtacttcaagaacaaggaggagcccaggaaggtgcgctttgattatgacctcttcctgcacctggagggccacccccctgtgaaccacctgcgctgtgagaagctgaccttcaacaaccccacagaggacttccggaggaagctgctgaaggccggcggggaccccaacagaagcatccacaccagcagcagcagcagcagcagcagcagcagcagcagcagcagcagcagcagcagcagcagcagcagcagcagcagcagcagcagcagcagcagcagcagcagcagcagcagcagcagcagcagcagcaccagcttcagcaagccccacaagctgatgaaggagcacaaggagaagcccagcaaggacagccgggagcacaagagcgccttcaaggagcccagccgggaccacaacaagagcagcaaggagagcagcaagaagcccaaggagaacaagcccctgaaggaggagaagatcgtgcccaagatggccttcaaggagcccaagcccatgagcaaggagcccaagccagacagcaacctgctgaccatcaccagcggccaggacaagaaggcccccagcaagaggcctcccatcagtgacagcgaggagctgagcgccaagaagaggaagaagagcagcagcgaggccctcttcaagagcttcagcagcgccccacccctcatcctgacctgcagcgctgacaagaagcagatcaaggacaagagccacgtgaagatgggcaaggtgaagattgagagcgagaccagcgagaagaagaagagcaccctgcccccatttgatgacatcgtggaccccaatgacagtgatgtggaggagaacatcagcagcaagagtgacagcgagcagcccagccctgccagcagcagcagcagcagcagcagcagcttcacccccagccagacccggcagcagggccccctgcggagcatcatgaaggacctgcacagtgatgacaatgaggaggagagtgatgaggtggaggacaatgacaatgattctgagatggagaggcctgtgaacagaggaggcagccgcagcagaagagtgtccctgagtgatggcagtgacagcgagagcagcagcgccagcagccccctgcaccacgagcccccaccacccctgctgaagaccaacaacaaccagatcctggaggtgaagagccccatcaagcagagcaagagtgacaagcagatcaagaatggagaatgtgacaaggcctacctggatgagctggtggagctgcaccggcggctgatgaccctgcgggagcggcacatcctgcagcagatcgtgaacctgattgaggagaccggccacttccacatcaccaacaccacctttgattttgacctgtgcagcctggacaagaccaccgtgaggaagctgcagagctacctggagaccagcggcaccagctag

SEQ ID NO: 147203 - DNA, 3367 bp, Artificial Sequence
  derived and/or modified sequence
acggcgcatgctccgcaatcatcttctttaccctggagctgctgctgctgctgctgcttttgcttttggggctgagtttaataagcgagcgagcgagcaagcgagcgcggggggaaaaaggcagagaatgtccgccatctaccctccgctcctgggcgcgctctcattcatagcagcctcttcatgaattacagctgagggggggcggaggaggggggggtaccacacaacaccccagcaaacctccgggcccccaggcatggctagctcgtgtgccgtgcaggtgaagctggagctggggcaccgcgcccaggtgaggaaaaaacccaccgtggagggcttcacccacgactggatggtgttcgtacgcggtccggagcacagtaacatacagcactttgtggagaaagtcgtcttccacttgcacgaaagctttcctaggccaaaaagagtgtgcaaagatccaccttacaaagtagaagaatctgggtatgctggtttcattttgccaattgaagtttattttaaaaacaaggaagaacctaggaaagtccgctttgattatgacttattcctgcatcttgaaggccatccaccagtgaatcacctccgctgtgaaaagctaactttcaacaaccccacagaggactttaggagaaagttgctgaaggcaggaggggaccctaataggagtattcataccagcagcagcagcagcagcagcagtagcagcagcagcagcagcagcagcagcagcagtagcagcagcagcagcagcagcagcagcagcagtagcagcagcagtagcagcagcagcagcagcagtagtaccagtttttcaaagcctcacaaattaatgaaggagcacaaggaaaaaccttctaaagactccagagaacataaaagtgccttcaaagaaccttccagggatcacaacaaatcttccaaagaatcctctaagaaacccaaagaaaataaaccactgaaagaagagaaaatagttcctaagatggccttcaaggaacctaaacccatgtcaaaagagccaaaaccagatagtaacttactcaccatcaccagtggacaagataagaaggctcctagtaaaaggccgcccatttcagattctgaagaactctcagccaaaaaaaggaaaaagagtagctcagaggctttatttaaaagtttttctagcgcaccaccactgatactcacttgttctgctgacaaaaaacagataaaagataaatctcatgtcaagatgggaaaggtcaaaattgaaagtgagacatcagagaagaagaaatcaacgttaccgccatttgatgatattgtggatcccaatgattcagatgtggaggagaatatatcctctaaatctgattctgaacaacccagtcctgccagctccagctccagctccagctccagcttcacaccatcccagaccaggcaacaaggtcctttgaggtctataatgaaagatctgcattctgatgacaatgaggaggaatcagatgaagtggaggataacgacaatgactctgaaatggagaggcctgtaaatagaggaggcagccgaagtcgcagagttagcttaagtgatggcagcgatagtgaaagcagttctgcttcttcacccctacatcacgaacctccaccacccttactaaaaaccaacaacaaccagattcttgaagtgaaaagtccaataaagcaaagcaaatcagataagcaaataaagaatggtgaatgtgacaagatcgtgaaccttatagaagaaactggacactttcatatcacaaacacaacatttgattttgatctttgctcgctggacaaaaccacagtccgtaaactacagagttacctggaaacatctggaacatcctgaggatataacaactggatgcatcaagaactattgtgttttttttttttggttttttttttttttggttgtgattttttgttcttgttgtttatatgaaaacactcaaaatgatgcaaccaaaagggaaaaaataaaaatcaaacaaccttcagctttatttttctttaaagccagtcatcatctcttgataaaggagaggttaaagcaaaccagcctcagcggaccactcttctctccaaggaaatccccgggaagagttagcctggatagccttgaaaacaaacaaatcaaacacaacacaagaaaactcaaagaatgtgtatggtatcatgtatctctctgtggtggttcattccacaggacgaatgcatattcaacacactgccttattacataactgatctatttattatcgcatacagatattctaagtcgttgagggaatgacaccatcagacattataagtacttggtcccgtggatgctctttcaatgcagcacccttgccatcccaagcccagtgaccttactcgtataccgtgccactttccaccaactttttccaagtcctttaactcgttgcagtctgtattttccaccttttgtttttccagttccaggacacagattatcaactggggggaccaaatagccaccttgattttcttctttgtggtctttttcctgaaagttggggcccagtccttggctgtatccatgtaatgatcttggaccatggtagaaaatgcaccaaataggatcatatgaattgctgtctagccttagtcaataaacttgtaggacttttaaacaaaagtgtacctgtaaatgtcctgaatccagcattgttgagctgtcatcaacattcttgtgtctgttttactgttacaatattaggtgaatatggaagtaaaggcattccacaggatcatcatttaaaaaaaaagaattctggtcctgttttctaaaaaaaaaaactgttgtagaaattcttaatttggatctatttattagtcagagtttcagctttcttcagctgccagtgtgttactcatctttatcctaaaaatctggaatcagagatttttgtttgttcacatatgattctcttagacacttttatatttgaaaaaattaaaatctttctttggggaaaaattcttggttattctgccataacagattatgtattaacttgtagattcagtggttcaatacctgtttagttgcttgctaatatttccagaaggatttcttgtattggtgaaagacggttggggatggggggatttttttgttcttgttgtacccttgttttgaaactagaaatctgtcctgtggcatgcaaaagaaagcaaattatttttaaaagaaaaaaaccaaagtacttttggtgtcattattccatcttctccataagtggagaaatgaaaagtaagaacagctcatcttcaaagtttttactagaaattc

SEQ ID NO: 147204 - DNA, 6772 bp, Artificial Sequence
  derived and/or modified sequence
gaggctcggagcccgggtgtcaggcgccacggcgcatgctccgcaatcatcttctttaccctggagctgctgctgctgctgctgcttttgcttttggggctgagtttaataagcgagcgagcgagcaagcgagcgcggggggaaaaaggcagagaatgtccgccatctaccctccgctcctgggcgcgctctcattcatagcagcctcttcatgaattacagctgagggggggcggaggaggggggggtaccacacaacaccccagcaaacctccgggcccccaggcatggctagctcgtgtgccgtgcaggtgaagctggagctggggcaccgcgcccaggtgaggaaaaaacccaccgtggagggcttcacccacgactggatggtgttcgtacgcggtccggagcacagtaacatacagcactttgtggagaaagtcgtcttccacttgcacgaaagctttcctaggccaaaaagagtgtgcaaagatccaccttacaaagtagaagaatctgggtatgctggtttcattttgccaattgaagtttattttaaaaacaaggaagaacctaggaaagtccgctttgattatgacttattcctgcatcttgaaggccatccaccagtgaatcacctccgctgtgaaaagctaactttcaacaaccccacagaggactttaggagaaagttgctgaaggcaggaggggaccctaataggagtattcataccagcagcagcagcagcagcagcagtagcagcagcagcagcagcagcagcagcagcagtagcagcagcagcagcagcagcagcagcagcagtagcagcagcagtagcagcagcagcagcagcagtagtaccagtttttcaaagcctcacaaattaatgaaggagcacaaggaaaaaccttctaaagactccagagaacataaaagtgccttcaaagaaccttccagggatcacaacaaatcttccaaagaatcctctaagaaacccaaagaaaataaaccactgaaagaagagaaaatagttcctaagatggccttcaaggaacctaaacccatgtcaaaagagccaaaaccagatagtaacttactcaccatcaccagtggacaagataagaaggctcctagtaaaaggccgcccatttcagattctgaagaactctcagccaaaaaaaggaaaaagagtagctcagaggctttatttaaaagtttttctagcgcaccaccactgatactcacttgttctgctgacaaaaaacagataaaagataaatctcatgtcaagatgggaaaggtcaaaattgaaagtgagacatcagagaagaagaaatcaacgttaccgccatttgatgatattgtggatcccaatgattcagatgtggaggagaatatatcctctaaatctgattctgaacaacccagtcctgccagctccagctccagctccagctccagcttcacaccatcccagaccaggcaacaaggtcctttgaggtctataatgaaagatctgcattctgatgacaatgaggaggaatcagatgaagtggaggataacgacaatgactctgaaatggagaggcctgtaaatagaggaggcagccgaagtcgcagagttagcttaagtgatggcagcgatagtgaaagcagttctgcttcttcacccctacatcacgaacctccaccacccttactaaaaaccaacaacaaccagattcttgaagtgaaaagtccaataaagcaaagcaaatcagataagcaaataaagaatggtgaatgtgacaaggcatacctagatgaactggtagagcttcacagaaggttaatgacattgagagaaagacacattctgcagcagatcgtgaaccttatagaagaaactggacactttcatatcacaaacacaacatttgattttgatctttgctcgctggacaaaaccacagtccgtaaactacagagttacctggaaacatctggaacatcctgaggatataacaactggatgcatcaagaactattgtgttttttttttttggttttttttttttttggttgtgattttttgttcttgttgtttatatgaaaacactcaaaatgatgcaaccaaaagggaaaaaataaaaatcaaacaaccttcagctttatttttctttaaagccagtcatcatctcttgataaaggagaggttaaagcaaaccagcctcagcggaccactcttctctccaaggaaatccccgggaagagttagcctggatagccttgaaaacaaacaaatcaaacacaacacaagaaaactcaaagaatgtgtatggtatcatgtatctctctgtggtggttcattccacaggacgaatgcatattcaacacactgccttattacataactgatctatttattatcgcatacagatattctaagtcgttgagggaatgacaccatcagacattataagtacttggtcccgtggatgctctttcaatgcagcacccttgccatcccaagcccagtgaccttactcgtataccgtgccactttccaccaactttttccaagtcctttaactcgttgcagtctgtattttccaccttttgtttttccagttccaggacacagattatcaactggggggaccaaatagccaccttgattttcttctttgtggtctttttcctgaaagttggggcccagtccttggctgtatccatgtaatgatcttggaccatggtagaaaatgcaccaaataggatcatatgaattgctgtctagccttagtcaataaacttgtaggacttttaaacaaaagtgtacctgtaaatgtcctgaatccagcattgttgagctgtcatcaacattcttgtgtctgttttactgttacaatattaggtgaatatggaagtaaaggcattccacaggatcatcatttaaaaaaaaagaattctggtcctgttttctaaaaaaaaaaactgttgtagaaattcttaatttggatctatttattagtcagagtttcagctttcttcagctgccagtgtgttactcatctttatcctaaaaatctggaatcagagatttttgtttgttcacatatgattctcttagacacttttatatttgaaaaaattaaaatctttctttggggaaaaattcttggttattctgccataacagattatgtattaacttgtagattcagtggttcaatacctgtttagttgcttgctaatatttccagaaggatttcttgtattggtgaaagacggttggggatggggggatttttttgttcttgttgtacccttgttttgaaactagaaatctgtcctgtggcatgcaaaagaaagcaaattatttttaaaagaaaaaaaccaaagtacttttggtgtcattattccatcttctccataagtggagaaatgaaaagtaagaacagctcatcttcaaagtttttactagaaattcagccgaaaagaagagaaatgaagaaatacttctggatccaaaggttcgtcactggatcagccttaagaaagtctctatgtgtgctaatagaccagtatctcccttgtttgttcccatgccagatgctgtcttttcatacagagattaactagtgtctgtacagaaaatggtctttccagacccattcttttgggcagttatataaatgcagattgataatggagttatttctgcattttaaaaaggggattttttacactgtttctttctatccaaagaaactatttttcctttaaaaaattataatacagccatgctccttgtaaattatttctctgaagcgtcctcccagaggacaagtgtactttctcaataatgttatgattcttaatgacgattggcatgaaccgtacttgaagcatttgttgtattgtccacttcttgatgtgcagagaaactttgagtcattttggacattaggtgattgatgaattgtgtggtttcagttgcgttttgtttttaactttatagctggaaggggagggtaatgtttatatggaaatgttgcaaatttttaaaatattttaaaatttctaactgctaacacatattctgatcaagccagaagtttatgtgatttaatatatctgtgtagtttaactagaaacgtatatatgtagtttgggccatttttatttctgtaactaaattgtggggcaaaaaatatgatttgccaatgtaaaaattttttcctttaagttactaaccaagaagctaggtaagataagaaatgaccaaacaaaaataatgataagaaggacagctattatatgataaactttagacttgaaaattaggtaataaagttaatttcttcagaatatcctaaaatgtaagtttgtaaattgataaagttcagaaaaacttatccatcttctactcatcaagatagcaaagtaagtttttcacaaaattaagactgagagttacgttattttttttgaagtggtaatcttgctctcatctaatttttaaatacagaaataaaaagatccctttgaattaatttcaagtagttttaatacctctcttaaagtaaccccttcagttctgtcacatttatatacacccaactttgaagcctattaagaatatctttgacatgtgagtaccctaacagtggctctggtttcttaagcacaaagggaaaatggcagggtttaatttctttggtgtacatatataaatagatgtttcaaataaaattaattgggtaaatgtgaatatggtttgaaccagccagagtatgataaacttttaaaaaatttttcctcagtgatcagccaggggaaaaaatatatgtacagagctcctgcccctctgcccccttataacttagcttttgcctctggttttgcagcaggatgtgtgttggtgggtttggggttccttctgtcttcggatgtaacagtcatgttagcaacaatattttgcagttacttcaccatcctcagcataatctgcctctctctcaatcttaatacagacaaataggtatgtctataaatgcgttcatatagtgtcaaggtagggaagactataaaaacttcagatcaggaaaaaaatatctcttaagagagtgtcttaaacattttaaattgctaggcaatttaaatctctctaatctgaatattcaccttttggtggaaagagccagtaatattggttttcttccactaaaaagtttcttcaaaatttttttttttttttttttttttttttttttgccgatatcttttacaggcccacctaatctttaaaaaaaagagaagaaacaattttaggcctgtataacatcctatttactacttcaagctccacaaatgtagttaatatatttgtttaagagagactttactcttaaatgttttaactttgcctacttaatggagttggatgtccagtgttggaaacagtcagtgtctgtttggtggctcgtgtttatttttgtcactgtagaagtgatctgctctggagtaatttgctgtatgcttattactttccacctttagcgttttgtgtactaatgctatgtactgctcctatatttatatatacatatatatatatatatacacatatatattatcagagtaatcttgctttggactgttgctctaaaactatgaatatgatgtagagactactacagctgcagtgaatgttaaggagtcaattcccatggtttagtttagtctcgggctggaagtctacatcttttgacctcttttgttttatatgatgctttttattatgtaggcactgccatccctgaatattccttgtaaagatgcagtgaagaagtcaatttaaaaggaagacaaagccaccgctgtctgtaaactgtaaatgtgtattttggcacttgtactccagtattctgaaaatagagttatgatggaaatgctgacagatccttaatggtggccagagctaccatgcagtgcaaaaataaattaagtgaaaatgtattattgagattaacagtgcaaggccaatacattttataaatctgtcagtatctttttaatggactgtgtatgtgtagttatgttgaaagatacattgtgtatgtgtacatgcttttgtgtgaattcaaggcacactgtaagatgtatttcccttctctaaaatccatgttgaaatgtaagtacagattgatagaaataggtgttttacttaaactcatataatctgtttcagcaccttttttaaaatgtataattgtactgatttgctgagagtcatttgaccaaagtttggctttattttgcatacaggaaaaattagcccctagccttttctcaagaagtgatgctgtttctaaagaagaatagatggggagatctgagacatccagagagaggacaatgtgtccaaaaccagctgaaggcagagagtccatgcctcattcattttaggagtccctcatgtctaacaccatcttctgtgtcctaaagccagtatatatataatatttttaaaactctgcaaagattggaacaagaagtggtgggatacattttttggcataaactgggctatgtgtgcccggtattttttctttcccccctatttctttggagggttttgttcagaaacaatgtgctatagccagagagagtcgatcttacaaagtccctgcatttactttcacagcaagaactgctaccttgattagacaggaaggagaacaactactacaacaaagagaataaaatacattcagtttggtaaataaccaa

SEQ ID NO: 147205 - DNA, 1707 bp, Artificial Sequence
  derived and/or modified sequence
atggccagcagctgcgccgtgcaggtgaagctggagctgggccaccgtgctcaagtgagaaagaaaccaacagttgagggattcacccatgactggatggtgtttgtgagggggccagagcatagtaacatccagcacttcgtggaaaaggttgtgtttcacctgcatgagtctttccctcggcccaagagggtttgcaaagatcctccatataaggtggaagagagcgggtacgccggctttattctcccaatagaagtatatttcaaaaataaagaggaacccagaaaggtgcgcttcgattacgacttgtttctgcatcttgaggggcacccccccgtgaatcatctgaggtgcgagaagttgaccttcaacaaccccacagaggactttcgacgaaagcttcttaaggcgggcggagatcccaatcggtctatacatacgtcctcctccagttcctctagctcctcttctagttcaagcagtagcagctcttcttcatcctcatcatctagttcttcctcctcttccagcagcagctcctctagtagctcatcatccagtagttctacctcattctccaaacctcacaagctcatgaaggaacataaggagaaaccttcaaaggacagcagggagcataagtcagcctttaaggaaccatcccgagatcataataaatctagcaaggaaagctctaagaagccaaaggagaacaaaccactgaaagaggagaaaatcgtgcctaaaatggcattcaaagagccaaagccaatgagtaaagaaccaaaaccggacagtaatctgctgaccatcacgtctggtcaggataagaaagcaccttccaaacgaccccctatttccgactccgaagaattgtctgccaaaaagcgcaaaaagtcctcctccgaggctctttttaagtcattttcctccgctcctcccctaattctcacatgtagcgcagataagaaacagataaaggataaatcccacgtcaaaatggggaaagtgaaaatcgagagtgagacatccgagaagaaaaaaagtaccctgccccctttcgacgatatcgtggatccgaatgacagcgacgttgaagagaatatctccagtaagtctgacagcgagcagcctagccctgcctcaagttcatcttcatcttcgtcctcgttcacaccatctcagacccgccaacagggcccactgagaagcatcatgaaggatctccacagtgatgacaatgaagaagagtcagatgaagtggaggacaacgataatgattctgaaatggagcgacccgtcaatagaggaggttctcgcagtcgccgggtttccctgtctgacggcagtgactccgagagcagttcagctagctcccctctccaccacgagccaccacccccactgttgaaaacaaacaataaccagatactggaggtgaagagccctattaaacaatctaagtccgacaaacagatcaaaaatggagaatgcgacaaggcctatttagacgaattggtagaactccacaggaggttgatgacactcagggagcgccacattctgcagcaaattgtcaacctcatcgaagagacaggacattttcacatcacaaataccacctttgatttcgatctgtgttccttggataagaccactgtaaggaaactccagagttatcttgagacctcaggcacaagctag

SEQ ID NO: 147206 - DNA, 1707 bp, Artificial Sequence
  derived and/or modified sequence
atggccagtagttgtgccgtgcaggttaaacttgagctgggtcacagagctcaggtaagaaagaagcccacggtcgagggcttcacgcacgattggatggtctttgtgcggggacccgagcactccaacattcaacattttgtcgagaaagtggtgtttcacctccatgagtctttccccagaccaaaacgtgtgtgcaaggatccgccttataaagtcgaggaatctgggtatgccggattcatcctccctattgaggtttactttaagaataaagaagagccgaggaaggtgcgctttgactatgacctgtttcttcatttagagggtcacccacctgtgaatcacctccgctgcgaaaaactgacttttaacaaccctaccgaagactttcgaagaaaactactgaaggctgggggtgatccaaaccgtagcatccacacgtctagttcaagctcgtcttccagctctagctctagcagttcatcatcaagctccagctcaagttcgtccagtagtagtagttctagcagcagctcaagctcatcttccagcagcagctcctcctcaacaagcttttccaagccccataaactcatgaaggagcacaaggagaaacctagcaaggactctagagagcacaaaagcgcctttaaagaacctagccgcgatcataataagagttctaaagaatccagtaaaaagccaaaggaaaacaagcccctgaaggaggagaagattgttcctaaaatggcctttaaagagcccaaacccatgagtaaggaacctaagcccgactcaaacctgctcacaatcacatccggccaggacaagaaagcgcctagcaagcgcccacccatatcggactcagaggagttgagcgccaagaagcgtaagaaaagttcgtccgaggcactgttcaagagtttctcatccgcgccacctctgattctgacctgtagcgcagataaaaaacagattaaggataaatcgcatgtgaaaatggggaaagtaaaaattgaatccgaaacttcagagaaaaaaaaaagtacactgcctccatttgacgatattgtggatcctaatgactctgatgtggaggagaacatcagcagtaagtcagattctgaacagccatctccagcttcatcctcatcctcctcttcatctagcttcacaccaagccagacgagacagcaaggccctctgcggtctataatgaaagacctccattccgatgacaatgaagaagagagtgatgaagtcgaggacaacgacaatgactctgaaatggagaggccagtgaacagggggggttcgagatctaggcgagtgtcacttagcgatggctctgacagtgaaagcagttctgctagtagtcccctgcatcatgaaccacctcccccactactgaagaccaataataatcagatcctggaggtgaagagtccaattaagcagtctaagtccgacaagcagataaagaacggtgagtgcgacaaagcttacctggatgagctggtggaattacatcggcgtctgatgacactgcgggagagacacatcttacagcagattgtgaacctgatagaggagaccgggcatttccatattaccaatacgacatttgacttcgacttgtgctccctagacaagactactgtgcggaaactccaaagctatctcgaaacctccggaacatcgtag

SEQ ID NO: 147207 - DNA, 1707 bp, Artificial Sequence
  derived and/or modified sequence
atggccagcagctgcgccgtgcaggtgaagctggagctgggccacagagcccaggtgagaaagaagcccaccgtggagggcttcacccacgactggatggtgttcgtgagaggccccgagcacagcaacatccagcacttcgtggagaaggtggtgttccacctgcacgagagcttccccagacccaagagagtgtgcaaggaccccccctacaaggtggaggagagcggctacgccggcttcatcctgcccatcgaggtgtacttcaagaacaaggaggagcccagaaaggtgagattcgactacgacctgttcctgcacctggagggccacccccccgtgaaccacctgagatgcgagaagctgaccttcaacaaccccaccgaggacttcagaagaaagctgctgaaggccggcggcgaccccaacagaagcatccacaccagcagcagcagcagcagcagcagcagcagcagcagcagcagcagcagcagcagcagcagcagcagcagcagcagcagcagcagcagcagcagcagcagcagcagcagcagcagcagcagcagcagcaccagcttcagcaagccccacaagctgatgaaggagcacaaggagaagcccagcaaggacagcagagagcacaagagcgccttcaaggagcccagcagagaccacaacaagagcagcaaggagagcagcaagaagcccaaggagaacaagcccctgaaggaggagaagatcgtgcccaagatggccttcaaggagcccaagcccatgagcaaggagcccaagcccgacagcaacctgctgaccatcaccagcggccaggacaagaaggcccccagcaagagaccccccatcagcgacagcgaggagctgagcgccaagaagagaaagaagagcagcagcgaggccctgttcaagagcttcagcagcgccccccccctgatcctgacctgcagcgccgacaagaagcagatcaaggacaagagccacgtgaagatgggcaaggtgaagatcgagagcgagaccagcgagaagaagaagagcaccctgccccccttcgacgacatcgtggaccccaacgacagcgacgtggaggagaacatcagcagcaagagcgacagcgagcagcccagccccgccagcagcagcagcagcagcagcagcagcttcacccccagccagaccagacagcagggccccctgagaagcatcatgaaggacctgcacagcgacgacaacgaggaggagagcgacgaggtggaggacaacgacaacgacagcgagatggagagacccgtgaacagaggcggcagcagaagcagaagagtgagcctgagcgacggcagcgacagcgagagcagcagcgccagcagccccctgcaccacgagccccccccccccctgctgaagaccaacaacaaccagatcctggaggtgaagagccccatcaagcagagcaagagcgacaagcagatcaagaacggcgagtgcgacaaggcctacctggacgagctggtggagctgcacagaagactgatgaccctgagagagagacacatcctgcagcagatcgtgaacctgatcgaggagaccggccacttccacatcaccaacaccaccttcgacttcgacctgtgcagcctggacaagaccaccgtgagaaagctgcagagctacctggagaccagcggcaccagctag

SEQ ID NO: 147208 - protein, 660 aa, Artificial Sequence
  derived and/or modified sequence
MEALMARGALTGPLRALCLLGCLLSHAAAAPSPIIKFPGDVAPKTDKELAVQYLNTFYGCPKESCNLFVLKDTLKKMQKFFGLPQTGDLDQNTIETMRKPRCGNPDVANYNFFPRKPKWDKNQITYRIIGYTPDLDPETVDDAFARAFQVWSDVTPLRFSRIHDGEADIMINFGRWEHGDGYPFDGKDGLLAHAFAPGTGVGGDSHFDDDELWTLGEGQVVRVKYGNADGEYCKFPFLFNGKEYNSCTDTGRSDGFLWCSTTYNFEKDGKYGFCPHEALFTMGGNAEGQPCKFPFRFQGTSYDSCTTEGRTDGYRWCGTTEDYDRDKKYGFCPETAMSTVGGNSEGAPCVFPFTFLGNKYESCTSAGRSDGKMWCATTANYDDDRKWGFCPDQGYSLFLVAAHEFGHAMGLEHSQDPGALMAPIYTYTKNFRLSQDDIKGIQELYGASPDIDLGTGPTPTLGPVTPEICKQDIVFDGIAQIRGEIFFFKDRFIWRTVTPRDKPMGPLLVATFWPELPEKIDAVYEAPQEEKAVFFAGNEYWIYSASTLERGYPKPLTSLGLPPDVQRVDAAFNWSKNKKTYIFAGDKFWRYNEVKKKMDPGFPKLIADAWNAIPDNLDAVVDLQGGGHSYFFKGAYYLKLENQSLKSVKFGSIKSDWLGC

SEQ ID NO: 147209 - protein, 610 aa, Artificial Sequence
  derived and/or modified sequence
MQYLNTFYGCPKESCNLFVLKDTLKKMQKFFGLPQTGDLDQNTIETMRKPRCGNPDVANYNFFPRKPKWDKNQITYRIIGYTPDLDPETVDDAFARAFQVWSDVTPLRFSRIHDGEADIMINFGRWEHGDGYPFDGKDGLLAHAFAPGTGVGGDSHFDDDELWTLGEGQVVRVKYGNADGEYCKFPFLFNGKEYNSCTDTGRSDGFLWCSTTYNFEKDGKYGFCPHEALFTMGGNAEGQPCKFPFRFQGTSYDSCTTEGRTDGYRWCGTTEDYDRDKKYGFCPETAMSTVGGNSEGAPCVFPFTFLGNKYESCTSAGRSDGKMWCATTANYDDDRKWGFCPDQGYSLFLVAAHEFGHAMGLEHSQDPGALMAPIYTYTKNFRLSQDDIKGIQELYGASPDIDLGTGPTPTLGPVTPEICKQDIVFDGIAQIRGEIFFFKDRFIWRTVTPRDKPMGPLLVATFWPELPEKIDAVYEAPQEEKAVFFAGNEYWIYSASTLERGYPKPLTSLGLPPDVQRVDAAFNWSKNKKTYIFAGDKFWRYNEVKKKMDPGFPKLIADAWNAIPDNLDAVVDLQGGGHSYFFKGAYYLKLENQSLKSVKFGSIKSDWLGC

SEQ ID NO: 147210 - protein, 584 aa, Artificial Sequence
  derived and/or modified sequence
MQKFFGLPQTGDLDQNTIETMRKPRCGNPDVANYNFFPRKPKWDKNQITYRIIGYTPDLDPETVDDAFARAFQVWSDVTPLRFSRIHDGEADIMINFGRWEHGDGYPFDGKDGLLAHAFAPGTGVGGDSHFDDDELWTLGEGQVVRVKYGNADGEYCKFPFLFNGKEYNSCTDTGRSDGFLWCSTTYNFEKDGKYGFCPHEALFTMGGNAEGQPCKFPFRFQGTSYDSCTTEGRTDGYRWCGTTEDYDRDKKYGFCPETAMSTVGGNSEGAPCVFPFTFLGNKYESCTSAGRSDGKMWCATTANYDDDRKWGFCPDQGYSLFLVAAHEFGHAMGLEHSQDPGALMAPIYTYTKNFRLSQDDIKGIQELYGASPDIDLGTGPTPTLGPVTPEICKQDIVFDGIAQIRGEIFFFKDRFIWRTVTPRDKPMGPLLVATFWPELPEKIDAVYEAPQEEKAVFFAGNEYWIYSASTLERGYPKPLTSLGLPPDVQRVDAAFNWSKNKKTYIFAGDKFWRYNEVKKKMDPGFPKLIADAWNAIPDNLDAVVDLQGGGHSYFFKGAYYLKLENQSLKSVKFGSIKSDWLGC

SEQ ID NO: 147211 - DNA, 3741 bp, Artificial Sequence
  derived and/or modified sequence
tggggtgacgaggtcgtgcactgagggtggacgtagaggccaggagtagcaggcggccggggaaaagaggtggagaaaggaaaaaagaggagaaaagtggaggagggcgagtaggggggtggggcagagaggggcgggcccgagtgcgccccccgcccccagccccgctctgccagctccctcccagcccagccggctacatctggcggctgccctcccttgtttccgctgcatccagacttcctcaggcggtggctggaggctgcgcatctggggctttaaacatacaaagggattgccaggacctgcggcggcggcggcggcggcgggggctggggcgcgggggccggaccatgagccgctgagccgggcaaaccccaggccaccgagccagcggaccctcggagcgcagccctgcgccgcggagcaggctccaaccaggcggcgaggcggccacacgcaccgagccagcgacccccgggcgacgcgcggggccagggagcgctacgatggaggcgctaatggcccggggcgcgctcacgggtcccctgagggcgctctgtctcctgggctgcctgctgagccacgccgccgccgcgccgtcgcccatcatcaagttccccggcgatgtcgcccccaaaacggacaaagagttggcagtgcaatacctgaacaccttctatggctgccccaaggagagctgcaacctgtttgtgctgaaggacacactaaagaagatgcagaagttctttggactgccccagacaggtgatcttgaccagaataccatcgagaccatgcggaagccacgctgcggcaacccagatgtggccaactacaacttcttccctcgcaagcccaagtgggacaagaaccagatcacatacaggatcattggctacacacctgatctggacccagagacagtggatgatgcctttgctcgtgccttccaagtctggagcgatgtgaccccactgcggttttctcgaatccatgatggagaggcagacatcatgatcaactttggccgctgggagcatggcgatggatacccctttgacggtaaggacggactcctggctcatgccttcgccccaggcactggtgttgggggagactcccattttgatgacgatgagctatggaccttgggagaaggccaagtggtccgtgtgaagtatgggaacgccgatggggagtactgcaagttccccttcttgttcaatggcaaggagtacaacagctgcactgataccggccgcagcgatggcttcctctggtgctccaccacctacaactttgagaaggatggcaagtacggcttctgtccccatgaagccctgttcaccatgggcggcaacgctgaaggacagccctgcaagtttccattccgcttccagggcacatcctatgacagctgcaccactgagggccgcacggatggctaccgctggtgcggcaccactgaggactacgaccgcgacaagaagtatggcttctgccctgagaccgccatgtccactgttggtgggaactcagaaggtgccccctgtgtcttccccttcactttcctgggcaacaaatatgagagctgcaccagcgccggccgcagtgacggaaagatgtggtgtgcgaccacagccaactacgatgatgaccgcaagtggggcttctgccctgaccaagggtacagcctgttcctcgtggcagcccacgagtttggccacgccatggggctggagcactcccaagaccctggggccctgatggcacccatttacacctacaccaagaacttccgtctgtcccaggatgacatcaagggcattcaggagctctatggggcctctcctgacattgaccttggcaccggccccacccccacgctgggccctgtcactcctgagatctgcaaacaggacattgtatttgatggcatcgctcagatccgtggtgagatcttcttcttcaaggaccggttcatttggcggactgtgacgccacgtgacaagcccatggggcccctgctggtggccacattctggcctgagctcccggaaaagattgatgcggtatacgaggccccacaggaggagaaggctgtgttctttgcagggaatgaatactggatctactcagccagcaccctggagcgagggtaccccaagccactgaccagcctgggactgccccctgatgtccagcgagtggatgccgcctttaactggagcaaaaacaagaagacatacatctttgctggagacaaattctggagatacaatgaggtgaagaagaaaatggatcctggcttccccaagctcatcgcagatgcctggaatgccatccccgataacctggatgccgtcgtggacctgcagggcggcggtcacagctacttcttcaagggtgcctattacctgaagctggagaaccaaagtctgaagagcgtgaagtttggaagcatcaaatccgactggctaggctgctgagctggccctggctcccacaggcccttcctctccactgccttcgatacaccgggcctggagaactagagaaggacccggaggggcctggcagccgtgccttcagctctacagctaatcagcattctcactcctacctggtaatttaagattccagagagtggctcctcccggtgcccaagaatagatgctgactgtactcctcccaggcgccccttccccctccaatcccaccaaccctcagagccacccctaaagagatactttgatattttcaacgcagccctgctttgggctgccctggtgctgccacacttcaggctcttctcctttcacaaccttctgtggctcacagaacccttggagccaatggagactgtctcaagagggcactggtggcccgacagcctggcacagggcagtgggacagggcatggccaggtggccactccagacccctggcttttcactgctggctgccttagaacctttcttacattagcagtttgctttgtatgcactttgtttttttctttgggtcttgttttttttttccacttagaaattgcatttcctgacagaaggactcaggttgtctgaagtcactgcacagtgcatctcagcccacatagtgatggttcccctgttcactctacttagcatgtccctaccgagtctcttctccactggatggaggaaaaccaagccgtggcttcccgctcagccctccctgcccctcccttcaaccattccccatgggaaatgtcaacaagtatgaataaagacacctactgagtggccgtgtttgccatctgttttagcagagcctagacaagggccacagacccagccagaagcggaaacttaaaaagtccgaatctctgctccctgcagggcacaggtgatggtgtctgctggaaaggtcagagcttccaaagtaaacagcaagagaacctcagggagagtaagctctagtccctctgtcctgtagaaagagccctgaagaatcagcaattttgttgctttattgtggcatctgttcgaggtttgcttcctctttaagtctgtttcttcattagcaatcatatcagttttaatgctactactaacaatgaacagtaacaataatatccccctcaattaatagagtgctttctatgtgcaaggcacttttcacgtgtcacctattttaacctttccaaccacataaataaaaaaggccattattagttgaatcttattgatgaagaga

SEQ ID NO: 147212 - DNA, 1983 bp, Artificial Sequence
  derived and/or modified sequence
atggaggccctgatggccagaggcgccctgaccggccccctgagagccctgtgcctgctgggctgcctgctgagccacgccgccgccgcccccagccccatcatcaagttccccggcgacgtggcccccaagaccgacaaggagctggccgtgcagtacctgaacaccttctacggctgccccaaggagagctgcaacctgttcgtgctgaaggacaccctgaagaagatgcagaagttcttcggcctgccccagaccggcgacctggaccagaacaccatcgagaccatgagaaagcccagatgcggcaaccccgacgtggccaactacaacttcttccccagaaagcccaagtgggacaagaaccagatcacctacagaatcatcggctacacccccgacctggaccccgagaccgtggacgacgccttcgccagagccttccaggtgtggagcgacgtgacccccctgagattcagcagaatccacgacggcgaggccgacatcatgatcaacttcggcagatgggagcacggcgacggctaccccttcgacggcaaggacggcctgctggcccacgccttcgcccccggcaccggcgtgggcggcgacagccacttcgacgacgacgagctgtggaccctgggcgagggccaggtggtgagagtgaagtacggcaacgccgacggcgagtactgcaagttccccttcctgttcaacggcaaggagtacaacagctgcaccgacaccggcagaagcgacggcttcctgtggtgcagcaccacctacaacttcgagaaggacggcaagtacggcttctgcccccacgaggccctgttcaccatgggcggcaacgccgagggccagccctgcaagttccccttcagattccagggcaccagctacgacagctgcaccaccgagggcagaaccgacggctacagatggtgcggcaccaccgaggactacgacagagacaagaagtacggcttctgccccgagaccgccatgagcaccgtgggcggcaacagcgagggcgccccctgcgtgttccccttcaccttcctgggcaacaagtacgagagctgcaccagcgccggcagaagcgacggcaagatgtggtgcgccaccaccgccaactacgacgacgacagaaagtggggcttctgccccgaccagggctacagcctgttcctggtggccgcccacgagttcggccacgccatgggcctggagcacagccaggaccccggcgccctgatggcccccatctacacctacaccaagaacttcagactgagccaggacgacatcaagggcatccaggagctgtacggcgccagccccgacatcgacctgggcaccggccccacccccaccctgggccccgtgacccccgagatctgcaagcaggacatcgtgttcgacggcatcgcccagatcagaggcgagatcttcttcttcaaggacagattcatctggagaaccgtgacccccagagacaagcccatgggccccctgctggtggccaccttctggcccgagctgcccgagaagatcgacgccgtgtacgaggccccccaggaggagaaggccgtgttcttcgccggcaacgagtactggatctacagcgccagcaccctggagagaggctaccccaagcccctgaccagcctgggcctgccccccgacgtgcagagagtggacgccgccttcaactggagcaagaacaagaagacctacatcttcgccggcgacaagttctggagatacaacgaggtgaagaagaagatggaccccggcttccccaagctgatcgccgacgcctggaacgccatccccgacaacctggacgccgtggtggacctgcagggcggcggccacagctacttcttcaagggcgcctactacctgaagctggagaaccagagcctgaagagcgtgaagttcggcagcatcaagagcgactggctgggctgctag

SEQ ID NO: 147213 - DNA, 1983 bp, Artificial Sequence
  derived and/or modified sequence
atggaggcgctgatggcgcggggagcactcacaggcccgttgcgggccttatgtcttctgggatgcctcctgtcccacgccgctgcagctccctcaccaattatcaagtttcctggagacgtcgcccctaagacggataaggagttggcagtccagtacctgaataccttttatggatgtcctaaagagtcctgcaatctcttcgttctgaaggatacccttaagaagatgcagaaattcttcggcctgccacagacaggggatctggaccagaataccatagaaaccatgcgcaagcctagatgtggtaacccagacgtggctaattacaacttttttccccgaaagccaaaatgggataagaatcagattacataccgcatcatcggatatacccccgacctggaccctgagaccgttgatgatgcatttgcccgcgcgtttcaggtttggtcagacgttacacctctcagattctctaggatccacgacggagaagccgatattatgatcaacttcggcagatgggagcacggagatggttatccttttgacggtaaggatggccttctggcccacgccttcgcacctggtaccggagtgggcggggactctcacttcgatgatgatgagctctggacgctgggtgaggggcaggtggttcgggtgaagtacggcaacgccgatggtgaatactgtaaatttccattcctgtttaatggcaaggagtacaattcctgcaccgacacagggcgtagcgacggttttttatggtgctccactacatacaacttcgagaaggatggcaagtacgggttttgcccgcacgaagcccttttcacaatgggaggtaatgctgagggacaaccgtgcaaatttccttttcgcttccagggaacctcctacgatagctgtacaaccgagggcagaactgacggctaccggtggtgtggaaccactgaggactacgatagagataagaagtatggcttttgccccgagactgcgatgagcacagtggggggcaatagcgagggcgccccatgcgtgtttccttttacattcttggggaacaaatacgaaagctgtacatctgcaggccgaagtgatggcaagatgtggtgcgcaacgaccgctaactacgacgacgacagaaagtggggattttgtcccgaccaaggctattccttgttcctcgtcgctgctcatgaatttggacatgcgatgggactcgagcactcccaggaccctggtgctcttatggcacccatctatacatacaccaaaaatttccgactgtcgcaggacgacattaagggaattcaggagttgtacggtgcctccccggatatcgacctcggcacaggacccaccccaacactgggaccagtaaccccggagatctgtaaacaggacatcgtatttgacgggatcgcccagataaggggcgaaatcttcttcttcaaggacaggttcatttggcgaacagtcacacctcgggacaagcccatgggcccactcctcgtggccaccttctggccagagctccccgagaagattgatgccgtgtatgaggctccccaggaggaaaaagccgttttcttcgcaggtaacgagtactggatctatagtgcgtcaactcttgagcgtggataccctaagcctcttaccagtttaggcctcccccccgatgtgcagcgcgttgacgccgcgtttaattggagtaaaaacaaaaagacttatatatttgccggagacaaattctggagatataacgaagtaaagaaaaaaatggatcccggctttcccaaattgatcgccgacgcatggaatgcgataccggacaatctggacgccgtagttgatctccaaggaggaggtcactcttacttcttcaagggcgcctactatctgaaactcgagaatcaatcccttaaatctgtcaagttcggctctatcaaatccgattggctgggatgctag

SEQ ID NO: 147214 - DNA, 1983 bp, Artificial Sequence
  derived and/or modified sequence
atggaggccctgatggcccggggggccctgaccggccccctgcgggccctgtgcctgctgggctgcctgctgagccatgctgctgctgcccccagccccatcatcaagtttcctggagatgtggcccccaagacagacaaggagctggccgtgcagtacctgaacaccttctacggctgccccaaggagagctgcaacctgtttgtgctgaaggacaccctgaagaagatgcagaagttcttcggcctgccccagacaggagacctggaccagaacaccatcgagaccatgaggaagccccgctgtggcaacccagatgtggccaactacaacttcttccccaggaagcccaagtgggacaagaaccagatcacctaccgcatcatcggctacaccccagacctggaccctgagaccgtggatgatgcctttgcccgggccttccaggtgtggagcgatgtgacccccctgcgcttcagccgcatccatgatggagaggccgacatcatgatcaactttggccgctgggagcacggagatggctacccctttgatggcaaggatggcctgctggcccacgcctttgcccctggcactggagtgggcggggacagccactttgatgatgatgagctgtggaccctgggggagggccaggtggtgcgggtgaagtatggaaatgctgatggagagtactgcaagttccccttcctgttcaacgggaaggagtacaacagctgcacagacaccggccgcagtgatggcttcctgtggtgcagcaccacctacaactttgagaaggatggcaagtatggcttctgcccccatgaggccctcttcaccatgggcggcaatgctgagggccagccctgcaagttccccttccgcttccagggcaccagctatgacagctgcaccacagagggccgcacagatggctaccgctggtgtggcaccacagaagattatgaccgggacaagaagtatggcttctgcccagagacagccatgagcacagtgggcggcaacagcgagggcgccccctgtgtgttccccttcaccttcctgggcaacaagtatgagagctgcaccagcgctggccgcagtgatggcaagatgtggtgtgccaccacagccaactatgatgatgacaggaagtggggcttctgcccagaccagggctacagcctcttcctggtggccgcccatgaatttggacatgccatgggcctggagcacagccaggaccccggggccctgatggcccccatctacacctacaccaagaacttccggctgagccaggatgacatcaagggcatccaggagctgtatggagccagcccagacatcgacctgggcaccggccccacccccaccctgggccctgtgaccccagagatctgcaagcaggacatcgtgtttgatggcatcgcccagatccggggggagatcttcttcttcaaggaccgcttcatctggaggacagtgaccccccgggacaagcccatgggccccctgctggtggccaccttctggccagagctgcctgagaagattgatgctgtgtatgaggccccccaggaggagaaggctgtgttctttgctggaaatgagtactggatctacagcgccagcaccctggagcggggctaccccaagcccctgaccagcctgggcctgcccccagatgtgcagagggtggatgctgccttcaactggagcaagaacaagaagacctacatctttgctggggacaagttctggagatacaatgaggtgaagaagaagatggaccccggcttccccaagctgattgctgatgcctggaatgccatcccagacaacctggatgctgtggtggacctgcagggcggcggccacagctacttcttcaagggggcctactacctgaagctggagaaccagagcctgaagtctgtgaagtttggcagcatcaagagtgactggctgggctgctag

SEQ ID NO: 147215 - DNA, 1983 bp, Artificial Sequence
  derived and/or modified sequence
atggaggccctgatggcccggggcgccctgaccggccccctgcgggctctctgcctcctgggatgtctgctcagccacgccgccgctgccccaagccccattatcaagttccctggcgacgtggcgccaaaaaccgacaaggagttagccgttcagtatctcaatacattctatgggtgcccgaaagaatcctgcaaccttttcgtgttaaaggataccctgaagaagatgcaaaaatttttcggattgccacagacaggcgatctggaccaaaatacaatcgagaccatgagaaaacctcgctgtggtaatcccgacgtcgcgaattataatttcttcccgcggaaacctaaatgggacaagaatcagatcacatacagaatcatcggctacacccctgacctggatcctgaaactgtggatgacgcttttgccagagcatttcaggtgtggtcggacgttacacccctgcgattttctagaattcatgacggagaagccgatatcatgattaacttcgggcgctgggaacacggcgatggctacccctttgatggtaaagatggcctcctggcacatgcatttgcccctggcactggagtagggggtgatagccatttcgacgacgatgagctctggaccctaggcgaggggcaggttgtgagggtaaaatacggtaatgccgatggcgaatattgcaagttcccattcttgttcaacggaaaggagtacaattcttgcacggacactggacgcagcgacggcttcctgtggtgcagcacgacctataatttcgagaaggatgggaagtatggtttctgcccccacgaagccctgttcaccatgggcggcaacgcagaagggcaaccctgcaaatttcctttccgttttcaaggcaccagttacgactcctgtaccacagaaggaagaactgacggataccgctggtgtggtacaaccgaggactatgaccgtgataagaaatatggcttttgccccgagacagctatgtcaacagtgggcggtaacagcgagggagctccctgcgtgtttccctttacattcttgggtaataaatacgaatcttgtactagcgcgggcagaagcgatggtaagatgtggtgcgctactactgcgaattacgatgatgaccgcaaatgggggttttgcccggaccaggggtatagcctgttcctggttgccgcccacgagttcggacatgcaatggggctggagcacagccaggatcctggcgcattgatggctcctatttatacgtacactaaaaatttccgactcagtcaggatgacatcaaaggtatacaagagctctacggagcctctcccgacattgacctgggaactggcccgacccccacgctcgggcccgtgacccccgaaatatgcaaacaagacatcgtctttgatggcatagcccaaatccgtggtgagattttcttcttcaaagatcgtttcatatggcgtacggtaacgcctcgggataaacccatggggccacttctggtggccacattttggcctgagctgccagagaagatcgacgcagtatatgaggccccgcaggaagagaaagcagtgtttttcgccggaaatgagtactggatctactccgcttccacgttggaacgcggctatccgaagcccctaaccagtctcggccttcctccagacgtccaaagagtcgacgcagcgtttaactggagcaagaataaaaagacatacatattcgcaggggataagttttggaggtacaatgaagttaagaagaaaatggatcctggtttccctaaactgatcgccgatgcatggaatgccatcccagacaacctggacgctgtggtagacttgcagggcggcggccactcatactttttcaaaggtgcgtattatttgaagctggagaatcagtcccttaagtctgtcaaattcggctcgatcaagtccgactggctcggctgctag

SEQ ID NO: 147216 - DNA, 1983 bp, Artificial Sequence
  derived and/or modified sequence
atggaggcactcatggccaggggcgcactgactggtcctctgagggcactctgcctgctgggatgtttgctctcacacgctgcagctgcgccttcacccatcattaagtttcctggagacgtcgcacctaaaacagataaagaactggcagtgcagtatctaaatacattttatggatgtcctaaagaatcctgcaacctattcgtgctgaaggataccctgaagaagatgcagaaattttttggcctgcctcagaccggagacctggaccagaacactatcgaaaccatgcggaaaccaaggtgtggcaaccctgatgtggccaactataactttttccccagaaagccaaaatgggataagaatcagatcacatatagaattatcggctacactccagaccttgatcctgagactgtggacgacgccttcgctcgtgcatttcaggtctggtcggatgtgacacccctcagattttctcgtattcatgacggcgaggcagacatcatgatcaacttcggacgctgggaacatggcgatggttaccccttcgatggcaaggatggccttctcgcccatgccttcgcaccaggcacaggagtgggcggagactctcactttgacgacgacgagttgtggacactcggagaaggccaggtggtgagggtcaagtatgggaatgccgacggcgaatactgcaagttcccattcttgtttaacgggaaggaatataattcttgcacagacactgggaggtctgacggttttctctggtgctctactacttataatttcgaaaaggatggtaagtacggattctgtccccacgaagctctgtttacaatggggggaaatgctgaggggcagccctgtaagttccctttcagattccagggaacctcgtacgatagctgtaccactgaaggacgtaccgatgggtatcggtggtgtgggacgacagaggattacgaccgcgataagaaatacggcttctgccccgaaacagcgatgagcacagtcggcggtaattctgagggcgctccttgcgttttcccttttacatttctggggaacaagtatgaatcttgtacctctgccggaagaagtgatggtaagatgtggtgtgcaaccactgcgaattacgacgacgataggaagtgggggttttgtcctgatcagggttactcactcttcctggtcgctgcccacgagttcggccacgctatgggtctggagcacagtcaggacccaggcgctctcatggcaccaatctacacatacaccaaaaattttagactctctcaggatgacataaagggtatacaggaactgtacggagcctcgcccgacatcgatctgggcactggacccacaccaactctgggtcctgtgacgcccgaaatttgcaaacaggatatcgtgttcgatggcatagcccagatccggggagagatcttcttcttcaaggaccgtttcatctggaggacagtcacgcccagagacaagccaatgggacctctcctggtcgccactttctggccagaactgcccgaaaagatagacgcggtttacgaagcccctcaagaagaaaaggcagtgttctttgcaggtaatgaatactggatctactctgcatctactttggagaggggttatccaaagccccttactagcctgggcctccccccagatgtccagcgcgtcgatgctgccttcaactggtctaagaataaaaagacctatatattcgccggtgacaagttctggaggtacaatgaggtaaaaaaaaaaatggaccctggatttcctaagctgatcgctgatgcctggaacgcaattccagacaacttggacgccgtagttgatctgcagggcggtgggcattcctacttcttcaaaggggcttattacctaaagttggagaatcagagcctgaaaagcgtgaaatttggctctatcaaaagcgactggctgggctgttag

SEQ ID NO: 147217 - protein, 188 aa, Artificial Sequence
  derived and/or modified sequence
MSSLEISSSCFSLETKLPLSPPLVEDSAFEPSRKDMDEVEEKSKDVINFTAEKLSVDEVSQLVISPLCGAISLFVGTTRNNFEGKKVISLEYEAYLPMAENEVRKICSDIRQKWPVKHIAVFHRLGLVPVSEASIIIAVSSAHRAASLEAVSYAIDTLKAKVPIWKKEIYEESSTWKGNKECFWASNS

SEQ ID NO: 147218 - protein, 153 aa, Artificial Sequence
  derived and/or modified sequence
MSSLEISSSCFSLETKLPLSPPLVEDSAFEPSRKDMDEVEEKSKDVINFTAEKLSVDEVSQLVISPLCGAISLFVGTTRNNFEGKKVISLEYEAYLPMAENEVRKICSDIRQKWPVKHIAVFHRLGLVPVSEASIIIAVSSAHRAASLEAVSY

SEQ ID NO: 147219 - DNA, 567 bp, Artificial Sequence
  derived and/or modified sequence
atgtcttccctcgaaatatcttcatcatgtttctcattagaaaccaaacttccgcttagcccaccattagtagaggactccgcttttgaaccttcacgtaaagacatggatgaagtggaggagaagtccaaggacgtcattaacttcacagcagagaagctttcagtggacgaagtcagccagttggtcatctcccccttgtgtggcgcaataagtctcttcgtgggtacaacccggaataacttcgagggcaagaaggtgattagtctcgaatacgaagcctatttgcctatggctgaaaatgaggttcgcaagatctgtagcgacatacggcagaagtggcccgtaaagcatattgcagtcttccaccggctcgggttagtgcctgtcagcgaagctagtattatcatcgccgtgagcagcgcgcaccgcgccgccagcttagaggcagtgagctatgcgatcgacacccttaaggccaaagtgcctatctggaagaaggagatttatgaggagagtagcacgtggaaaggcaacaaggagtgcttttgggcctcaaatagctag

SEQ ID NO: 147220 - DNA, 462 bp, Artificial Sequence
  derived and/or modified sequence
atgagttccctggagatcagctcaagctgtttctcactagagacgaaattgccactcagtcctcccctagtagaggacagcgcctttgagccctcccgtaaagatatggacgaagtcgaggagaagtcaaaggatgtgataaattttaccgcagagaagctcagcgtggacgaggttagtcagctggtgatttctccactgtgtggcgccatatccctgtttgtaggcactacaagaaacaacttcgagggaaagaaggtcattagtcttgagtacgaagcgtatttacccatggcagagaacgaggtacgtaagatctgctccgacattcgacagaaatggccagtgaaacatattgcagtgtttcataggctgggactggttcccgtctccgaggcctcaataattattgctgtgtccagtgcacacagagccgcctctctggaagcagtcagctactag

SEQ ID NO: 147221 - DNA, 567 bp, Artificial Sequence
  derived and/or modified sequence
atgagcagcctggagatcagcagcagctgcttcagcctggagaccaagctgcccctgagcccccccctggtggaggacagcgcctttgagcccagcaggaaggacatggatgaggtggaggagaagagcaaggatgtgatcaacttcaccgctgagaagctgtctgtggatgaggtgtcccagctggtgatcagccccctgtgtggggccatcagcctgtttgtgggcaccaccaggaacaactttgagggcaagaaggtgatcagcctggagtatgaggcctacctgcccatggccgagaatgaggtgaggaagatctgcagcgacatccggcagaagtggcctgtgaagcacatcgctgtgttccaccggctgggcctggtgcctgtgtctgaggccagcatcatcatcgctgtgtcctctgcccacagagctgccagcctggaggccgtgtcctatgccatcgacaccctgaaggccaaggtgcccatctggaagaaggagatctatgaggagagcagcacctggaagggcaacaaggagtgcttctgggccagcaacagctag

SEQ ID NO: 147222 - DNA, 462 bp, Artificial Sequence
  derived and/or modified sequence
atgagcagcctggagatcagcagcagctgcttcagcctggagaccaagctgcccctgagcccccccctggtggaggacagcgcctttgagcccagcaggaaggacatggatgaggtggaggagaagagcaaggatgtgatcaacttcaccgctgagaagctgtctgtggatgaggtgtcccagctggtgatcagccccctgtgtggggccatcagcctgtttgtgggcaccaccaggaacaactttgagggcaagaaggtgatcagcctggagtatgaggcctacctgcccatggccgagaatgaggtgaggaagatctgcagcgacatccggcagaagtggcctgtgaagcacatcgctgtgttccaccggctgggcctggtgcctgtgtctgaggccagcatcatcatcgctgtgtcctctgcccacagagctgccagcctggaggccgtgtcctactag

SEQ ID NO: 147223 - DNA, 1781 bp, Artificial Sequence
  derived and/or modified sequence
gattcggtcccgctgtcctaggcgggatggtgccgctgtgccaggtaagggtggcgggtgtgcgtgcgggcctgggtgcggagccctcctcgacgtgtctctcccgccctttccctccacatacccagccttggtcagtcggacctccccactagcccccaacctggccggcgtcttgggttcgggggcgcccccgcccccgcccccgggcccttcctgtctccgggctttactgcgactgccccagcagaagtcgggtcctctccgagaactcttgtcagctcacggcagcaaggacggactcgttctgaaggcgcctccaccttttatgaccacctctttcccagattattcgttttgatgaagctaaaattttaatctaaaaagaaatgcacctcatggagaattcttgtgaagaactgtgcttcatctgtggatttctacacccttgatcatttgcaaacctgtaattatttcgtaaagagttgtttgcacggagtgacaggttgaagtattgtattttgcaaaaagtgctgaaataacaggagttcgttcagagaccatttctgtgcctcaagaaataaaagcgttgcagctgtggaaggagatagaaactcgacatcctggattggctgatgttagaaatcagataatatttgctgttcgtcaagaatatgtcgagcttggagatcagctcctcgtgcttcagcctggagacgaaattgccgttatcccccccattagtggaggatagtgcttttgagccatctaggaaagatatggatgaagttgaagagaaatctaaagatgttataaactttactgccgagaaactttcagtagatgaagtctcacagttggtgatttctccgctctgtggtgcaatatccctatttgtagggactacaagaaataactttgaagggaaaaaagtcattagcttagaatatgaagcatatctacccatggcggaaaatgaagtcagaaagatttgtagtgacattaggcagaaatggccagtcaaacacatagcagtgttccatagacttggcttggttccagtgtcagaagcaagcataatcattgctgtgtcctcagcccacagagctgcatctcttgaagctgtgagctatgccattgatactttaaaagccaaggtgcccatatggaaaaaggaaatatacgaagagtcatcaacttggaaaggaaacaaagagtgcttttgggcatccaacagttaatcacttatgtttttagagcatgcaatcttaactttgttaaactattattattgatcacattttgatttttttctctccacatcaggatagtttactgaagcacaatctcttatactagtgggacaaaagggagaaaaaggaagcaagataaatgggtatgtaggatgaagggttatttaaaatggaactaaagatagaaggaggactgtaggaagaaatggaataatttaaatgtgaggaaagatatctgtggtagacatgtccttccatgactaatttctaattgtaactcaacacacattgaggtatgggccctcctcagtgactttaactagctcagaaacgtactcccccaccaaccccacctcaccgccccccatcccggttctgggagagcattgttattaaggatgcatgacaggaatgttggcagaactggaaagtattaaaaaagcattatcagacagtcttgatattatacattttcagaaatatattaaaaataataaactaaaacccatgatttcaaaagtttaaaaa

SEQ ID NO: 147224 - DNA, 1347 bp, Artificial Sequence
  derived and/or modified sequence
tgcgcctttgcggccgtgattcggtcccgctgtcctaggcgggatggtgccgctgtgccaggttgaagtattgtattttgcaaaaagtgctgaaataacaggagttcgttcagagaccatttctgtgcctcaagaaataaaagcgttgcagctgtggaaggagatagaaactcgacatcctggattggctgatgttagaaatcagataatatttgctgttcgtcaagaatatgtcgagcttggagatcagctcctcgtgcttcagcctggagacgaaattgccgttatcccccccattagtggaggatagtgcttttgagccatctaggaaagatatggatgaagttgaagagaaatctaaagatgttataaactttactgccgagaaactttcagtagatgaagtctcacagttggtgatttctccgctctgtggtgcaatatccctatttgtagggactacaagaaataactttgaagggaaaaaagtcattagcttagaatatgaagcatatctacccatggcggaaaatgaagtcagaaagatttgtagtgacattaggcagaaatggccagtcaaacacatagcagtgttccatagacttggcttggttccagtgtcagaagcaagcataatcattgctgtgtcctcagcccacagagctgcatctcttgaagctgtgagctatgccattgatactttaaaagccaaggtgcccatatggaaaaaggaaatatacgaagagtcatcaacttggaaaggaaacaaagagtgcttttgggcatccaacagttaatcacttatgtttttagagcatgcaatcttaactttgttaaactattattattgatcacattttgatttttttctctccacatcaggatagtttactgaagcacaatctcttatactagtgggacaaaagggagaaaaaggaagcaagataaatgggtatgtaggatgaagggttatttaaaatggaactaaagatagaaggaggactgtaggaagaaatggaataatttaaatgtgaggaaagatatctgtggtagacatgtccttccatgactaatttctaattgtaactcaacacacattgaggtatgggccctcctcagtgactttaactagctcagaaacgtactcccccaccaaccccacctcaccgccccccatcccggttctgggagagcattgttattaaggatgcatgacaggaatgttggcagaactggaaagtattaaaaaagcattatcagacagtcttgatattatacattttcagaaatatattaaaaataataaactaaaacccatgatttcaaaagtttaaaaagagtattttc

SEQ ID NO: 147225 - DNA, 1210 bp, Artificial Sequence
  derived and/or modified sequence
cggccgtgattcggtcccgctgtcctaggcgggatggtgccgctgtgccaggttgaagtattgtattttgcaaaaagtgctgaaataacaggagttcgttcagagaccatttctgtgcctcaagaaataaaagcgttgcagctgtggaaggagatagaaactcgacatcctggattggctgatgttagaaatcagataatatttgctgttcgtcaagaatatgtcgagcttggagatcagctcctcgtgcttcagcctggagacgaaattgccgttatcccccccattagtggaggatagtgcttttgagccatctaggaaagatatggatgaagttgaagagaaatctaaagatgttataaactttactgccgagaaactttcagtagatgaagtctcacagttggtgatttctccgctctgtggtgcaatatccctatttgtagggactacaagaaataactttgaagggaaaaaagtcattagcttagaatatgaagcatatctacccatggcggaaaatgaagtcagaaagatttgtagtgacattaggcagaaatggccagtcaaacacatagcagtgttccatagacttggtagaatggtctatttttaatacctgttatgattttgttttttaggaaatatacgaagagtcatcaacttggaaaggaaacaaagagtgcttttgggcatccaacagttaatcacttatgtttttagagcatgcaatcttaactttgttaaactattattattgatcacattttgatttttttctctccacatcaggatagtttactgaagcacaatctcttatactagtgggacaaaagggagaaaaaggaagcaagataaatgggtatgtaggatgaagggttatttaaaatggaactaaagatagaaggaggactgtaggaagaaatggaataatttaaatgtgaggaaagatatctgtggtagacatgtccttccatgactaatttctaattgtaactcaacacacattgaggtatgggccctcctcagtgactttaactagctcagaaacgtactcccccaccaaccccacctcaccgccccccatcccggttctgggagagcattgttattaaggatgcatgacaggaatgttggcagaactggaaagtattaaaaaagcattatcagacagtcttgatattatacattttcagaaatatattaaaaa

SEQ ID NO: 147226 - DNA, 1406 bp, Artificial Sequence
  derived and/or modified sequence
cctaggcgggatggtgccgctgtgccaggttgaagtattgtattttgcaaaaagtgctgaaataacaggagttcgttcagagaccatttctgtgcctcaagaaataaaagcgttgcagctgtggaaggagatagaaactcgacatcctggattggctgatgttagaaatcagataatatttgctgttcgtcaagaatatgtcgagcttggagatcagctcctcgtgcttcagcctggagacgaaattgccgttatcccccccattagtggaggatagtgcttttgagccatctaggaaagatatggatgaagttgaagagaaatctaaagatgttataaactttactgccgagaaactttcagtagatgaagtctcacagttggtgatttctccgctctgtggtgcaatatccctatttgtagggactacaagaaataactttgaagggaaaaaagtcattagcttagaatatgaagcatatctacccatggcggaaaatgaagtcagaaagatttgtagtgacattaggcagaaatggccagtcaaacacatagcagtgttccatagacttggcccacagagctgcatctcttgaagctgtgagctatgccattgatactttaaaagccaaggtgcccatatggaaaaaggaaatatacgaagagtcatcaacttggaaaggaaacaaagagtgcttttgggcatccaacagttaatcacttatgtttttagagcatgcaatcttaactttgttaaactattattattgatcacattttgatttttttctctccacatcaggatagtttactgaagcacaatctcttatactagtgggacaaaagggagaaaaaggaagcaagataaatgggtatgtaggatgaagggttatttaaaatggaactaaagatagaaggaggactgtaggaagaaatggaataatttaaatgtgaggaaagatatctgtggtagacatgtccttccatgactaatttctaattgtaactcaacacacattgaggtatgggccctcctcagtgactttaactagctcagaaacgtactcccccaccaaccccacctcaccgccccccatcccggttctgggagagcattgttattaaggatgcatgacaggaatgttggcagaactggaaagtattaaaaaagcattatcagacagtcttgatattatacattttcagaaatatattaaaaataataaactaaaacccatgatttcaaaagtttaaaaagagtattttctttttttttaaattgcctaaaatagttctcattatggagatttctgggatttcagaatctataatcttaccagaaaactttttgttgttttttattagttgttaattttgtatcaatatacaaatcagcacaaaattgt

SEQ ID NO: 147227 - DNA, 707 bp, Artificial Sequence
  derived and/or modified sequence
cgcaggcggcaagtgtccaggagtctggcgtctgctcgcctgcaccacgacctccctcctggggagaaggacatgcatggttgaagtattgtattttgcaaaaagtgctgaaataacaggagttcgttcagagaccatttctgtgcctcaagaaataaaagcgttgcagctgtggaaggagatagaaactcgacatcctggattggctgatgttagaaatcagataatatttgctgttcgtcaagaatatgtcgagcttggagatcagctcctcgtgcttcagcctggagacgaaattgccgttatcccccccattagtggaggatagtgcttttgagccatctaggaaagatatggatgaagttgaagagaaatctaaagatgttataaactttactgccgagaaactttcagtagatgaagtctcacagttggtgatttctccgctctgtggtgcaatatccctatttgtagggactacaagaaataactttgaagggaaaaaagtcattagcttagaatatgaagcatatctacccatggcggaaaatgaagtcagaaagatttgtagtgacattaggcagaaatggccagtcaaacacatagcagtgttccatagacttggcttggttccagtgtcagaagcaagcataatcattgctgtgtcctcagcccacagagctgcatctcttgaagctgtgagctat

SEQ ID NO: 147228 - DNA, 567 bp, Artificial Sequence
  derived and/or modified sequence
atgagcagcctggagatcagcagcagctgcttcagcctggagaccaagctgccactctctccaccgcttgtggaggactctgcttttgaaccatccaggaaagacatggatgaagtggaagagaaatccaaagacgtgataaattttaccgcagaaaagttgtcggtggacgaagtcagccagctggttatcagccccctctgtggcgctatcagtcttttcgtggggacgactcggaataactttgagggcaagaaggtcatttccctggagtacgaagcttatctgccaatggccgaaaatgaggttcggaaaatttgttctgacatccgccagaaatggcctgttaagcacattgcagtcttccataggctaggtctggtgcccgtgtccgaggccagcatcattatcgctgtgtcaagcgctcaccgcgccgccagcttagaggcagtgtcttacgcgatcgatacgctgaaagccaaggtacctatttggaagaaggaaatctatgaagagtctagtacttggaaaggcaacaaagagtgtttttgggcaagtaacagttag

SEQ ID NO: 147229 - DNA, 462 bp, Artificial Sequence
  derived and/or modified sequence
atgagcagcctggagatcagcagcagctgcttcagcctggagaccaagttaccactgagccctcctttggtggaggatagcgcgtttgaaccctccagaaaagacatggacgaggttgaagagaaatctaaggacgtcatcaattttactgctgagaagctcagtgtcgatgaggtgagccagctggtgatctcacctttatgcggggccataagtttgttcgtagggaccacccgtaataactttgaaggcaagaaggtgatcagtttagaatacgaagcttatttaccaatggccgagaatgaagtgcggaaaatttgcagtgacataaggcagaagtggcccgtcaaacacatcgcggtgttccaccgactgggccttgtgcctgtgtctgaggccagtatcattattgcagttagctccgcccaccgcgcagcatcactcgaggccgtctcttactag

SEQ ID NO: 147230 - DNA, 567 bp, Artificial Sequence
  derived and/or modified sequence
atgtcttcactggaaatatcttcctcctgttttagcctcgagaccaaactgcccctgagcccacctctagtcgaagactcggctttcgaaccgtctaggaaggatatggatgaggtcgaagagaagtctaaagacgtaattaacttcacagcagagaagttatccgttgacgaggtctcccaattggtgatcagcccactgtgtggtgcgattagtctgttcgtgggtaccactagaaataattttgaggggaaaaaagtgatttcgttggaatatgaggcgtacctgccaatggcagagaacgaggtcagaaagatttgctctgacatacgccagaagtggccagtcaaacacattgccgtgttccatagactgggcctggtgcctgttagtgaggcgtcaatcatcatagcagtgtcctcagcacatcgggctgccagcctcgaggccgtatcatatgctatcgatactctaaaggccaaagttcctatttggaagaaggaaatttatgaggaatcatcaacctggaaaggaaacaaggagtgtttttgggcatccaattcttag

SEQ ID NO: 147231 - DNA, 462 bp, Artificial Sequence
  derived and/or modified sequence
atgagttcattagagattagctctagctgcttttcactagagacaaagcttcccctgtcgccccctcttgtggaagacagtgcatttgagcccagccgcaaagatatggacgaggtggaggagaagtctaaggatgttatcaacttcaccgccgaaaagctctctgtggatgaggtgtcacagctggtgataagccctctctgtggcgcaatatcgctgttcgttggaacaacaaggaacaattttgaaggcaaaaaagtgatatccctggagtacgaggcatacctcccaatggctgaaaacgaggtgcgtaagatctgcagtgatataagacaaaagtggcccgtaaagcacatcgcggtgttccataggctcgggctggtcccggtgtccgaagcctcaattataatcgcagtgtctagtgcccacagggccgctagcctggaagccgtgagctattag

SEQ ID NO: 147232 - DNA, 567 bp, Artificial Sequence
  derived and/or modified sequence
atgagcagcctggagatcagcagcagctgcttcagcctggagaccaagctgcccctgagcccccccctggtggaggacagcgccttcgagcccagcagaaaggacatggacgaggtggaggagaagagcaaggacgtgatcaacttcaccgccgagaagctgagcgtggacgaggtgagccagctggtgatcagccccctgtgcggcgccatcagcctgttcgtgggcaccaccagaaacaacttcgagggcaagaaggtgatcagcctggagtacgaggcctacctgcccatggccgagaacgaggtgagaaagatctgcagcgacatcagacagaagtggcccgtgaagcacatcgccgtgttccacagactgggcctggtgcccgtgagcgaggccagcatcatcatcgccgtgagcagcgcccacagagccgccagcctggaggccgtgagctacgccatcgacaccctgaaggccaaggtgcccatctggaagaaggagatctacgaggagagcagcacctggaagggcaacaaggagtgcttctgggccagcaacagctag

SEQ ID NO: 147233 - DNA, 462 bp, Artificial Sequence
  derived and/or modified sequence
atgagcagcctggagatcagcagcagctgcttcagcctggagaccaagctgcccctgagcccccccctggtggaggacagcgccttcgagcccagcagaaaggacatggacgaggtggaggagaagagcaaggacgtgatcaacttcaccgccgagaagctgagcgtggacgaggtgagccagctggtgatcagccccctgtgcggcgccatcagcctgttcgtgggcaccaccagaaacaacttcgagggcaagaaggtgatcagcctggagtacgaggcctacctgcccatggccgagaacgaggtgagaaagatctgcagcgacatcagacagaagtggcccgtgaagcacatcgccgtgttccacagactgggcctggtgcccgtgagcgaggccagcatcatcatcgccgtgagcagcgcccacagagccgccagcctggaggccgtgagctactag

SEQ ID NO: 147234 - DNA, 3531 bp, Artificial Sequence
  derived and/or modified sequence
atgaaaggtgctcgttggcgaagagtgccctgggttagtctcagttgtctttgcctatgtctcctcccccatgtcgtaccgggcatgaccactccctccctgaagacggacgggggccggcggactgctacgagccctcctccgacaacctctcagactattatctccacaattccaagcactgctatgcataccaggtcaactgccgcgccgattcccatattaccggagcggggagtgagtctgtttccttatggggcaggcgcgggtgatctggaattcgtcaggcgtacagtagatttcactagccccttgttcaagcctgctacgggattccctctcggaagtagtttgcgcgactcactctattttacggacaatgggcagatcatctttcccgagagtgactatcaaatctttagttaccctaatccactccccaccggatttacaggaagagacccggtggctttagtggcacccttctgggatgacgctgatttcagtaccgggcggggaacaacgttttatcaggagtacgagactttctatggcgagcacagcctgctggtgcagcaggccgagtcctggattaggaagatgaccaacaatgggggttataaagccagatgggccctcaaagtgacctgggtgaacgcccacgcataccccgctcagtggacacttggctcgaatacctaccaggcgattttgagcaccgatggctcgagatcttatgcgctgtttctttaccagtccgggggcatgcagtgggatgtggctcaaaggtcaggcaacccggtgcttatgggattctctagtggcgatggatatttcgaaaatagcccattgatgtctcagccagtctgggaaaggtatagaccggatcgatttctaaacagcaatagtggcttacagggactgcagttttatcgtcttcatcgggaagagcggcctaactatcgtcttgaatgcctgcaatggttgaaatcccagcccaggtggccgagctggggctggaatcaggtgtcttgcccttgctcttggcaacagggtcggagagacttaagattccagccagtgagtataggcagatggggtctgggctctcgccagttatgcagctttacttcctggagagggggcgtttgttgcagctatggaccctggggagagtttagggagggctggcatgtgcagcgcccctggcaattggcccaagagctcgagccgcaatcctggtgttgccgatggaatgacaagccctacctgtgtgccctgtaccagcagagaaggcctcacgtggggtgcgctacatatcggcccccccaacctgcttggatgtttggagatcctcatatcacgactctggacggtgtgagttatacctttaacggtttgggcgattttctcctggtgggggcccaggatggaaattctagcttccttctccagggccgaaccgcacaaactgggtctgcccaggctactaattttatagcatttgccgcccagtaccggtcttcatccctgggtccagttaccgtccagtggctcctggagcctcacgatgctatccgtgtgcttctagacaatcagacggtaacattccagcccgaccacgaggatggcggcggccaggagacatttaacgctaccggcgtgctgctttcccgaaacgggtcggaggtctcggcttcatttgacggctgggcaaccgtgagtgtgatcgcactcagcaacattctccatgcgtcggcctcattaccacccgaataccagaacagaaccgagggacttcttggcgtgtggaacaacaacccggaggacgatttccgcatgccaaacggaagcactattcctcctgggagcccggaggagatgctcttccactttgggatgacatggcaaatcaacggtacaggtctcctcgggaaacggaatgaccaactcccttctaactttactcccgtgttctactcccagttgcaaaagaactcgagttgggctgaacacttgattagtaactgtgatggagactcaagctgtatttacgataccctggcacttaggaatgctagtatcggactccataccagggaggtgtctaagaattacgagcaggcaaatgctacactcaatcaataccccccatccattaatgggggcagggtcatcgaagcctacaaaggacagactactttgatccagtatacctccaatgcagaggacgccaacttcactttgagagatagttgtaccgatcttgagttgttcgagaacgggacactgctctggacacccaaaagtctagagccctttactcttgagatcctggcaagaagcgctaagatcggcctcgcttccgccttgcagccaagaactgtcgtttgccattgtaatgccgagtctcagtgcctgtataaccaaacctctagagtaggcaatagttctctcgaagtcgcaggctgtaagtgtgatggaggaacatttggtcggtactgcgagggttccgaggatgcctgcgaggaaccatgctttccttcggtacattgtgtgcctgggaaagggtgcgaagcgtgtcccccaaatctgaccggcgacggccgacattgtgctgcactgggttctagcttcctgtgtcagaatcaatcttgcccggtgaattattgttataaccaaggacactgttatatcagccagactctcggctgtcaacccatgtgtacatgtccgcccgccttcacggatagtagatgcttcctcgccgggaataacttcagccctaccgtgaacctggagttgccactgagggtgatccagttacttctgtctgaggaggagaatgcttccatggcggaggtcaatgctagcgtggcatacaggctggggaccctggatatgcgggctttcttgcgcaatagccaagtagaacgaattgattctgctgcccccgcaagcggtagccccattcagcactggatggtgatcagcgaatttcagtaccgcccacgaggccctgttatagacttccttaacaatcaacttctggcagccgtggtggaggcatttctgtaccacgtgcctagacgcagcgaagagccaaggaatgatgtggtgttccagcccatcagcggagaggatgttcgggatgtgacagcccttaatgtgtcaactctgaaagcttatttccgctgcgacggttataagggttatgatctggtgtattccccccaatccggcttcacctgcgtgtccccctgcagccgaggttactgtgaccatggtggccagtgccagcacctcccttccgggccccggtgtagctgcgttagttttagtatctacacagcttggggggagcactgcgagcacttgtctatgaagctggacgcctttttcggcatcttcttcggggccctgggtgggcttctgctgcttggcgtcggaacatttgtggttttgcgcttctggggctgcagcggggcgcgcttttcctacttcctgaattccgcagaggcacttccctag

SEQ ID NO: 147235 - DNA, 3531 bp, Artificial Sequence
  derived and/or modified sequence
atgaagggggcccgctggaggagagtgccctgggtgtccctgagctgcctgtgcctgtgcctgctgccccacgtggtgcccggcatgaccacccccagcctgaagacagatggcggccgcaggacagccaccagccccccacccaccaccagccagaccatcatcagcaccatccccagcacagccatgcacaccaggagcacagctgcccccatccccatcctgcctgagcggggcgtgtccctcttcccctatggagctggagctggggacctggagtttgtgcggaggacagtggacttcaccagccccctcttcaagccagccaccggcttccccctgggcagcagcctgcgggacagcctgtacttcacagacaatggccagatcatcttccctgagagtgactaccagatcttctcctaccccaaccccctgcccaccggcttcaccggccgggaccctgtggccctggtggcccccttctgggatgatgctgacttcagcacaggccggggcaccaccttctaccaggagtatgagaccttctacggggagcacagcctgctggtgcagcaggccgagagctggatcaggaagatgaccaacaacggcggctacaaggcccgctgggccctgaaggtgacctgggtgaatgcccacgcctacccagcccagtggaccctgggcagcaacacctaccaggccatcctgagcacagatggcagccgctcctatgccctcttcctgtaccagagcggcggcatgcagtgggatgtggcccagaggagcggcaaccctgtgctgatgggcttcagcagtggagatggctactttgagaacagccccctgatgagccagcctgtgtgggagcgctacagaccagaccgcttcctgaacagcaacagcggcctgcagggcctgcagttctaccgcctgcaccgggaggagcggcccaactaccgcctggagtgcctgcagtggctgaagagccagccccgctggcccagctggggctggaaccaggtgtcctgcccctgctcctggcagcagggcagaagagacctgcgcttccagcctgtgtccatcggccgctggggcctgggcagccggcagctgtgcagcttcacctcctggaggggcggcgtgtgctgcagctatggcccctggggcgagttccgggagggctggcacgtgcagaggccctggcagctggcccaggagctggagccccagagctggtgctgccgctggaatgacaagccctacctgtgtgccctgtaccagcagaggcggccccacgtgggctgtgccacctaccggcccccccagcctgcctggatgtttggagacccccacatcaccaccctggatggagtgtcctacaccttcaacggcctgggggacttcctgctggtgggcgcccaggacggcaacagcagcttcctgctgcagggccgcacagcccagacaggcagcgcccaggccaccaacttcatcgcctttgctgcccagtaccgcagcagcagcctgggccctgtgacagtgcagtggctgctggagccccatgatgccatccgggtgctgctggacaaccagacagtgaccttccagcctgaccatgaagatggcggcggccaggagaccttcaatgccactggagtgctgctgagcagaaatggcagcgaggtgtctgccagctttgatggctgggccaccgtgtctgtgattgccctgagcaacatcctgcacgccagcgccagcctgcccccagagtaccagaacagaacagagggcctgctgggcgtgtggaacaacaacccagaagatgacttcaggatgcccaacggcagcaccatccccccaggcagccctgaggagatgctgttccacttcggcatgacctggcagatcaatggaacaggcctgctgggcaagagaaatgaccagctgcccagcaacttcacccctgtgttctacagccagctgcagaagaacagctcctgggccgagcacctgatcagcaactgtgatggagacagcagctgcatctatgacaccctggccctgagaaatgccagcatcggcctgcacacccgggaggtgtccaagaactatgagcaggccaatgccaccctgaaccagtacccacccagcatcaatggaggccgggtcatcgaggcctacaagggccagaccaccctcatccagtacaccagcaatgcagaagatgccaacttcaccctgcgggacagctgcacagacctggagctgtttgaaaatggcaccctgctgtggacccccaagagcctggagcccttcaccctggagatcctggcccggagcgccaagattggcctggccagcgccctgcagcccaggacagtggtgtgccactgcaatgctgagagccagtgcctgtacaaccagaccagccgggtgggcaacagcagcctggaggtggccggctgcaagtgtgatggcggcaccttcggccgctactgtgagggctctgaagatgcctgtgaggagccctgcttccccagcgtgcactgtgtgcctgggaagggctgtgaggcctgcccccccaacctgactggagatggccgccactgtgccgccctgggcagcagcttcctgtgccagaaccagagctgccctgtgaactactgctacaaccagggccactgctacatcagccagaccctgggctgccagcccatgtgcacctgccccccagccttcacagacagccgctgcttcctggccggcaacaacttcagccccaccgtgaacctggagctgcccctgcgggtcatccagctgctgctgtctgaggaggagaatgcctccatggccgaggtgaatgcctctgtggcctaccgcctgggcaccctggacatgagggccttcctgaggaacagccaggtggagagaattgacagcgctgccccagccagcggcagccccatccagcactggatggtgatcagcgagttccagtaccggccccggggccctgtgattgacttcctgaacaaccagctgctggccgctgtggtggaggccttcctgtaccacgtgccccggcgctctgaggagcccagaaatgatgtggtgttccagcccatctctggagaagatgtgagagatgtgacagccctgaatgtgtccaccctgaaggcctacttccgctgtgatggctacaagggctatgacctggtgtacagcccccagagcggcttcacctgtgtgagcccctgcagccggggctactgtgaccatggaggccagtgccagcacctgcccagcggcccccgctgcagctgtgtgtccttcagcatctacacagcctggggcgagcactgtgagcacctgtccatgaagctggatgccttcttcggcatcttcttcggggccctgggcggcctgctgctgctgggcgtgggcacctttgtggtgctgcgcttctggggctgcagcggggcccgcttctcctacttcctgaacagcgctgaggccctgccctag

SEQ ID NO: 147236 - DNA, 3982 bp, Artificial Sequence
  derived and/or modified sequence
ggagcttccccagggagccagggggacttttgccgcagccatgaagggggcacgctggaggagggtcccctgggtgtccctgagctgcctgtgtctctgcctccttccgcatgtggtcccaggaatgacaacaccgtcactgaagacagacggtgggagacgcacagccacatcaccaccccccacaacctcccagaccatcatttccaccattcccagcactgccatgcacacccgctccacagctgcccccatccccatcctgcctgagagaggagtttccctcttcccctatggggcaggcgccggggacctggagttcgtcaggaggaccgtggacttcacctccccactcttcaagccggcgactggcttcccccttggctcctctctccgtgattccctctacttcacagacaatggccagatcatcttcccagagtcagactaccagattttctcctaccccaacccactcccaacaggcttcacaggccgggaccctgtggccctggtggctccgttctgggacgatgctgacttctccactggtcgggggaccacattttatcaggaatacgagacgttctatggtgaacacagcctgctagtccagcaggccgagtcttggattagaaagatgacaaacaacgggggctacaaggccaggtgggccctaaaggtcacgtgggtcaatgcccacgcctatcctgcccagtggaccctcgggagcaacacctaccaagccatcctctccacggacgggagcaggtcctatgccctgtttctctaccagagcggtgggatgcagtgggacgtggcccagcgctcaggcaacccggtgctcatgggcttctctagtggagatggctatttcgaaaacagcccactgatgtcccagccagtgtgggagaggtatcgccctgatagattcctgaattccaactcaggcctccaagggctgcagttctacaggctacaccgggaagaaaggcccaactaccgtctcgagtgcctgcagtggctgaagagccagcctcggtggcccagctggggctggaaccaggtctcctgcccttgttcctggcagcagggacgacgggacttacgattccaacccgtcagcataggtcgctggggcctcggcagtaggcagctgtgcagcttcacctcttggcgaggaggcgtgtgctgcagctacgggccctggggagagtttcgtgaaggctggcacgtgcagcgtccttggcagttggcccaggaactggagccacagagctggtgctgccgctggaatgacaagccctacctctgtgccctgtaccagcagaggcggccccacgtgggctgtgctacatacaggcccccacagcccgcctggatgttcggggacccccacatcaccaccttggatggtgtcagttacaccttcaatgggctgggggacttcctgctggtcggggcccaagacgggaactcctccttcctgcttcagggccgcaccgcccagactggctcagcccaggccaccaacttcatcgcctttgcggctcagtaccgctccagcagcctgggccccgtcacggtccaatggctccttgagcctcacgacgcaatccgtgtcctgctggataaccagactgtgacatttcagcctgaccatgaagacggcggaggccaggagacgttcaacgccaccggagtcctcctgagccgcaacggctctgaggtctcggccagcttcgacggctgggccaccgtctcggtgatcgcgctctccaacatcctccacgcctccgccagcctcccgcccgagtaccagaaccgcacggaggggctcctgggggtctggaataacaatccagaggacgacttcaggatgcccaatggctccaccattcccccagggagccctgaggagatgcttttccactttggaatgacctggcagatcaacgggacaggcctccttggcaagaggaatgaccagctgccttccaacttcacccctgttttctactcacaactgcaaaaaaacagctcctgggctgaacatttgatctccaactgtgacggagatagctcatgcatctatgacaccctggccctgcgcaacgcaagcatcggacttcacacgagggaagtcagtaaaaactacgagcaggcgaacgccaccctcaatcagtacccgccctccatcaatggtggtcgtgtgattgaagcctacaaggggcagaccacgctgattcagtacaccagcaatgctgaggatgccaacttcacgctcagagacagctgcaccgacttggagctctttgagaatgggacgttgctgtggacacccaagtcgctggagccattcactctggagattctagcaagaagtgccaagattggcttggcatctgcactccagcccaggactgtggtctgccattgcaatgcagagagccagtgtttgtacaatcagaccagcagggtgggcaactcctccctggaggtggctggctgcaagtgtgacgggggcaccttcggccgctactgcgagggctccgaggatgcctgtgaggagccgtgcttcccgagtgtccactgcgttcctgggaagggctgcgaggcctgccctccaaacctgactggggatgggcggcactgtgcggctctggggagctctttcctgtgtcagaaccagtcctgccctgtgaattactgctacaatcaaggccactgctacatctcccagactctgggctgtcagcccatgtgcacctgccccccagccttcactgacagccgctgcttcctggctgggaacaacttcagtccaactgtcaacctagaacttcccttaagagtcatccagctcttgctcagtgaagaggaaaatgcctccatggcagaagtcaacgcctcggtggcatacagactggggaccctggacatgcgggcctttctccgcaacagccaagtggaacgaatcgattctgcagcaccggcctcgggaagccccatccaacactggatggtcatctcggagttccagtaccgccctcggggcccggtcattgacttcctgaacaaccagctgctggccgcggtggtggaggcgttcttataccacgttccacggaggagtgaggagcccaggaacgacgtggtcttccagcccatctccggggaagacgtgcgcgatgtgacagccctgaacgtgagcacgctgaaggcttacttcagatgcgatggctacaagggctacgacctggtctacagcccccagagcggcttcacctgcgtgtccccgtgcagtaggggctactgtgaccatggaggccagtgccagcacctgcccagtgggccccgctgcagctgtgtgtccttctccatctacacggcctggggcgagcactgtgagcacctgagcatgaaactcgacgcgttcttcggcatcttctttggggccctgggcggcctcttgctgctgggggtcgggacgttcgtggtcctgcgcttctggggttgctccggggccaggttctcctatttcctgaactcagctgaggccttgccttgaaggggcagctgtggcctaggctacctcaagactcacctcatccttaccgcacatttaaggcgccattgcttttgggagactggaaaagggaaggtgactgaaggctgtcaggattcttcaaggagaatgaatactgggaatcaagacaagactataccttatccataggcgcaggtgcacagggggaggccataaagatcaaacatgcatggatgggtcctcacgcagacacacccacagaaggacactagcctgtgcacgcgcgcgtgcacacacacacacacacacacgagttcataatgtggtgatggccctaagttaagcaaaatgcttctgcacacaaaactctctggtttacttcaaattaactctatttaaataaagtctctctgactttttgtgtctccaaaa

SEQ ID NO: 147237 - DNA, 3531 bp, Artificial Sequence
  derived and/or modified sequence
atgaagggcgcccggtggcggcgggtgccctgggtgagcctgagctgcctctgcttgtgcttgttaccacatgtggtacccggtatgacaactccttctctgaagactgacgggggcaggaggaccgctacctcgccaccgcctaccacctctcagaccattataagcaccattccgtccaccgccatgcatacaagaagtacagccgctccgatacctattctaccagagcgtggggttagcctgtttccttacggagcaggcgctggggatctggagtttgtgcggagaacagtggatttcacatctcccttgtttaagccagcaacaggctttcctctggggtcttcattgcgtgatagcctgtatttcaccgataacggtcagattattttccctgagagtgactaccagatcttctcctatccaaatcctctcccgaccggcttcacaggacgggatcctgtggcgctggttgcccccttctgggacgacgccgacttctctacaggtaggggaaccaccttttaccaggaatatgagacgttctatggagaacactctctcctagtacagcaggcagagagttggatcagaaaaatgacaaataacggaggttacaaggctcggtgggcgctcaaagtcacttgggtcaatgcccacgcttacccagcacagtggacacttggctccaatacttaccaagctatcctctcgacggacggaagtaggagctatgccttgtttttgtatcagagtggtggcatgcagtgggatgtcgctcaacgatctggcaatcctgttttaatggggttctcctctggcgacggatactttgaaaactcacctctgatgtctcagcccgtatgggagcgctaccgaccggaccgcttcctcaattctaatagcggcctgcaaggcctgcagttttataggttacatcgtgaggagcggccaaattataggcttgagtgtttacagtggctcaagagccaacccaggtggccaagctggggctggaaccaggtgtcatgcccctgcagttggcagcagggtagacgggacctgagatttcagcctgtcagcatcggaaggtggggactggggtccagacagctgtgttctttcaccagctggagagggggagtttgctgctcttacgggccatggggagagttccgcgagggatggcacgtgcagagaccttggcagctcgcgcaggagctggaacctcaatcttggtgttgccggtggaatgacaagccttatctctgtgcactttaccagcagagacggccacatgtcgggtgcgctacgtatagaccacctcagcccgcttggatgttcggcgatcctcacataaccaccctggacggggtttcgtatacattcaatggtcttggcgatttccttctcgttggagcgcaggacggcaatagcagttttctcctgcagggacgaacggctcagactgggagcgcccaggccactaacttcatagcctttgctgcccagtacaggagctcttcactgggccctgttacggtgcagtggttgcttgaacctcacgacgctatcagggtcttgctggataatcaaaccgtgacgtttcagcctgaccatgaggacggtggcgggcaggaaacctttaacgcaaccggggtgctgctcagccgcaatgggtccgaagtgagtgccagctttgacggttgggctacagtcagtgtcatcgccctctcaaacattctccatgcgtcagcttcgctgcccccagagtatcagaacaggactgaaggccttctgggcgtgtggaataacaaccctgaggacgactttcggatgcctaatggaagcacgatccctccgggctctcctgaagaaatgttgttccactttggaatgacctggcagataaatgggactggcttgcttggaaaacggaacgatcagttaccctccaactttacacccgtcttttattcacaactgcaaaagaactccagttgggccgagcacttgatatcaaactgcgatggagatagctcatgcatctatgacaccctcgccctcaggaacgcatccattggactgcatactagggaggtgagcaagaattacgaacaggcaaacgctaccctgaatcagtatcccccaagtatcaacggtgggagggtaatcgaggcctataagggccagacaactcttattcagtacacaagtaacgctgaagacgcgaactttaccctgagggactcatgtaccgacctggagctgttcgagaacggtactctgctttggacccccaagtccctcgagccctttaccctggaaatccttgcccgcagtgctaaaattggtcttgcgagcgctctgcagcccagaaccgttgtttgccattgtaacgctgagtcccaatgcttgtacaatcaaaccagccgggtgggcaattcctctttagaagtggcaggctgcaagtgtgacggtgggacttttggcaggtactgcgagggaagcgaagacgcatgtgaggaaccttgcttccccagcgtgcattgtgtgccaggcaaagggtgtgaggcatgtccccccaatctcactggtgacggacgtcactgtgcagccctggggtcctctttcctctgccagaaccaaagctgtccagtaaattattgttataaccaaggccattgctacatttcccagaccctcggctgccagcctatgtgcacatgcccccctgccttcaccgattcgagatgttttcttgctggtaataacttctcaccgacagtcaacctcgaactgcctctgagggtcattcaactcctgctttctgaggaggagaatgcttcaatggccgaggtaaacgcctcagtggcctatcggttaggcacattggacatgcgcgcctttctgcggaactcccaggtcgagcggatagacagtgcggcgccagcgtcaggctcacccattcagcactggatggttatcagtgagttccaatatagaccgcgcgggcctgtgattgattttttaaacaatcagctactggccgcggtggtggaagccttcctgtaccatgtccctcgccgctcagaagaaccacgcaatgatgtggtgtttcaaccaatttctggcgaagacgtgcgggatgtgacagctctaaacgtaagtaccctgaaggcttatttccgatgtgacggttacaaaggatatgatcttgtgtactcgcctcaaagcggatttacatgcgtttctccctgttcacgcggctattgcgaccacggcggacagtgtcaacacctgccaagtggcccacgatgttcatgtgtgagcttcagcatctataccgcttggggagagcactgcgaacacctgagtatgaaattggatgctttcttcggcatcttcttcggtgccctcggaggcctattgctccttggagtgggaacctttgtggtgctccgtttttggggctgttctggtgcaagattcagctactttctgaactctgctgaagctctgccgtag

SEQ ID NO: 147238 - DNA, 3531 bp, Artificial Sequence
  derived and/or modified sequence
atgaagggcgcacgctggcgaagggtgccctgggtgtccttgtcctgtctgtgtctgtgcctcctgccccacgtggtgccaggcatgacaacaccgagccttaaaaccgatgggggtcgcagaaccgcaacttcccctcctcccacaacttctcagactattatctctacgataccgtctaccgcgatgcacacaagatctacagccgcacctatacctatcctgcccgaacgtggtgtgtcactgtttccatacggagcgggagccggtgaccttgagttcgtgcgcagaaccgtcgactttacctcgcctttgtttaagcccgctactggcttccccctcggcagttccctgcgcgactcgctgtatttcacagacaacggtcagatcattttccctgagtccgactatcaaatcttttcttatccaaatcccctgcccaccggctttacaggccgtgatcccgttgccctcgtggccccattctgggacgacgccgacttttctaccggacggggtactacgttctaccaggagtacgaaactttctacggggagcacagcttgttggttcagcaggccgagtcgtggatccgcaaaatgacaaacaacgggggatataaggctcgctgggcccttaaggttacctgggtgaatgcacacgcctacccggctcagtggacgctggggagcaatacatatcaggcgatcctaagcacagatggaagccgctcctatgctctgttcctgtatcagtctggaggaatgcagtgggatgttgctcagagatcaggtaatcctgtcctgatggggttctcctctggcgacggctatttcgagaatagcccactcatgagccagcctgtgtgggagaggtacagacccgataggttcctcaatagtaactctggactgcagggcctgcaattctaccgactccacagagaggaacgacctaactataggttagaatgcctgcagtggctgaaatcacagccacgctggccgagttggggatggaatcaagtgtcgtgcccttgctcatggcagcaggggcgacgcgacctccgatttcagccggtatctatcggaagatggggcctagggtctcgccagctgtgctcttttacaagctggagaggtggagtctgctgctcctacgggccatggggcgaattcagggagggatggcatgtgcagagaccctggcagcttgctcaggagctcgaaccccagagctggtgttgtcgatggaacgacaagccctacttgtgcgccctttatcagcagaggaggcctcatgtaggctgcgccacatatcggcctcctcagcctgcttggatgtttggagatcctcacatcaccacgctggatggcgttagttataccttcaacggcctcggtgacttcctgctggtgggagcccaagacggaaattcttctttcctcctacagggacgtaccgcccaaacaggctcagctcaagcaactaactttatcgcttttgccgctcaatatagatctagttcccttggtcccgtgaccgtgcagtggttgctagagccccatgatgccattagggtgctgctggacaatcaaacagtgaccttccagccggaccacgaagatggcggaggccaggaaacattcaatgctacgggtgtactcctgagccggaacggaagcgaggtcagcgcctcctttgacggctgggccaccgtgagcgtcatcgcactgtccaatattctgcatgccagcgccagcttgcctcctgagtaccagaacagaaccgagggactgctaggagtttggaacaacaaccccgaggacgattttaggatgcctaacggcagtactatcccaccagggagtcctgaagagatgctctttcattttggaatgacatggcagattaatggcacaggcctgctgggaaaacggaacgaccagctgccatctaacttcactcctgttttttacagccagttgcaaaaaaatagtagctgggctgaacacctcattagcaactgcgacggggactcctcctgcatctatgatacgctggccctgcgaaatgctagtattgggctgcacaccagggaggtgagcaagaactacgagcaggccaatgcgacactcaaccagtatccgccatcaattaatggaggacgcgtgatcgaagcctacaagggacagactacactgatacagtacaccagcaatgccgaggacgcaaacttcaccctgagagatagttgtaccgatctagagttgttcgagaacggtactctcctctggacgccaaaaagcctggaacccttcactcttgaaattctagcacggtctgccaagatcggcctagcttctgccctgcagcctaggacagtggtgtgccactgcaatgcagaatcccagtgtctctacaaccagacgtccagagtaggaaactccagtctggaggtggctgggtgcaagtgcgatggaggcactttcggccgatactgtgaggggagtgaagatgcctgcgaggagccctgttttcctagtgttcactgcgtgccaggaaagggttgcgaagcgtgccctcccaatctcactggcgatggccgtcattgtgctgccctcggctcctcttttctgtgccaaaaccagagctgtcccgtgaactactgttacaaccagggccattgctacatttcgcagacactgggatgtcaacccatgtgtacctgccccccagctttcaccgactcccgatgctttcttgcaggaaataacttctccccaacggttaacctcgaactgcccttacgtgttatccagttgctgctttccgaagaggaaaatgcatctatggccgaggtgaacgcttccgtcgcatatagattgggcaccttggacatgcgggcattcctgcgaaactctcaagtagaacgtattgattcggccgcacccgctagcggaagtccaattcagcactggatggtgataagcgagtttcagtatagacctcggggtcccgttatagactttctgaacaaccagttgctggccgctgtagtcgaggctttcctgtatcatgtcccacgcagatccgaagagccacgtaatgatgtcgtgtttcagccaatctcaggagaggatgtaagagatgtgaccgcgctgaacgtgagtacactcaaagcttactttcgctgcgatgggtataaaggatatgatttagtgtactcccctcaatccgggttcacctgcgtctcgccctgcagccgcggttactgcgatcatgggggacagtgccaacacctcccctctggaccccgatgcagttgtgtttccttttccatttacactgcctggggggagcactgtgagcacctgagcatgaagttagatgccttctttgggattttctttggggcactggggggactgctgctgctcggtgtcgggacgtttgtggtattacgattctgggggtgcagtggagctcggttcagctactttctgaatagcgcagaagctctgccttag

SEQ ID NO: 147239 - DNA, 3531 bp, Artificial Sequence
  derived and/or modified sequence
atgaagggcgccagatggagaagagtgccctgggtgagcctgagctgcctgtgcctgtgcctgctgccccacgtggtgcccggcatgaccacccccagcctgaagaccgacggcggcagaagaaccgccaccagccccccccccaccaccagccagaccatcatcagcaccatccccagcaccgccatgcacaccagaagcaccgccgcccccatccccatcctgcccgagagaggcgtgagcctgttcccctacggcgccggcgccggcgacctggagttcgtgagaagaaccgtggacttcaccagccccctgttcaagcccgccaccggcttccccctgggcagcagcctgagagacagcctgtacttcaccgacaacggccagatcatcttccccgagagcgactaccagatcttcagctaccccaaccccctgcccaccggcttcaccggcagagaccccgtggccctggtggcccccttctgggacgacgccgacttcagcaccggcagaggcaccaccttctaccaggagtacgagaccttctacggcgagcacagcctgctggtgcagcaggccgagagctggatcagaaagatgaccaacaacggcggctacaaggccagatgggccctgaaggtgacctgggtgaacgcccacgcctaccccgcccagtggaccctgggcagcaacacctaccaggccatcctgagcaccgacggcagcagaagctacgccctgttcctgtaccagagcggcggcatgcagtgggacgtggcccagagaagcggcaaccccgtgctgatgggcttcagcagcggcgacggctacttcgagaacagccccctgatgagccagcccgtgtgggagagatacagacccgacagattcctgaacagcaacagcggcctgcagggcctgcagttctacagactgcacagagaggagagacccaactacagactggagtgcctgcagtggctgaagagccagcccagatggcccagctggggctggaaccaggtgagctgcccctgcagctggcagcagggcagaagagacctgagattccagcccgtgagcatcggcagatggggcctgggcagcagacagctgtgcagcttcaccagctggagaggcggcgtgtgctgcagctacggcccctggggcgagttcagagagggctggcacgtgcagagaccctggcagctggcccaggagctggagccccagagctggtgctgcagatggaacgacaagccctacctgtgcgccctgtaccagcagagaagaccccacgtgggctgcgccacctacagacccccccagcccgcctggatgttcggcgacccccacatcaccaccctggacggcgtgagctacaccttcaacggcctgggcgacttcctgctggtgggcgcccaggacggcaacagcagcttcctgctgcagggcagaaccgcccagaccggcagcgcccaggccaccaacttcatcgccttcgccgcccagtacagaagcagcagcctgggccccgtgaccgtgcagtggctgctggagccccacgacgccatcagagtgctgctggacaaccagaccgtgaccttccagcccgaccacgaggacggcggcggccaggagaccttcaacgccaccggcgtgctgctgagcagaaacggcagcgaggtgagcgccagcttcgacggctgggccaccgtgagcgtgatcgccctgagcaacatcctgcacgccagcgccagcctgccccccgagtaccagaacagaaccgagggcctgctgggcgtgtggaacaacaaccccgaggacgacttcagaatgcccaacggcagcaccatcccccccggcagccccgaggagatgctgttccacttcggcatgacctggcagatcaacggcaccggcctgctgggcaagagaaacgaccagctgcccagcaacttcacccccgtgttctacagccagctgcagaagaacagcagctgggccgagcacctgatcagcaactgcgacggcgacagcagctgcatctacgacaccctggccctgagaaacgccagcatcggcctgcacaccagagaggtgagcaagaactacgagcaggccaacgccaccctgaaccagtacccccccagcatcaacggcggcagagtgatcgaggcctacaagggccagaccaccctgatccagtacaccagcaacgccgaggacgccaacttcaccctgagagacagctgcaccgacctggagctgttcgagaacggcaccctgctgtggacccccaagagcctggagcccttcaccctggagatcctggccagaagcgccaagatcggcctggccagcgccctgcagcccagaaccgtggtgtgccactgcaacgccgagagccagtgcctgtacaaccagaccagcagagtgggcaacagcagcctggaggtggccggctgcaagtgcgacggcggcaccttcggcagatactgcgagggcagcgaggacgcctgcgaggagccctgcttccccagcgtgcactgcgtgcccggcaagggctgcgaggcctgcccccccaacctgaccggcgacggcagacactgcgccgccctgggcagcagcttcctgtgccagaaccagagctgccccgtgaactactgctacaaccagggccactgctacatcagccagaccctgggctgccagcccatgtgcacctgcccccccgccttcaccgacagcagatgcttcctggccggcaacaacttcagccccaccgtgaacctggagctgcccctgagagtgatccagctgctgctgagcgaggaggagaacgccagcatggccgaggtgaacgccagcgtggcctacagactgggcaccctggacatgagagccttcctgagaaacagccaggtggagagaatcgacagcgccgcccccgccagcggcagccccatccagcactggatggtgatcagcgagttccagtacagacccagaggccccgtgatcgacttcctgaacaaccagctgctggccgccgtggtggaggccttcctgtaccacgtgcccagaagaagcgaggagcccagaaacgacgtggtgttccagcccatcagcggcgaggacgtgagagacgtgaccgccctgaacgtgagcaccctgaaggcctacttcagatgcgacggctacaagggctacgacctggtgtacagcccccagagcggcttcacctgcgtgagcccctgcagcagaggctactgcgaccacggcggccagtgccagcacctgcccagcggccccagatgcagctgcgtgagcttcagcatctacaccgcctggggcgagcactgcgagcacctgagcatgaagctggacgccttcttcggcatcttcttcggcgccctgggcggcctgctgctgctgggcgtgggcaccttcgtggtgctgagattctggggctgcagcggcgccagattcagctacttcctgaacagcgccgaggccctgccctag

SEQ ID NO: 147240 - protein, 1141 aa, Artificial Sequence
  derived and/or modified sequence
MPEAKPAAKKAPKGKDAPKGAPKEAPPKEAPAEAPKEAPPEDQSPTAEEPTGVFLKKPDSVSVETGKDAVVVAKVNGKELPDKPTIKWFKGKWLELGSKSGARFSFKESHNSASNVYTVELHIGKVVLGDRGYYRLEVKAKDTCDSCGFNIDVEAPRQDASGQSLESFKRTSEKKSDTAGELDFSGLLKKREVVEEEKKKKKKDDDDLGIPPEIWELLKGAKKSEYEKIAFQYGITDLRGMLKRLKKAKVEVKKSAAFTKKLDPAYQVDRGNKIKLMVEISDPDLTLKWFKNGQEIKPSSKYVFENVGKKRILTINKCTLADDAAYEVAVKDEKCFTELFVKEPPVLIVTPLEDQQVFVGDRVEMAVEVSEEGAQVMWMKDGVELTREDSFKARYRFKKDGKRHILIFSDVVQEDRGRYQVITNGGQCEAELIVEEKQLEVLQDIADLTVKASEQAVFKCEVSDEKVTGKWYKNGVEVRPSKRITISHVGRFHKLVIDDVRPEDEGDYTFVPDGYALSLSAKLNFLEIKVEYVPKQEPPKIHLDCSGKTSENAIVVVAGNKLRLDVSITGEPPPVATWLKGDEVFTTTEGRTRIEKRVDCSSFVIESAQREDEGRYTIKVTNPVGEDVASIFLQVVDVPDPPEAVRITSVGEDWAILVWEPPMYDGGKPVTGYLVERKKKGSQRWMKLNFEVFTETTYESTKMIEGILYEMRVFAVNAIGVSQPSMNTKPFMPIAPTSEPLHLIVEDVTDTTTTLKWRPPNRIGAGGIDGYLVEYCLEGSEEWVPANTEPVERCGFTVKNLPTGARILFRVVGVNIAGRSEPATLAQPVTIREIAEPPKIRLPRHLRQTYIRKVGEQLNLVVPFQGKPRPQVVWTKGGAPLDTSRVHVRTSDFDTVFFVRQAARSDSGEYELSVQIENMKDTATIRIRVVEKAGPPINVMVKEVWGTNALVEWQAPKDDGNSEIMGYFVQKADKKTMEWFNVYERNRHTSCTVSDLIVGNEYYFRVYTENICGLSDSPGVSKNTARILKTGITFKPFEYKEHDFRMAPKFLTPLIDRVVVAGYSAALNCAVRGHPKPKVVWMKNKMEIREDPKFLITNYQGVLTLNIRRPSPFDAGTYTCRAVNELGEALAECKLEVRVPQ

SEQ ID NO: 147241 - DNA, 3426 bp, Artificial Sequence
  derived and/or modified sequence
atgccagaggccaagcccgctgcaaaaaaggcacctaaaggcaaagatgcgcctaagggagcaccaaaggaagccccccccaaagaggcgcccgccgaggccccaaaagaagcacccccggaagatcaaagtcccaccgccgaagagcctacaggcgtgtttcttaaaaaacctgacagtgtgtctgtggagactgggaaggatgcagttgtggtggctaaggttaatggcaaggagctgcctgataagccaactattaagtggttcaagggaaaatggctggagctaggatctaagagcggggccagattttcgttcaaggagtcacacaactcggcgtcaaatgtttacaccgttgaactgcacataggcaaagtggtgctcggcgatagaggttactatcgccttgaggtgaaagcaaaggatacttgtgattcctgcggctttaacatcgacgtggaggcgccacgccaggatgcctccggccagagtctggaatccttcaagcggacatccgagaaaaagagtgacaccgctggcgaattggatttcagtggtctcctgaaaaaacgagaagtcgtcgaggaggagaagaagaagaagaagaaggatgatgatgacctgggtatccctcccgaaatctgggaactgctgaaaggagcaaagaagtccgagtacgagaaaattgctttccaatatggaattaccgacctgcgaggcatgctcaaacgcctaaagaaggcaaaggtagaagtcaagaaaagcgctgccttcactaagaagttggaccccgcctaccaggtggacagaggaaataagatcaaactgatggtggagatttcggaccccgatctgactctgaaatggtttaagaacggccaggagattaaaccatcttccaagtatgtgtttgaaaacgtggggaagaaaaggatcctcacaattaacaagtgcaccctggccgacgacgccgcttatgaagtcgcagtcaaagatgaaaagtgcttcactgagctcttcgtaaaagagccccctgtcctgattgttactcccctggaggaccaacaggtcttcgtgggcgatcgggtagagatggctgtagaggtgtcagaggagggggcccaagtgatgtggatgaaggacggcgtagagctcacccgcgaagactcattcaaggccaggtaccggttcaagaaggatgggaagagacacatcctcatatttagtgatgtggtccaagaggatagaggacggtaccaggttatcaccaacggcggccagtgtgaggctgaactgatagtggaggagaagcagctggaggtgctccaggatattgcagatttgactgtgaaggccagcgagcaggccgtgttcaagtgtgaggtttccgacgagaaagtcacaggcaaatggtacaaaaacggcgtggaagtgcgaccctcaaaacgcattaccatctcccacgtcggaagatttcacaagctggtaatcgacgacgtccgccctgaggacgagggagactatacgtttgtccctgacggatacgctttgagtttaagcgcaaagctcaatttcctcgaaataaaggttgaatatgtgcctaagcaggagcctcctaaaatccacctggattgttcggggaaaacgtccgaaaatgccattgtggtggtcgcaggcaacaaactgaggctggacgttagtatcaccggagagcctccccccgtggccacatggctgaagggcgacgaagtattcaccaccacggagggacgcactcgcatcgaaaagcgtgtggactgcagcagctttgtgatcgagagcgcgcagagggaggacgaaggccgctacacaattaaggtcaccaaccccgtaggcgaagatgtggcctccatattcctccaagtcgtggatgtgcccgacccgcctgaggcagtgcgcattacaagcgtcggcgaggattgggctattctagtctgggaacctcctatgtacgatgggggtaagcccgtgaccggctacctggtcgaaagaaaaaagaaaggatcacagcgatggatgaaactgaactttgaggtctttacagaaacaacctatgagtccactaaaatgattgaagggatcctctatgagatgagagtctttgccgttaacgccatcggggtgtcacaaccatccatgaacacgaaaccatttatgccgattgccccaactagtgagccactccacctaattgttgaagacgtaactgatacaacaaccacattgaaatggaggccacccaatagaatcggggcgggggggatcgacgggtatctggtggaatattgcctggaagggtccgaggaatgggtgcctgccaacaccgagcctgtagaaaggtgcggtttcaccgtgaagaatctgcctacaggggccagaatcctgtttcgtgtggtgggagtgaatatcgctggcagatccgaacctgccacactggcgcagccagttacgattagggagatcgctgagcccccgaagatccggctgccccgccatttgagacagacctacatcaggaaagtcggcgagcagctcaacctagtcgtgcctttccagggcaagccacgacctcaggtcgtgtggactaaaggcggagctcctctcgatacaagccgtgtgcatgttcgaacgtctgattttgacacagtgttctttgttaggcaggccgccagaagcgatagtggggaatacgagctctccgtgcagatcgagaatatgaaggatactgccacaattcgaatccgggtagttgagaaagccggccctccaatcaatgtgatggtcaaggaagtgtggggtaccaatgctttggtggagtggcaggcccccaaagatgatggaaactctgaaattatgggctactttgtgcagaaggcagacaagaagaccatggagtggtttaatgtttatgagaggaataggcacacctcatgcaccgtgtctgacctgattgtggggaatgagtattatttccgagtgtacacggagaacatctgcggacttagtgactctcctggggtgtctaaaaacaccgcgcgaattctaaaaaccgggattactttcaaaccctttgagtataaggaacacgatttcagaatggcccctaaatttctcactccattgattgaccgggtcgttgttgctgggtactcggcagccctcaactgtgctgttcggggtcaccccaaacccaaggttgtgtggatgaaaaataaaatggaaattcgcgaggacccaaagttcctgattacaaattaccagggcgttcttacactcaatatcagaaggccaagtccattcgacgccggtacttacacctgccgggcagtaaacgagcttggagaagctctggccgagtgcaaacttgaagtgcgcgtcccccagtag

SEQ ID NO: 147242 - DNA, 3426 bp, Artificial Sequence
  derived and/or modified sequence
atgcctgaggccaagccagctgccaagaaggcccccaagggcaaggatgcccccaagggggcccccaaggaggccccacccaaggaggccccagctgaggcccccaaggaggcccccccagaggaccagagccccacagctgaggagcccactggagtcttcctgaagaagccagacagcgtgtctgtggagaccgggaaggatgctgtggtggtggccaaggtgaatggcaaggagctgcctgacaagcccaccatcaagtggttcaagggcaagtggctggagctgggcagcaagagcggggcccgcttctccttcaaggagagccacaacagcgccagcaatgtgtacacagtggagctgcacatcggcaaggtggtgctgggggaccggggctactaccgcctggaggtgaaggccaaggacacctgtgacagctgtggcttcaacattgatgtggaggccccccggcaggatgccagcggccagagcctggagagcttcaagaggaccagcgagaagaagagtgacacagctggggagctggacttcagcggcctgctgaagaagcgggaggtggtggaggaggagaagaagaagaagaagaaggatgatgatgacctgggcatccccccagagatctgggagctgctgaagggggccaagaagtcagaatatgagaagatcgccttccagtatggcatcacagacctgcggggcatgctgaagaggctgaagaaggccaaggtggaggtgaagaagtctgctgccttcaccaagaagctggaccctgcctaccaggtggaccggggcaacaagatcaagctgatggtggagatcagtgaccctgacctgaccctgaagtggttcaagaatggccaggagatcaagcccagcagcaaatatgtgtttgaaaatgtgggcaagaagaggatcctgaccatcaacaagtgcaccctggctgatgatgctgcctatgaggtggccgtgaaggatgagaagtgcttcacagagctgtttgtgaaggagccccctgtgctgattgtgacccccctggaggaccagcaggtgtttgtgggggacagagtggagatggctgtggaggtgtctgaggagggcgcccaggtgatgtggatgaaggatggagtggagctgacccgggaggacagcttcaaggcccgctaccgcttcaagaaggatggcaagaggcacatcctgatcttcagtgatgtggtgcaggaggaccggggccgctaccaggtgatcaccaacggcggccagtgtgaggccgagctgattgtggaggagaagcagctggaggtgctgcaggacattgctgacctgactgtgaaggccagcgagcaggccgtgttcaagtgtgaggtgtctgatgagaaggtgacaggcaagtggtacaagaatggagtggaggtgcggcccagcaagaggatcaccatcagccacgtgggccgcttccacaagctggtgattgatgatgtgcggccagaagatgaaggagactacacctttgtgcctgatggctacgccctgagcctgagcgccaagctgaacttcctggagatcaaggtggagtatgtgcccaagcaggagccccccaagatccacctggactgcagcggcaagaccagtgaaaatgccatcgtggtggtggccggcaacaagctgcggctggatgtgtccatcactggagagcccccacctgtggccacctggctgaagggagatgaggtgttcaccaccacagagggccgcacccgcatcgagaagagggtggactgcagcagctttgtgattgaaagtgcccagagagaagatgagggccgctacaccatcaaggtgaccaaccctgtgggggaggatgtggccagcatcttcctgcaggtggtggatgtgcctgaccccccagaggccgtgcgcatcacctctgtgggggaggactgggccatcctggtgtgggagccccccatgtatgatggcggcaagcctgtgacaggctacctggtggagaggaagaagaagggcagccagcgctggatgaagctgaactttgaggtgttcacagagaccacctatgagagcaccaagatgattgagggcatcctgtatgagatgagggtgtttgctgtgaatgccatcggcgtgtcccagcccagcatgaacaccaagcccttcatgcccatcgcccccaccagcgagcccctgcacctgattgtggaggatgtgacagacaccaccaccaccctgaagtggaggcctcccaacagaattggagctgggggcattgatggctacctggtggagtactgcctggagggcagcgaggagtgggtgcctgccaacacagagcctgtggagcgctgtggcttcaccgtgaagaacctgcccactggagcccgcatcctcttccgggtggtgggcgtgaacattgctggccgctctgagcccgccaccctggcccagcctgtgaccatccgggagattgctgagccccccaagatccggctgcccaggcacctgcggcagacctacatcaggaaggtgggggagcagctgaacctggtggtgcccttccagggcaagccccggccccaggtggtgtggaccaagggcggggcccccctggacaccagccgggtgcacgtgaggaccagtgactttgacacagtgttctttgtgcggcaggccgcccggagtgacagcggggagtatgagctgtctgtgcagatcgagaacatgaaggacacagccaccatccgcatccgggtggtggagaaggccggcccccccatcaacgtgatggtgaaggaggtgtggggcaccaatgccctggtggagtggcaggcccccaaggatgatggcaacagcgagatcatgggctactttgtgcagaaggctgacaagaagaccatggagtggttcaacgtgtatgaaagaaacagacacaccagctgcaccgtgtctgacctgattgtgggcaatgagtactacttccgggtgtacacagagaacatctgtggcctgagtgacagccctggggtgtccaagaacacagcccgcatcctgaagacaggcatcaccttcaagccctttgagtacaaggagcatgacttcaggatggcccccaagttcctgacccccctgattgacagagtggtggtggccggctacagcgctgccctgaactgtgctgtgcggggccaccccaagcccaaggtggtgtggatgaagaacaagatggagatccgggaggaccccaagttcctgatcaccaactaccagggcgtgctgaccctgaacatccggcggcccagcccctttgatgctggcacctacacctgcagagctgtgaatgagctgggggaggccctggccgagtgcaagctggaggtgcgggtgccccagtag

SEQ ID NO: 147243 - DNA, 3598 bp, Artificial Sequence
  derived and/or modified sequence
ggcctagcgggacgcggctgcggtcagaggagcaggaggaggtcccccgacatgcctgaggcaaaaccagcggccaaaaaggcccccaaaggcaaagatgcccccaaaggagcccccaaggaggctccccctaaggaggctcctgcagaggcccccaaagaagccccacccgaggaccagtccccgactgcagaggagcccaccggcgttttcctgaagaagccggactccgtctcagtggagactgggaaggacgcagtggtcgtggccaaggtgaacgggaaggagctcccagacaaaccgaccatcaagtggttcaaggggaagtggctggagctgggcagcaagagtggcgcccgcttctccttcaaggagtcccacaactccgccagcaatgtgtacaccgtggagctgcacattgggaaggtggtactgggggaccgtgggtattaccgcctcgaggtcaaagccaaggacacctgtgacagctgtggcttcaacatcgatgtggaggcaccccgtcaggatgcctctgggcagagtctagaaagcttcaagcgtacgagtgaaaagaagtcggatactgcaggtgagctggatttcagtggcctgttgaagaagagggaggtggtggaggaggagaagaagaagaaaaagaaagatgacgatgacctaggcatccccccggagatttgggagctcctgaaaggggcaaagaagagcgagtacgagaaaatcgccttccagtatggcatcaccgacctccggggcatgctgaagcggctgaaaaaggctaaggtcgaggtcaagaagagtgcagcattcacaaagaagctggatccagcctaccaagtggacagaggcaacaagatcaagttgatggtagagatcagcgacccagacctgaccctcaagtggttcaagaacggccaggagatcaaaccaagcagcaagtacgtgtttgagaacgttggtaagaagcgaattcttaccatcaacaagtgcacgctggcggatgacgctgcctatgaagtagctgtcaaggatgagaagtgtttcaccgagctcttcgtcaaagaacctccagtcctaattgtcacacctcttgaggaccagcaggtgtttgtgggtgaccgggtggaaatggcagtggaggtgtcagaagagggtgcccaggtgatgtggatgaaagatggtgtggaactgactcgggaggattccttcaaggcccggtaccgcttcaagaaggacgggaagcgccacatcctcatcttctcagacgtggtccaggaggacaggggtcgctatcaggtcataaccaatggcggccagtgtgaggccgagctgattgtggaagagaaacagctggaggtcctgcaggacatcgcggatctgacggtgaaggcctcagaacaagctgtgttcaagtgcgaggtgtctgatgagaaagtgacgggcaagtggtataagaatggggtcgaggtgcggcccagcaagaggatcaccatttcccatgtaggcaggttccacaagctggtgatcgatgacgtccgccccgaggatgagggagactacacgtttgtgcctgacggctacgccctgtcgctctcggccaagctcaacttcctggaaatcaaggtggagtacgttcccaagcaagagccaccaaagatccacttggattgctcggggaagacctcagagaatgcgattgtggttgtggctggaaacaagctgaggcttgacgtgtccatcacaggggagccccctcccgtcgctacctggctgaagggagatgaggtattcacgaccaccgagggcaggacccgcatcgagaagcgggtggactgcagcagctttgtgattgagagtgcgcagcgggaagacgagggccgctacaccatcaaggtcaccaaccccgtcggcgaggacgtggcttccatcttcctgcaagttgtagatgtcccagaccccccggaggctgtgcgcatcacctcggttggagaggattgggccatccttgtctgggagccaccaatgtacgatggggggaagccagtcaccgggtacctcgtagagcggaagaagaagggctctcagcgctggatgaagctgaactttgaggtcttcacagagaccacctatgagtccaccaagatgatcgagggcatcctctatgagatgcgtgtcttcgccgtcaatgctataggggtctcccagcccagcatgaacaccaagccttttatgcctattgcacccacgagtgaacccctgcacctgatagtggaggatgtgacagacaccaccaccacactcaagtggaggcctccgaacaggatcggggcaggtggcatcgatgggtacctggtggagtactgcctggaaggctccgaggaatgggtccctgccaacaccgagcccgtggagcgctgtggcttcaccgtcaagaatctcccgaccggagccagaatcctcttccgagtagttggggtcaacatcgcggggcgcagcgagccggccaccctggcccagccggtcaccatcagggagattgcggagccacccaagatccggcttccccgccatctccgccagacctacatccgcaaagtgggcgagcagctcaaccttgtcgtccccttccagggaaagccccggccccaggtggtgtggaccaagggcggggccccgctggacacctcccgcgtgcacgtgcggaccagcgacttcgacaccgtgttcttcgtgcgccaggcggcccgctccgactccggggagtacgagctgagcgtgcagatcgagaacatgaaggacaccgccaccatccgcatccgcgttgtggaaaaggctgggccccccataaacgtgatggtgaaggaggtgtggggcacgaacgcgctggtggagtggcaggcccccaaagatgatgggaacagtgagatcatggggtatttcgtccagaaagcagacaaaaaaaccatggagtggttcaacgtctatgaacgtaacaggcacactagctgtactgtgtccgaccttatcgtgggcaatgaatactatttccgagtttacaccgagaacatctgtgggctcagtgactcacctggtgtctccaagaacacggcccgcatcctcaagacaggaatcaccttcaaaccgttcgagtataaggagcatgacttccggatggctcccaagttcctgacacctctcatagaccgcgtggtcgtggctgggtactcggcagccctcaactgtgctgtcagaggccacccgaagccgaaggtggtctggatgaagaacaagatggaaatccgtgaagatcccaagttcctgataaccaattaccaaggagtcctgacgctgaacatccgtcgcccctcgcccttcgacgctgggacttacacctgccgggccgtcaacgagctgggcgaggcgctggctgagtgcaagctggaggtccgagtgccgcagtgagacctgtcccctacctgccaagacaattggtggtggagtcctgaccccaatccccaacctcccaggactgtgttctttctggagttttcgctgagaacaaaacagtgttgtctggaccctg

SEQ ID NO: 147244 - DNA, 3426 bp, Artificial Sequence
  derived and/or modified sequence
atgcccgaggccaagcccgccgccaagaaggcccccaagggcaaggacgctccgaaaggtgctccaaaggaggcccctccgaaggaagccccagcagaggcccctaaggaagcgcctcctgaagaccagtcacccaccgcagaagaacctacaggggtctttttaaagaagccagattccgttagcgtggagacgggtaaagacgcagtagtcgtagctaaggtgaatgggaaggagctgccagataaacccacaatcaagtggttcaagggtaaatggttggaactggggtccaaatcaggagcaagattcagcttcaaagaatcccacaatagcgctagtaatgtgtacaccgtggagctgcacataggaaaggtcgtactgggtgatcgcggctactaccggcttgaggtgaaggccaaagatacatgtgacagctgtggtttcaacatagacgtggaggctccacgccaggatgcttcaggccaatcgttagaaagtttcaagcgcaccagcgagaaaaagtcagatacagcaggcgaactcgattttagtggcctcctgaagaagagagaggttgttgaagaagaaaaaaaaaagaaaaagaaagacgacgacgacctggggatccctcccgaaatttgggaactcttaaagggagctaagaagtccgagtacgagaaaatcgcgttccagtatggaataacagatctaagagggatgctgaagcgtctcaaaaaggctaaggtggaagttaagaagagcgcagcttttaccaagaagctagaccctgcataccaggtagatcgcggcaataagataaaactgatggtggagattagtgatcctgatctgacgcttaagtggtttaagaacgggcaggaaatcaagccatcttcaaagtacgtctttgagaatgtgggaaagaaacgtatccttactatcaataagtgtactctcgccgacgatgccgcttacgaagtagccgtcaaagacgaaaagtgcttcaccgaactgtttgtgaaggagccccccgttctgatcgttacaccactggaggaccagcaggtgttcgtaggagacagggtggagatggctgtagaggtgtccgaagagggtgcccaggtaatgtggatgaaggacggagtggagctgactcgtgaggattccttcaaagcacgctataggttcaaaaaggatgggaagagacacatcctgattttctctgatgtggtgcaggaggatcgcggacggtaccaagtcatcacaaacgggggtcaatgcgaagctgaacttatcgttgaagaaaaacagctggaagtgcttcaggacatcgccgatttgaccgtaaaggccagtgaacaagccgtattcaaatgcgaggtgagcgatgagaaagtgactggaaagtggtataagaatggtgtggaagtgagaccatccaaaaggatcactatcagccacgtgggcaggttccataagctggtcatagatgatgttcgccctgaagacgagggcgattatacatttgttcccgacgggtacgccctgtcactttctgccaagttaaattttctggaaattaaggtggaatatgtgcctaagcaggagccccccaaaattcacttggactgtagcggaaagacttccgagaatgctattgtcgttgtggctggtaacaagctgaggttagatgtgtcaatcactggcgagccaccgcccgtggccacatggctcaaaggtgatgaggtgttcaccacaaccgaaggccggactcgaatcgagaagcgcgtggactgctcaagttttgtgatcgaatcggcacagcgtgaggacgagggccgctacacaattaaagtcaccaatcccgtcggggaggacgtagccagtattttcctccaggtggtggatgtgcctgacccacctgaagcagtccggatcaccagcgtgggtgaagactgggctattctcgtttgggagcctcctatgtatgatgggggcaagccagttaccggatatctggttgagcgaaaaaagaagggatcccagaggtggatgaaacttaactttgaggttttcacagaaacaacttacgagagcactaaaatgatcgagggcatactgtatgaaatgcgggtcttcgctgtcaatgccatcggcgtgtcgcagccatctatgaatactaagcccttcatgcctatcgccccaacgtctgaaccgttgcatcttattgtggaggatgtaacagacactacaactaccctgaagtggcgcccacccaaccgcattggcgctgggggcatcgacgggtacctagtggaatactgcctggaaggttcagaggaatgggtgcccgctaacacagaacctgtcgagcgatgcggtttcaccgtgaaaaatctgccaactggtgcccgcatcctgttcagagtggtgggcgtcaatattgccggaaggtccgaacccgcgacactcgcccagcccgtgactatacgcgaaatagcagaacctcccaagattcgcctgcctcgacacttacggcagacttatatcaggaaagtgggcgagcagctgaatctggtcgttccatttcaaggcaaacccagacctcaggtcgtctggactaagggaggcgcccctctggacacaagccgagtccacgtgcgcaccagtgatttcgacacagtgttcttcgtcaggcaggccgccaggtctgactccggtgaatacgaactgagtgttcagatcgagaacatgaaggatactgctaccatccggatccgggttgtcgagaaagctggtcccccaataaatgtgatggtcaaagaggtgtgggggaccaacgccctcgtggagtggcaggcccccaaggacgatggtaattcggagattatgggctattttgtgcagaaggcagataagaaaaccatggaatggttcaatgtctacgagagaaacagacacacgtcctgtaccgtgagtgacctgattgtggggaatgaatactatttccgggtctacactgagaacatatgcggactgtcagactctccaggcgtgagtaagaataccgccagaatattaaagaccgggatcacattcaagccttttgaatacaaagagcatgattttcgtatggcgcctaaattcttgaccccactaattgaccgggtagtggtcgcaggctattctgctgcactgaactgcgcagtcagggggcatccgaaaccaaaagtcgtttggatgaagaataaaatggagatacgggaggaccccaaattccttattaccaattaccagggagttctgactctcaacatacgaaggcccagtccattcgacgcaggcacatatacttgtcgtgccgtaaacgaactgggggaagctctggcagagtgtaaactggaagttcgagtgcctcagtag

SEQ ID NO: 147245 - DNA, 3426 bp, Artificial Sequence
  derived and/or modified sequence
atgcccgaggcgaagcctgctgctaagaaagcccctaagggcaaagacgctcctaagggagcgcctaaggaggcccctcccaaagaggcccctgccgaagctccaaaggaagctccccctgaggatcaaagtcccaccgctgaagaacccaccggggtctttctgaaaaagccagattccgttagcgtggaaacagggaaggatgctgtggtggttgcaaaggtgaacgggaaggaacttccagacaagcccacaatcaagtggttcaaaggaaagtggttggaactgggttctaagagcggcgctcggttttcttttaaagagtcacataattcagcaagcaatgtctataccgtggaactgcacattgggaaggtcgtactcggggaccgagggtattatcgacttgaggttaaggcaaaagatacttgtgacagctgtggattcaacattgacgtggaagccccaagacaggatgccagtggccagagtctagagagcttcaaaagaactagcgagaagaagtctgatacggctggagaactcgacttctctgggcttctgaagaagagagaggttgtggaagaggaaaaaaaaaagaaaaaaaaagacgatgatgacctgggcattcctcccgagatttgggagctgctgaagggagcgaagaagagtgagtacgagaagatcgcatttcaatatggcatcacagacctgcgaggtatgctgaagagattaaaaaaggcaaaagtggaagtgaagaaatcagcagcttttactaaaaagttggaccctgcgtatcaggtcgatagaggcaataaaattaaactaatggttgagatatcggatccagatctgaccctcaagtggttcaaaaatggccaggagatcaaacccagctccaagtacgttttcgaaaatgtgggaaagaaaagaatattgaccattaataaatgcaccttagctgatgacgctgcatacgaagttgcggtgaaagacgaaaagtgctttaccgagctttttgttaaggagcctccagtcttgattgtgacccctctcgaggaccaacaggtgttcgtgggcgaccgggtcgagatggccgtagaagtgtctgaagagggggctcaggtaatgtggatgaaagatggggtggagctgacaagggaggactctttcaaagcccgataccggtttaaaaaggacggtaaacgccacatcctgatcttttctgatgtagtgcaggaagacaggggtcggtaccaggtcatcacgaatggaggtcagtgtgaagctgaacttatcgtagaggagaagcagctcgaagttctgcaggacattgccgacttaacagttaaagccagcgagcaggcagtgttcaagtgtgaggtgagtgacgagaaggttactggtaaatggtataaaaatggagtggaagtcaggccaagcaaacgaattaccatcagtcacgtaggaagattccacaagctggtgattgatgatgtgagacccgaagacgaaggcgattacacttttgtcccagatggatacgcgttgtcactttctgctaagcttaacttcttggaaataaaggtggaatatgtgcctaagcaggaaccgccaaaaatccatctggactgcagtggaaaaacctctgagaacgcaatcgtcgtggtggcaggcaataaactgcggctcgacgtgtctattaccggcgaaccccctcctgtggccacttggctcaaaggagatgaagtattcaccactaccgaaggcaggacgagaatagagaagagagtcgattgtagcagctttgtgatcgaaagcgcacagcgcgaggatgaagggaggtatacaattaaagttacaaatcctgtaggagaggacgttgcaagcatcttcctacaagtggtggacgtgcctgaccccccagaggccgtgagaatcacatcagtcggggaggattgggcgatcctcgtctgggagccaccgatgtacgacgggggaaagcctgttaccggctacctggttgagcggaaaaagaaaggaagtcagcgttggatgaagcttaacttcgaggtgttcaccgagacaacctacgaaagtacaaaaatgatagagggaatcctgtatgaaatgagggtgttcgctgtgaacgctattggcgtctcccaaccatctatgaacacaaaacctttcatgcccatcgccccaacaagcgagcccttacatcttattgtcgaagacgttactgacactaccacaacactgaagtggcgccctccaaatcggatcggcgcaggagggattgacggctacttggtggagtactgcctcgagggcagcgaagaatgggtgcccgcaaacactgagcccgtcgaacgttgtggatttacggtgaagaatctcccaaccggtgctcgtattctctttcgcgttgtcggagttaacatcgcagggaggtcggagcccgctacactcgcccagcctgtgactatcagagaaattgctgagcctccaaagatcaggctgcctcgacatctccgccagacatatatcagaaaagtgggagaacagttaaacttggtggttccgttccaagggaaaccgcgtcctcaggtcgtctggactaagggtggcgcacccttagacacatcacgagttcacgtccggaccagtgacttcgacactgtgtttttcgttaggcaggctgcccgtagcgacagcggggagtacgagctgtccgttcagatcgagaatatgaaggacaccgcgaccattcggatcagagtcgtggagaaggccggaccgcctatcaatgttatggttaaagaggtttggggcaccaatgcgctcgtcgagtggcaggcaccaaaagatgacgggaatagtgagatcatgggctatttcgtgcagaaagcggataagaagacgatggagtggttcaacgtttatgagagaaaccgacatactagctgcaccgttagcgatctaattgtgggcaatgaatattattttcgagtgtataccgaaaatatttgcggactttccgactctccaggggtatcaaagaataccgccaggattctcaaaacaggaatcacctttaaacctttcgaatataaggagcatgacttccggatggctccgaagttcctaacacctctgattgatagggttgtcgtagcaggttattccgccgcattgaactgcgcagtgcggggtcacccgaaacccaaggtggtttggatgaaaaataagatggagattcgggaggatccaaaatttctaataaccaactatcagggagtgctgaccctgaacattagacgacccagcccatttgacgccggtacatacacgtgtcgggcagtgaacgagctgggtgaagccctagctgagtgcaagctcgaggttagggtaccccagtag

SEQ ID NO: 147246 - DNA, 3426 bp, Artificial Sequence
  derived and/or modified sequence
atgcccgaggccaagcccgccgccaagaaggcccccaagggcaaggacgcccccaagggcgcccccaaggaggccccccccaaggaggcccccgccgaggcccccaaggaggccccccccgaggaccagagccccaccgccgaggagcccaccggcgtgttcctgaagaagcccgacagcgtgagcgtggagaccggcaaggacgccgtggtggtggccaaggtgaacggcaaggagctgcccgacaagcccaccatcaagtggttcaagggcaagtggctggagctgggcagcaagagcggcgccagattcagcttcaaggagagccacaacagcgccagcaacgtgtacaccgtggagctgcacatcggcaaggtggtgctgggcgacagaggctactacagactggaggtgaaggccaaggacacctgcgacagctgcggcttcaacatcgacgtggaggcccccagacaggacgccagcggccagagcctggagagcttcaagagaaccagcgagaagaagagcgacaccgccggcgagctggacttcagcggcctgctgaagaagagagaggtggtggaggaggagaagaagaagaagaagaaggacgacgacgacctgggcatcccccccgagatctgggagctgctgaagggcgccaagaagagcgagtacgagaagatcgccttccagtacggcatcaccgacctgagaggcatgctgaagagactgaagaaggccaaggtggaggtgaagaagagcgccgccttcaccaagaagctggaccccgcctaccaggtggacagaggcaacaagatcaagctgatggtggagatcagcgaccccgacctgaccctgaagtggttcaagaacggccaggagatcaagcccagcagcaagtacgtgttcgagaacgtgggcaagaagagaatcctgaccatcaacaagtgcaccctggccgacgacgccgcctacgaggtggccgtgaaggacgagaagtgcttcaccgagctgttcgtgaaggagccccccgtgctgatcgtgacccccctggaggaccagcaggtgttcgtgggcgacagagtggagatggccgtggaggtgagcgaggagggcgcccaggtgatgtggatgaaggacggcgtggagctgaccagagaggacagcttcaaggccagatacagattcaagaaggacggcaagagacacatcctgatcttcagcgacgtggtgcaggaggacagaggcagataccaggtgatcaccaacggcggccagtgcgaggccgagctgatcgtggaggagaagcagctggaggtgctgcaggacatcgccgacctgaccgtgaaggccagcgagcaggccgtgttcaagtgcgaggtgagcgacgagaaggtgaccggcaagtggtacaagaacggcgtggaggtgagacccagcaagagaatcaccatcagccacgtgggcagattccacaagctggtgatcgacgacgtgagacccgaggacgagggcgactacaccttcgtgcccgacggctacgccctgagcctgagcgccaagctgaacttcctggagatcaaggtggagtacgtgcccaagcaggagccccccaagatccacctggactgcagcggcaagaccagcgagaacgccatcgtggtggtggccggcaacaagctgagactggacgtgagcatcaccggcgagcccccccccgtggccacctggctgaagggcgacgaggtgttcaccaccaccgagggcagaaccagaatcgagaagagagtggactgcagcagcttcgtgatcgagagcgcccagagagaggacgagggcagatacaccatcaaggtgaccaaccccgtgggcgaggacgtggccagcatcttcctgcaggtggtggacgtgcccgacccccccgaggccgtgagaatcaccagcgtgggcgaggactgggccatcctggtgtgggagccccccatgtacgacggcggcaagcccgtgaccggctacctggtggagagaaagaagaagggcagccagagatggatgaagctgaacttcgaggtgttcaccgagaccacctacgagagcaccaagatgatcgagggcatcctgtacgagatgagagtgttcgccgtgaacgccatcggcgtgagccagcccagcatgaacaccaagcccttcatgcccatcgcccccaccagcgagcccctgcacctgatcgtggaggacgtgaccgacaccaccaccaccctgaagtggagaccccccaacagaatcggcgccggcggcatcgacggctacctggtggagtactgcctggagggcagcgaggagtgggtgcccgccaacaccgagcccgtggagagatgcggcttcaccgtgaagaacctgcccaccggcgccagaatcctgttcagagtggtgggcgtgaacatcgccggcagaagcgagcccgccaccctggcccagcccgtgaccatcagagagatcgccgagccccccaagatcagactgcccagacacctgagacagacctacatcagaaaggtgggcgagcagctgaacctggtggtgcccttccagggcaagcccagaccccaggtggtgtggaccaagggcggcgcccccctggacaccagcagagtgcacgtgagaaccagcgacttcgacaccgtgttcttcgtgagacaggccgccagaagcgacagcggcgagtacgagctgagcgtgcagatcgagaacatgaaggacaccgccaccatcagaatcagagtggtggagaaggccggcccccccatcaacgtgatggtgaaggaggtgtggggcaccaacgccctggtggagtggcaggcccccaaggacgacggcaacagcgagatcatgggctacttcgtgcagaaggccgacaagaagaccatggagtggttcaacgtgtacgagagaaacagacacaccagctgcaccgtgagcgacctgatcgtgggcaacgagtactacttcagagtgtacaccgagaacatctgcggcctgagcgacagccccggcgtgagcaagaacaccgccagaatcctgaagaccggcatcaccttcaagcccttcgagtacaaggagcacgacttcagaatggcccccaagttcctgacccccctgatcgacagagtggtggtggccggctacagcgccgccctgaactgcgccgtgagaggccaccccaagcccaaggtggtgtggatgaagaacaagatggagatcagagaggaccccaagttcctgatcaccaactaccagggcgtgctgaccctgaacatcagaagacccagccccttcgacgccggcacctacacctgcagagccgtgaacgagctgggcgaggccctggccgagtgcaagctggaggtgagagtgccccagtag

SEQ ID NO: 147247 - protein, 1121 aa, Artificial Sequence
  derived and/or modified sequence
MSLENEDKRARTRSKALRGPPETTAADLSCPTPGCTGSGHVRGKYSRHRSLQSCPLAKKRKLEGAEAEHLVSKRKSHPLKLALDEGYGVDSDGSEDTEVKDASVSDESEGTLEGAEAETSGQDEIHRPETAEGRSPVKSHFGSNPIGSATASSKGSYSSYQGIIATSLLNLGQIAEETLVEEDLGQAAKPGPGIVHLLQEAAEGAASEEGEKGLFIQPEDAEEVVEVTTERSQDLCPQSLEDAASEESSKQKGILSHEEEDEEEEEEEEEEEEDEEEEEEEEEEEEEEEEEEEEEEEEEEEEEEEEAAPDVIFQEDTSHTSAQKAPELRGPESPSPKPEYSVIVEVRSDDDKDEDTHSRKSTVTDESEMQDMMTRGNLGLLEQAIALKAEQVRTVCEPGCPPAEQSQLGLGEPGKAAKPLDTVRKSYYSKDPSRAEKREIKCPTPGCDGTGHVTGLYPHHRSLSGCPHKDRIPPEILAMHENVLKCPTPGCTGQGHVNSNRNTHRSLSGCPIAAAEKLAKSHEKQQPQTGDPSKSSSNSDRILRPMCFVKQLEVPPYGSYRPNVAPATPRANLAKELEKFSKVTFDYASFDAQVFGKRMLAPKIQTSETSPKAFQCFDYSQDAEAAHMAATAILNLSTRCWEMPENLSTKPQDLPSKSVDIEVDENGTLDLSMHKHRKRENAFPSSSSCSSSPGVKSPDASQRHSSTSAPSSSMTSPQSSQASRQDEWDRPLDYTKPSRLREEEPEESEPAAHSFASSEADDQEVSEENFEERKYPGEVTLTNFKLKFLSKDIKKELLTCPTPGCDGSGHITGNYASHRSLSGCPLADKSLRNLMAAHSADLKCPTPGCDGSGHITGNYASHRSLSGCPRAKKSGVKVAPTKDDKEDPELMKCPVPGCVGLGHISGKYASHRSASGCPLAARRQKEGSLNGSSFSWKSLKNEGPTCPTPGCDGSGHANGSFLTHRSLSGCPRATFAGKKGKLSGDEVLSPKFKTSDVLENDEEIKQLNQEIRDLNESNSEMEAAMVQLQSQISSMEKNLKNIEEENKLIEEQNEALFLELSGLSQALIQSLANIRLPHMEPICEQNFDAYVSTLTDMYSNQDPENKDLLESIKQAVRGIQV

SEQ ID NO: 147248 - protein, 591 aa, Artificial Sequence
  derived and/or modified sequence
MSLENEDKRARTRSKALRGPPETTAADLSCPTPGCTGSGHVRGKYSRHRSLQSCPLAKKRKLEGAEAEHLVSKRKSHPLKLALDEGYGVDSDGSEDTEVKDASVSDESEGTLEGAEAETSGQDEIHRPETAEDPSRAEKREIKCPTPGCDGTGHVTGLYPHHRSLSGCPHKDRIPPEILAMHENVLKCPTPGCTGQGHVNSNRNTHRSLSGCPIAAAEKLAKSHEKQQPQTGDPSKSSSNSDRILRPMCFVKQLEVPPYGSYRPNVAPATPRANLAKELEKFSKVTFDYASFDAQVFGKRMLAPKIQTSETSPKAFQCFDYSQDAEAAHMAATAILNLSTRCWEMPENLSTKPQDLPSKSVDIEVDENGTLDLSMHKHRKRENAFPSSSSCSSSPGVKSPDASQRHSSTSAPSSSMTSPQSSQASRQDEWDRPLDYTKPSRLREEEPEESEPAAHSFASSEADDQEVSEENFEERKYPGEVTLTNFKLKFLSKDIKKELLTCPTPGCDGSGHITGNYASHRRCPTPGCDGSGHITGNYASHRSLSGCPRAKKSGVKVAPTKDDKEDPELMKYVGPCWLFHCIAELRFSCVL

SEQ ID NO: 147249 - protein, 1148 aa, Artificial Sequence
  derived and/or modified sequence
MSLENEDKRARTRSKALRGPPETTAADLSCPTPGCTGSGHVRGKYSRHRSLQSCPLAKKRKLEGAEAEHLVSKRKSHPLKLALDEGYGVDSDGSEDTEVKDASVSDESEGTLEGAEAETSGQDEIHRPETAEGRSPVKSHFGSNPIGSATASSKGSYSSYQGIIATSLLNLGQIAEETLVEEDLGQAAKPGPGIVHLLQEAAEGAASEEGEKGLFIQPEDAEEVVEVTTERSQDLCPQSLEDAASEESSKQKGILSHEEEDEEEEEEEEEEEEDEEEEEEEEEEEEEEEEEEEEEEEEEEEEEEEEAAPDVIFQEDTSHTSAQKAPELRGPESPSPKPEYSVIVEVRSDDDKDEDTHSRKSTVTDESEMQDMMTRGNLGLLEQAIALKAEQVRTVCEPGCPPAEQSQLGLGEPGKAAKPLDTVRKSYYSKDPSRAEKREIKCPTPGCDGTGHVTGLYPHHRSLSGCPHKDRIPPEILAMHENVLKCPTPGCTGQGHVNSNRNTHRSLSGCPIAAAEKLAKSHEKQQPQTGDPSKSSSNSDRILRPMCFVKQLEVPPYGSYRPNVAPATPRANLAKELEKFSKVTFDYASFDAQVFGKRMLAPKIQTSETSPKAFQSKPFPKASSPRHSPSSSYVRSTSSSSAGFDYSQDAEAAHMAATAILNLSTRCWEMPENLSTKPQDLPSKSVDIEVDENGTLDLSMHKHRKRENAFPSSSSCSSSPGVKSPDASQRHSSTSAPSSSMTSPQSSQASRQDEWDRPLDYTKPSRLREEEPEESEPAAHSFASSEADDQEVSEENFEERKYPGEVTLTNFKLKFLSKDIKKELLTCPTPGCDGSGHITGNYASHRSLSGCPLADKSLRNLMAAHSADLKCPTPGCDGSGHITGNYASHRSLSGCPRAKKSGVKVAPTKDDKEDPELMKCPVPGCVGLGHISGKYASHRSASGCPLAARRQKEGSLNGSSFSWKSLKNEGPTCPTPGCDGSGHANGSFLTHRSLSGCPRATFAGKKGKLSGDEVLSPKFKTSDVLENDEEIKQLNQEIRDLNESNSEMEAAMVQLQSQISSMEKNLKNIEEENKLIEEQNEALFLELSGLSQALIQSLANIRLPHMEPICEQNFDAYVSTLTDMYSNQDPENKDLLESIKQAVRGIQV

SEQ ID NO: 147250 - DNA, 5550 bp, Artificial Sequence
  derived and/or modified sequence
ctccgccagcccgtgccaccgctgctaatgagagcagtcattaagtaaatgagacgtcgcctttagctggcttaggagttcgcacactaaggggagaagatatttaattgaaacccgcacgcaggcttccccacatgtgaccgctgtacgggaggcagctgccttccctctcctcccccagtccaccctgcaccccccatgtaaatttcatgattgctttccgtgatgtcattttgaaagaggacagacaatagctgtggggaaagaaaatgagttccgaggtgagctgttaaatcagaggtggacacacggaggcaaggccagcagctgcaggacctcaagacacctgggcagacactgcaagatgagcttagaaaatgaagacaagcgagctcgcacccgatccaaggccctgcgaggacccccagagaccacagctgcagacctcagctgccccaccccaggatgcacaggctcagggcacgtccggggcaagtactccaggcaccgaagtttacagagctgccccctggccaagaagaggaagctggagggcgctgaggctgagcacctggtgtccaagaggaagtcacaccccctgaagctggctctggacgagggctatggtgtggacagcgacggcagtgaggacactgaggtgaaggacgcctctgtttcggatgaatcggaaggaactctggagggggccgaggctgagacgtcaggacaggacgagattcatcgccccgagacagctgaaggaaggagccccgtcaagtcccattttggatccaaccccatcggcagcgccactgcctcctccaagggcagctacagcagctaccagggaatcatcgcaacttctctcctgaacttgggtcaaattgctgaagagaccctggtggaagaggacttgggccaggcggccaagccaggtcctggcattgtgcacctgcttcaggaggctgcagagggagctgccagcgaggagggtgaaaagggcctcttcatccagccagaggatgccgaggaggtcgtcgaagtcaccaccgagcgctcccaggacctgtgtccccagtccctggaggatgcagccagtgaggagtccagcaagcagaaaggcatcctgagtcacgaagaggaggacgaggaggaggaggaggaggaagaggaggaggaggaggatgaagaagaggaagaggaagaggaggaggaagaggaagaggaggaggaggaagaggaagaggaggaggaagaggaagaggaagaggaggaggaggaggcagctcctgatgtgatctttcaggaagacacctctcacacctctgcccagaaggcccctgagctccggggcccagaatcacccagtcccaagcctgagtactctgttattgtggaggtccgctcggatgatgacaaggacgaggacacccactcccggaagtcaacagtcactgacgagtcggagatgcaggacatgatgacccggggaaacctgggcctcctggagcaggccatcgccctgaaggctgaacaggtgcgcacagtctgcgagccgggctgcccgcctgccgagcagagccagctgggcctgggagagccagggaaggcagcaaagcccctggacactgtgcggaagagttactacagtaaagatccttcaagagctgagaagcgtgagatcaagtgtccaacaccaggctgtgatggcactggccacgttaccgggttgtaccctcaccaccgcagcctttctggctgtccccacaaggataggatccccccagagatcttagccatgcatgagaacgtgctgaagtgccccactcctggctgcacaggccagggtcacgtgaacagcaaccgcaacacgcacagaagtttgtctgggtgtcccattgctgccgccgaaaaattagccaaatcccatgagaagcagcagccgcagacaggagatccttccaagagtagctccaattccgatcggatcctcaggcccatgtgcttcgtgaagcagctcgaggtccctccatatgggagctaccggcccaacgtggcccccgccacacccagggccaacttggccaaggagctggagaagttctccaaggtcacctttgactacgcaagtttcgatgctcaggtttttggcaaacgcatgcttgccccaaagattcagaccagcgaaacctcacctaaagcctttcaatgctttgactactcgcaggacgccgaggctgcacacatggctgccactgccatcctgaacctctccacgcgctgctgggagatgcctgagaacctcagcacgaagccacaggacctccccagcaagtctgtggatatcgaggtagacgaaaatggaaccctggacttgagcatgcacaaacaccgcaaacgagaaaatgctttccccagcagcagcagctgcagcagcagccccggtgtgaagtctcccgacgcctcccagcgccacagcagcaccagcgcccccagcagctccatgacctctccccagtccagccaggcctcccgccaggacgagtgggaccggcccctggactacaccaagcctagccgcctgagagaggaggaacctgaggagtcagagccagcagcccattcttttgcttcttctgaagcagatgaccaggaagtgtcggaagagaattttgaggagcggaagtatccgggggaagtcaccctgaccaactttaagctgaagtttctctccaaggacataaagaaggagctgctcacctgtcccacccctggctgtgacggcagcggccacatcaccgggaactacgcctcccaccgcagcctctctggttgccctcttgctgacaagagcctcagaaacctcatggctgcccactctgctgacctcaagtgccccacgcccggctgtgacggctctggccacatcacagggaactacgcttcacaccggagcttgtccggctgccctcgtgcaaagaaaagtggagtcaaggtggcacccaccaaggacgacaaggaggaccccgagctgatgaagtgcccagttccaggctgtgtggggctcggtcacatcagcgggaaatacgcctctcacaggagcgcatccggctgcccactggccgcccgcaggcagaaggaagggtccctcaatggctcgtcattctcctggaagtccctgaagaatgaaggaccgacctgccccaccccgggctgtgacggctctggccacgccaatgggagtttcctcacccaccggagtttgtcaggctgtcccagagcaacctttgctggaaagaagggaaaactgtcaggggatgaggtcctcagtccaaagttcaagactagcgacgtgttggagaatgatgaggagatcaagcagctgaaccaggagatccgagacctgaacgagtccaactcggagatggaggctgccatggtgcagctgcagtcccagatctcctccatggagaagaacctgaagaacatcgaggaggagaacaagctcattgaggagcagaatgaagccctgtttctggagctgtccggcctgagccaggccctcatccaaagtctcgccaatatccgccttccgcacatggagccaatatgcgaacagaatttcgatgcctatgtgagcaccctcaccgacatgtactccaaccaggacccggagaacaaggacctcctggagagcatcaagcaggctgtgaggggcatccaggtctaggccgtgtggtacccagaagtgtcccagcccaccacaccgtttacctccctcgccctgccccgcaccgtggggatgcccaactcacagtgacttcccgtttggggcccggtgtggccgcgggcgggtttatccaaagggatggctggaaattggccgctcccacgaggctccctccaggcttggggccgtggtggccctatctgtgtgcataggggcactgaagaattacaaagtgatttatttttgttttctgaaagaaatctgaagagcagctcaaagtctccagtggaagctcatggacaaggttctcagggaagttttggagtttgcaaccacagtattcctttgtctgtcgaggctgggagggtagccgtgagcgtggtgggtgggtggtgtgagtggcatcttggcctggaggacacgcctggggcagcgtgtctgtgctcagtgagggccgatgaagaaagtgcgttttctgttttcatttaattcagttttgtgttaagggtggaacaaagctctgttctagagggaaagttaggaataggcctcccagaggatactccagacagttgacaagcatcgcagcccctgtcaggtcaaggaattttaacctgggagactcctgaaaatcagcctaatgtctgggggcagctggcgctgaggctgtgcagatgtgtatggccttgggtcacagctccctactggggctgcagcctttagaccctgggtctgggatccacgtctagggaccactctggcttctgtgcatccacccaggcccccgacccatcactgccacattctccgggtcatggccgagcttgacctctgcatccatggtgacggaggtggcaatgacatcatcaaggtcagagggtaaattcctaacaggagaccacaaaggtttcacttcttttagatccatccaatatgcgaaaaaagggtacattttaatttaatgtgttaaaaacacaatgtccctaccgtgtaaatagaatccaagtcaattgtgactgcaattccaagttagtatttaaaaatagagaaattgcacttcctggaaaaaattaaaaagtagttagtttaattattctgtaaattatttaattttgtcaagatgtaagtatttatattcacagcctcttatgttaacgtttgctatttatttaacatttttatttattaattttatactatttcaactagaccccacaccagggcaccctaagaggggaaaaaagtgaattcaaagcaaaaataactatttgactataatataggccacaaaaaatcttgatataactcctagttataattttgatgcaaccaagttattttttatatattttgttatttattcttttaataatggaatttttttaaaaagtattttgtaactgaggaattttgataatttggggattttgttttcccttggtctaatggagagaaagacattttggttttctttttccattttgggttccttttgtttcaggcacggataacagcaaatggaattctgtatttattattatttaagtgtagcgcagatgtgtgtgcttgggcgtgtttctcgtgtcgcgtttgcgtgtcggctcttgcggtggagtcctgttgctgtgagggagtgctggccgcaggcagcctcgagtcaccgccaggctcacaggctgtgccacccgtccctccgacagctccaatactgtgaccctccttcctcaggaagcgcgttgaacccacagcactccgtggtgtgtttgcagggtgatttcctaataaaagtccactctgactgtgaaaaaaaaaaaaaaaaa

SEQ ID NO: 147251 - DNA, 3366 bp, Artificial Sequence
  derived and/or modified sequence
atgtcgctggagaacgaagacaagcgcgcaaggacccgtagcaaagccttgagaggaccgcccgagaccaccgccgcagacctaagctgtccaactcccgggtgtactggcagtggccacgttagaggtaaatactccagacatcgtagcctacagagctgcccgctagctaaaaagcgcaagttggaaggagctgaggccgagcacctggtttcgaagagaaagtctcaccctctaaaactggcgcttgacgagggatatggtgttgattccgacgggagtgaagacaccgaggtaaaggacgcttctgtgagtgacgagtccgagggcaccctcgagggtgcggaggccgagacatcaggtcaggacgagatacacaggccagagactgcggagggccgcagcccagtgaaatcacacttcggctcaaacccaatcggaagcgcaactgcctcatctaaggggagctattctagttatcaggggatcatagccacatccctgctgaacctcgggcagatcgcggaggaaaccctcgtggaggaggacctcgggcaggctgcaaagcccggacctggcattgttcacctgttgcaggaggccgctgaaggcgctgcctctgaagagggtgagaagggtctgttcattcagccggaggatgccgaggaagtggtcgaggttactacagagcggtctcaggatctgtgtccacagtccctcgaggacgcagcttcagaagagtccagcaaacaaaagggaattctaagccatgaggaggaggatgaggaggaggaggaagaggaagaggaggaagaagaggacgaggaggaggaggaagaagaagaggaagaggaggaagaggaggaggaggaagaagaagaagaagaagaggaggaggaagaagaggaagaggaggaggccgcgcccgatgtgatctttcaggaggacacctcacacacgagcgcccagaaggcccctgaattgaggggtccagagtcccccagtccaaagccagaatatagtgtgatagtagaagtaagatccgacgacgacaaggatgaggatacccatagtaggaagtccactgtgacagatgagtctgagatgcaggatatgatgaccagggggaatttggggctgctcgagcaggcaatcgctctcaaagctgagcaggtccgcaccgtgtgcgagcccggctgcccacctgctgaacagtcacagctgggccttggcgagcccggaaaagctgctaagccgctggatactgtgcggaaatcctattactcaaaagacccatcaagggccgagaaacgagaaataaaatgtccaacccccggatgtgacggaacaggtcacgtcaccggactatacccgcaccatagatcattatccggctgtccccataaggacagaattcccccggagatattagctatgcatgagaatgtgctcaaatgtcccacaccaggctgcacaggacagggacacgttaacagcaaccgaaatactcacagatctctgtctgggtgtcccatcgctgccgctgaaaagttagctaagtcccacgagaaacagcagccccaaaccggggaccctagtaagtcatcctctaattcagacaggatcttaagacccatgtgctttgtcaaacagctcgaagtcccaccgtacggatcgtaccgcccgaacgttgcccctgccaccccacgggccaatctggccaaagagcttgagaagttttctaaggtgacatttgattatgcctcattcgacgctcaagtgttcggaaagaggatgctggcacctaaaatccagacatctgaaacatcacctaaagcctttcagtgtttcgactattctcaagacgcggaagctgctcatatggctgcaaccgcaatcctgaacctgagcactcgctgctgggagatgccggagaacctctccactaagccccaagatctccctagcaagtccgtggacattgaagtggacgagaacggaacgttggatctgtcgatgcacaaacaccgcaagagagagaacgcatttccttcttctagtagttgctcttcaagcccgggcgtgaaatcccctgacgcctcacaacgacattcatcaacatcagcaccctctagtagcatgacttcaccacagagttctcaggcatcacggcaggatgaatgggatcgtcctctggattacaccaagccttctcggctgagggaagaggaaccggaagagtcggaacccgcggcccactccttcgccagcagcgaggcagatgaccaggaagtttccgaggaaaacttcgaggaacggaaataccccggtgaggtcactctcactaatttcaaactgaagttcctctccaaagacattaagaaagagctgctgacttgccctacgcctggctgcgacggctccggccatatcacaggcaactatgcctcccacaggagtctctctgggtgcccactggctgacaagtccctgaggaacctgatggccgcacactccgccgacctcaaatgccctacaccaggatgcgacggtagcggacacataacaggcaactacgcgtctcataggagcctgtcaggatgtccaagagccaaaaagagcggtgtgaaggtggcccctaccaaagacgacaaagaagatcctgagctgatgaagtgccccgttccaggttgtgtcggcctggggcacatttctgggaaatatgccagtcatagaagtgcttctggttgtccacttgcggcccgcaggcaaaaggaggggagtctgaacggcagcagcttctcctggaaaagccttaaaaacgaagggccaacttgtcccacacccggctgcgatggttctggccacgcaaacggcagttttttgacgcaccggagtctgagtggatgtcccagggccacgttcgccggtaagaagggcaaactgagcggggacgaagtgctatccccaaaatttaagacatcagacgtgctggaaaacgacgaggagattaagcagctgaatcaggaaattcgcgatttgaatgaatccaacagtgagatggaagcagccatggtgcagctccaatcacaaatctcatcaatggagaagaatttgaagaatatagaagaagagaataagctcattgaggagcagaacgaggccttatttttggagctgagtggtttgagtcaggccctgatccaatcgctggcaaatattagactaccacatatggagcccatttgtgagcagaatttcgatgcttacgtttccactctaactgacatgtacagcaaccaagaccctgagaataaggatctactggaaagcattaagcaagctgtgcgcgggattcaggtttag

SEQ ID NO: 147252 - DNA, 1776 bp, Artificial Sequence
  derived and/or modified sequence
atgagtctggagaacgaagataagagggctcgcaccaggtccaaagcgctgcggggccctccagaaaccaccgccgccgatctctcctgccccacacctggttgtaccggttcaggccacgttagagggaaatactctagacatcgatcacttcagtcatgtcccctggcgaaaaaacgtaagctggagggcgcagaggcagagcacctggtgtctaagagaaaatcacaccccctgaagcttgcactggatgaggggtatggtgtggatagcgacggctctgaggacactgaggtcaaggatgcttccgtgtctgacgagtcagagggaactctggagggagccgaggctgaaaccagcgggcaggatgagatccacaggcccgaaaccgccgaggacccttccagggctgaaaagcgagagatcaaatgccctacccctgggtgtgatggcacgggacacgtcacaggattgtatccccatcacaggagtttgagtggttgcccccataaggacaggatcccacccgagatacttgccatgcacgaaaatgtgttgaagtgccccactcctggatgtaccggccagggtcatgttaatagtaaccggaatactcatcgctccctgtcaggatgcccaatcgccgccgccgaaaagctagcaaagtcacacgaaaaacagcagccacaaacaggggacccctcaaaaagctcatccaattcagacaggattctgaggcccatgtgcttcgtcaaacagctggaagttcccccctatggctcgtacaggccgaatgtggcccccgccacaccacgagccaacctcgctaaggagctggaaaagtttagcaaagttacctttgactacgcctcctttgacgcccaggtctttggaaagcgtatgctcgctcctaaaatccagaccagtgaaaccagtccaaaggcattccagtgctttgattattcccaggacgccgaagcggctcacatggccgccaccgcaatccttaatctcagcacaaggtgctgggagatgcccgaaaaccttagcacaaagccccaagacctgccgagcaagtcagtggacatcgaggtggatgaaaatggaacactggacctgagtatgcacaaacacaggaagcgtgaaaacgcttttccgtcttcatcatcttgcagttctagtcctggtgtcaagagccctgacgccagtcagcggcactcatccaccagcgcccccagcagctccatgacctcaccccagagttcccaagcttccagacaggatgagtgggatcggccgctggactataccaagccatcgagattgagggaagaggagcccgaagaatctgagcccgcggctcactccttcgcgtctagcgaagctgacgaccaagaagtgtcagaggagaatttcgaggagcgcaagtatcccggggaagtgactttaactaattttaagttgaagttcctgtccaaggacatcaagaaagaactgctcacgtgtccgacacctgggtgtgacggtagtggtcatataacagggaattacgcctcccatcgacggtgccccacccctggctgcgatgggagcggccatataacaggcaactacgcatcacatcgttcactgtctgggtgtccgcgggcgaaaaaatctggagtgaaggtcgcacctacgaaagacgacaaagaggaccctgagctaatgaagtatgttgggccttgttggttgttccattgcatcgccgaactcagattctcctgcgtgctgtag

SEQ ID NO: 147253 - DNA, 3447 bp, Artificial Sequence
  derived and/or modified sequence
atgtccctggaaaatgaggacaagcgggctcgcacaagatccaaagctttgagagggccacctgagactacagcagcagacctgtcatgtcccactcctgggtgtactggaagcggccacgtgcggggcaagtactcacgtcatcgctccctgcaatcgtgtccgctggccaaaaaacgcaagctggagggagctgaagccgaacatctggtgagtaagcgaaaatcccaccctctgaaactagccctggatgagggctacggtgttgattcagatggctctgaggacaccgaggtgaaagacgcaagcgtttcagacgagagcgagggcacactcgagggcgccgaagccgagacatccggccaggacgagattcatagaccagaaactgctgaaggtaggtctccagtgaaatcacactttggcagcaatccaatcggcagcgccacggcatcttctaaggggtcttattcctcataccaaggtataatagccacttctctcctgaacttagggcagatcgccgaggaaaccctcgtggaagaggacctcggccaggccgcaaagccaggacctggtattgtccatctgttgcaggaggccgcggaaggagcggcgagcgaggagggagagaaggggctattcattcagccagaagatgccgaggaggtggtcgaggtaaccacagaaaggagccaggacctctgcccccagtcgctggaggatgctgcaagtgaggaatctagcaaacagaagggtatcctgagccacgaagaagaagatgaagaggaagaggaggaagaagaggaggaggaggaggacgaggaggaagaagaagaggaggaagaggaggaggaggaagaggaagaagaagaggaagaggaagaagaggaggaagaggaggaggaggaggaagaggcggccccagatgtgattttccaggaagatacatctcacacctcggcccagaaggcccctgagctgaggggacctgaatcaccttctcccaaaccggaatacagcgtgattgtggaggtacggtctgatgatgacaaggatgaagacacacattctagaaagtccacagttacagatgaaagcgagatgcaggatatgatgaccaggggcaacctgggtctgctggagcaagctatagccttaaaggccgaacaggtgcgcaccgtgtgcgaaccaggctgtcctcctgctgagcaaagtcagctaggtctgggtgagcctggaaaggccgctaagccactcgatacagtcagaaagagttattactcgaaggatccctccagggccgaaaaacgggagattaagtgtccaactcccggttgtgatgggaccggccacgtgaccggactgtatccccatcatcggtctttatctggctgtccccataaggatcgaattcctccagagattttggccatgcatgaaaacgttctgaaatgtccaacccccggatgtacaggtcagggacacgtaaactctaaccggaatactcacaggtccctctctgggtgcccaattgccgcggctgaaaaactcgccaagagtcatgaaaaacagcagccgcagacaggtgatcccagcaaatcctcctcaaattctgataggatcctgaggcccatgtgtttcgtaaaacaattggaggtgcccccctacggcagttatcgccccaatgtcgctcccgcgacaccccgcgccaatctggcaaaggaattggagaaattctccaaggtgacctttgattacgcaagctttgacgcccaagttttcggcaagaggatgctcgcgcccaagatacagacatcagaaactagccccaaagctttccagagcaaacctttcccaaaggcctcatccccgcggcacagcccaagcagctcttacgtgaggtccactagttctagctcggctgggtttgattactcacaagatgcggaagctgcacatatggcagccactgctatcctaaacctttctacccggtgttgggagatgccggaaaacctgtctaccaagcctcaggatctgccgagtaaatctgtggatattgaagtggatgaaaacggcactctggatctatccatgcacaagcacagaaagcgggagaatgcctttccttccagctctagctgttcttcctctccgggcgtgaagtctcccgacgcctcacagcgacacagctctacttccgcgccttctagcagcatgaccagtcctcagtcttcccaagcttcccggcaggatgaatgggatcgcccgcttgattatacgaagccaagtcggctgcgagaggaggaacccgaggagagcgagcccgctgcgcatagctttgcttcctctgaggctgacgaccaggaggtgtcagaggaaaacttcgaggaacgcaagtaccctggcgaagtaaccttgaccaattttaaactgaaattcttatcaaaggacatcaaaaaggagctcctgacctgtcctacacccgggtgtgacgggagcgggcacatcacgggcaattatgccagtcaccggtctttgtcagggtgccccctggccgacaaatctctgaggaaccttatggctgcacactccgcggacctcaaatgccctaccccagggtgtgatggaagcggccatattacaggtaactacgcctcccatcgcagtctgagcgggtgcccaagagcgaagaaatcaggcgttaaggtcgctcccactaaggacgataaagaagatccagaactgatgaagtgcccagtgcctggatgtgtcggcctgggtcacatcagtgggaaatatgctagtcatcggtccgcgtcgggctgtcctttggcggcgcgccgacaaaaggagggctccctgaacggctcatccttcagttggaagtctcttaaaaatgaagggccaacatgccccaccccaggctgtgatgggtccggtcacgctaatggaagcttcctcacccacagatctctgtctggatgcccacgggctacgttcgccgggaaaaagggcaaactctctggcgatgaagtgctgtctccaaaatttaagacctcggatgtgcttgagaatgatgaagaaataaagcagttgaaccaggagattagggatctgaacgagtccaactcggagatggaagctgccatggtgcagctgcagtcgcagatctcaagcatggagaagaatcttaaaaatatcgaggaagaaaataagttgatcgaagagcagaacgaagcactgtttcttgagctgagcggactgtcccaggctttgattcagtctctcgccaacattcggctaccacatatggagcccatttgcgaacagaactttgatgcatatgtctctactctgacggacatgtactcaaatcaggatccagagaacaaagatctcctcgagtccataaaacaggcagttcgggggatccaagtgtag

SEQ ID NO: 147254 - DNA, 3366 bp, Artificial Sequence
  derived and/or modified sequence
atgagcctggagaatgaagacaagagggcccggaccaggagcaaggccctgcggggccccccagagaccacagctgctgacctgagctgccccaccccaggctgcaccggcagcggccacgtgcggggcaagtacagccgccacaggagcctgcagagctgccccctggccaagaagaggaagctggagggcgctgaggccgagcacctggtgtccaagaggaagagccaccccctgaagctggccctggatgagggctatggagtggacagtgatggcagcgaggacacagaggtgaaggatgcctctgtgtctgatgagagcgagggcaccctggagggcgctgaggccgagaccagcggccaggatgagatccacaggcctgagacagctgagggccgcagccctgtgaagagccacttcggcagcaaccccatcggcagcgccacagccagcagcaagggcagctacagcagctaccagggcatcatcgccaccagcctgctgaacctgggccagattgctgaggagaccctggtggaggaggacctgggccaggccgccaagccaggccctggcatcgtgcacctgctgcaggaggccgctgagggcgccgccagcgaggagggggagaagggcctcttcatccagccagaagatgctgaggaggtggtggaggtgaccacagagaggagccaggacctgtgcccccagagcctggaggatgctgccagcgaggagagcagcaagcagaagggcatcctgagccatgaggaggaggatgaggaggaggaggaggaggaggaggaggaggaggaggatgaggaggaggaggaggaggaggaggaggaggaggaggaggaggaggaggaggaggaggaggaggaggaggaggaggaggaggaggaggaggaggaggccgccccagatgtgatcttccaggaggacaccagccacaccagcgcccagaaggcccctgagctgcggggccctgagagccccagccccaagccagagtacagcgtgattgtggaggtgcggagtgatgatgacaaggatgaggacacccacagcaggaagagcacagtgacagatgaaagtgagatgcaggacatgatgacccggggcaacctgggcctgctggagcaggccatcgccctgaaggccgagcaggtgaggacagtgtgtgagcccggctgccccccagctgagcagagccagctgggcctgggggagcccgggaaggccgccaagcccctggacacagtgaggaagagctactacagcaaggaccccagcagagctgagaagcgggagatcaagtgccccaccccaggctgtgatggcaccggccacgtgacaggcctgtacccccaccacaggagcctgagcggctgcccccacaaggaccgcatccccccagagatcctggccatgcatgaaaatgtgctgaagtgccccaccccaggctgcaccggccagggccacgtgaacagcaacagaaacacccacaggagcctgagcggctgccccatcgctgctgctgagaagctggccaagagccatgagaagcagcagccccagacaggagaccccagcaagagcagcagcaacagcgaccgcatcctgcggcccatgtgctttgtgaagcagctggaggtgcccccctacggcagctaccggcccaacgtggccccagccaccccccgggccaacctggccaaggagctggagaagttcagcaaggtgacctttgattatgccagctttgatgcccaggtgtttgggaagaggatgctggcccccaagatccagaccagcgagaccagccccaaggccttccagtgctttgactacagccaggatgctgaggccgcccacatggccgccacagccatcctgaacctgagcacccgctgctgggagatgcctgagaacctgagcaccaagccccaggacctgcccagcaagtctgtggacatcgaggtggatgaaaatggcaccctggacctgtccatgcacaagcacaggaagcgggagaatgccttccccagcagcagcagctgcagcagcagccctggggtgaagagcccagatgccagccagaggcacagcagcaccagcgcccccagcagctccatgaccagcccccagagcagccaggccagccggcaggatgagtgggaccggcccctggactacaccaagcccagccggctgcgggaggaggagcctgaggagagcgagcctgctgcccacagctttgccagcagcgaggctgatgaccaggaggtgtctgaggagaactttgaggagaggaagtacccaggagaggtgaccctgaccaacttcaagctgaagttcctgagcaaggacatcaagaaggagctgctgacctgccccaccccaggctgtgatggcagcggccacatcaccggcaactatgccagccacaggagcctgagcggctgccccctggccgacaagagcctgaggaacctgatggccgcccacagcgctgacctgaagtgccccaccccaggctgtgatggcagcggccacatcaccggcaactatgccagccacaggagcctgagcggctgcccccgggccaagaagagcggcgtgaaggtggcccccaccaaggatgacaaggaggaccctgagctgatgaagtgccctgtgcccggctgtgtgggcctgggccacatcagcggcaagtatgccagccacaggtctgccagcggctgccccctggccgcccggcggcagaaggagggcagcctgaatggcagcagcttctcctggaagagcctgaagaatgaaggccccacctgccccaccccaggctgtgatggcagcggccacgccaacggcagcttcctgacccacaggagcctgagcggctgcccccgggccacctttgctgggaagaagggcaagctgtctggagatgaggtgctgagccccaagttcaagaccagtgatgtgctggagaatgatgaggagatcaagcagctgaaccaggagatccgggacctgaatgaaagcaacagcgagatggaggccgccatggtgcagctgcagagccagatcagctccatggagaagaacctgaagaacatcgaggaggagaacaagctgattgaggagcagaatgaggccctcttcctggagctgagcggcctgagccaggccctgatccagagcctggccaacatccggctgccccacatggagcccatctgtgagcagaactttgatgcctacgtgtccaccctgacagacatgtacagcaaccaggaccctgagaacaaggacctgctggagagcatcaagcaggccgtgcggggcatccaggtgtag

SEQ ID NO: 147255 - DNA, 1776 bp, Artificial Sequence
  derived and/or modified sequence
atgagcctggagaatgaagacaagagggcccggaccaggagcaaggccctgcggggccccccagagaccacagctgctgacctgagctgccccaccccaggctgcaccggcagcggccacgtgcggggcaagtacagccgccacaggagcctgcagagctgccccctggccaagaagaggaagctggagggcgctgaggccgagcacctggtgtccaagaggaagagccaccccctgaagctggccctggatgagggctatggagtggacagtgatggcagcgaggacacagaggtgaaggatgcctctgtgtctgatgagagcgagggcaccctggagggcgctgaggccgagaccagcggccaggatgagatccacaggcctgagacagctgaggaccccagcagagctgagaagcgggagatcaagtgccccaccccaggctgtgatggcaccggccacgtgacaggcctgtacccccaccacaggagcctgagcggctgcccccacaaggaccgcatccccccagagatcctggccatgcatgaaaatgtgctgaagtgccccaccccaggctgcaccggccagggccacgtgaacagcaacagaaacacccacaggagcctgagcggctgccccatcgctgctgctgagaagctggccaagagccatgagaagcagcagccccagacaggagaccccagcaagagcagcagcaacagcgaccgcatcctgcggcccatgtgctttgtgaagcagctggaggtgcccccctacggcagctaccggcccaacgtggccccagccaccccccgggccaacctggccaaggagctggagaagttcagcaaggtgacctttgattatgccagctttgatgcccaggtgtttgggaagaggatgctggcccccaagatccagaccagcgagaccagccccaaggccttccagtgctttgactacagccaggatgctgaggccgcccacatggccgccacagccatcctgaacctgagcacccgctgctgggagatgcctgagaacctgagcaccaagccccaggacctgcccagcaagtctgtggacatcgaggtggatgaaaatggcaccctggacctgtccatgcacaagcacaggaagcgggagaatgccttccccagcagcagcagctgcagcagcagccctggggtgaagagcccagatgccagccagaggcacagcagcaccagcgcccccagcagctccatgaccagcccccagagcagccaggccagccggcaggatgagtgggaccggcccctggactacaccaagcccagccggctgcgggaggaggagcctgaggagagcgagcctgctgcccacagctttgccagcagcgaggctgatgaccaggaggtgtctgaggagaactttgaggagaggaagtacccaggagaggtgaccctgaccaacttcaagctgaagttcctgagcaaggacatcaagaaggagctgctgacctgccccaccccaggctgtgatggcagcggccacatcaccggcaactatgccagccaccggcgctgccccaccccaggctgtgatggcagcggccacatcactggaaattatgccagccacaggagcctgagcggctgcccccgggccaagaagtctggagtgaaggtggcccccaccaaggatgacaaggaggaccctgagctgatgaagtatgtgggcccctgctggctgttccactgcatcgccgagctgcgcttcagctgtgtgctgtag

SEQ ID NO: 147256 - DNA, 3447 bp, Artificial Sequence
  derived and/or modified sequence
atgagcctggagaatgaagacaagagggcccggaccaggagcaaggccctgcggggccccccagagaccacagctgctgacctgagctgccccaccccaggctgcaccggcagcggccacgtgcggggcaagtacagccgccacaggagcctgcagagctgccccctggccaagaagaggaagctggagggcgctgaggccgagcacctggtgtccaagaggaagagccaccccctgaagctggccctggatgagggctatggagtggacagtgatggcagcgaggacacagaggtgaaggatgcctctgtgtctgatgagagcgagggcaccctggagggcgctgaggccgagaccagcggccaggatgagatccacaggcctgagacagctgagggccgcagccctgtgaagagccacttcggcagcaaccccatcggcagcgccacagccagcagcaagggcagctacagcagctaccagggcatcatcgccaccagcctgctgaacctgggccagattgctgaggagaccctggtggaggaggacctgggccaggccgccaagccaggccctggcatcgtgcacctgctgcaggaggccgctgagggcgccgccagcgaggagggggagaagggcctcttcatccagccagaagatgctgaggaggtggtggaggtgaccacagagaggagccaggacctgtgcccccagagcctggaggatgctgccagcgaggagagcagcaagcagaagggcatcctgagccatgaggaggaggatgaggaggaggaggaggaggaggaggaggaggaggaggatgaggaggaggaggaggaggaggaggaggaggaggaggaggaggaggaggaggaggaggaggaggaggaggaggaggaggaggaggaggaggaggaggccgccccagatgtgatcttccaggaggacaccagccacaccagcgcccagaaggcccctgagctgcggggccctgagagccccagccccaagccagagtacagcgtgattgtggaggtgcggagtgatgatgacaaggatgaggacacccacagcaggaagagcacagtgacagatgaaagtgagatgcaggacatgatgacccggggcaacctgggcctgctggagcaggccatcgccctgaaggccgagcaggtgaggacagtgtgtgagcccggctgccccccagctgagcagagccagctgggcctgggggagcccgggaaggccgccaagcccctggacacagtgaggaagagctactacagcaaggaccccagcagagctgagaagcgggagatcaagtgccccaccccaggctgtgatggcaccggccacgtgacaggcctgtacccccaccacaggagcctgagcggctgcccccacaaggaccgcatccccccagagatcctggccatgcatgaaaatgtgctgaagtgccccaccccaggctgcaccggccagggccacgtgaacagcaacagaaacacccacaggagcctgagcggctgccccatcgctgctgctgagaagctggccaagagccatgagaagcagcagccccagacaggagaccccagcaagagcagcagcaacagcgaccgcatcctgcggcccatgtgctttgtgaagcagctggaggtgcccccctacggcagctaccggcccaacgtggccccagccaccccccgggccaacctggccaaggagctggagaagttcagcaaggtgacctttgattatgccagctttgatgcccaggtgtttgggaagaggatgctggcccccaagatccagaccagcgagaccagccccaaggccttccagagcaagcccttccccaaggccagcagccccaggcacagccccagcagcagctatgtgcgcagcaccagcagcagcagcgctggctttgactacagccaggatgctgaggccgcccacatggccgccacagccatcctgaacctgagcacccgctgctgggagatgcctgagaacctgagcaccaagccccaggacctgcccagcaagtctgtggacatcgaggtggatgaaaatggcaccctggacctgtccatgcacaagcacaggaagagagaaaatgccttccccagcagcagcagctgcagcagcagccctggggtgaagagcccagatgccagccagaggcacagcagcaccagcgcccccagcagctccatgaccagcccccagagcagccaggccagccggcaggatgagtgggaccggcccctggactacaccaagcccagccggctgcgggaggaggagcctgaggagagcgagcctgctgcccacagctttgccagcagcgaggctgatgaccaggaggtgtctgaagaaaattttgaggagaggaagtacccaggagaggtgaccctgaccaacttcaagctgaagttcctgagcaaggacatcaagaaggagctgctgacctgccccaccccaggctgtgatggcagcggccacatcactggaaattatgccagccacaggagcctgagcggctgccccctggccgacaagagcctgaggaacctgatggccgcccacagcgctgacctgaagtgccccaccccaggctgtgatggcagcggccacatcactggaaattatgccagccacaggagcctgagcggctgcccccgggccaagaagtctggagtgaaggtggcccccaccaaggatgacaaggaggaccctgagctgatgaagtgccctgtgcccggctgtgtgggcctgggccacatcagcggcaagtatgccagccacaggtctgccagcggctgccccctggccgcccggcggcagaaggagggcagcctgaatggcagcagcttctcctggaagagcctgaagaatgaaggccccacctgccccaccccaggctgtgatggcagcggccacgccaacggcagcttcctgacccacaggagcctgagcggctgcccccgggccacctttgctgggaagaagggcaagctgtctggagatgaggtgctgagccccaagttcaagaccagtgatgtgctggagaatgatgaggagatcaagcagctgaaccaggagatccgggacctgaatgaaagcaacagcgagatggaggccgccatggtgcagctgcagagccagatcagctccatggagaagaacctgaagaacatcgaggaggagaacaagctgattgaggagcagaatgaggccctcttcctggagctgagcggcctgagccaggccctgatccagagcctggccaacatccggctgccccacatggagcccatctgtgagcagaactttgatgcctacgtgtccaccctgacagacatgtacagcaaccaggaccctgagaacaaggacctgctggagagcatcaagcaggccgtgcggggcatccaggtgtag

SEQ ID NO: 147257 - DNA, 5533 bp, Artificial Sequence
  derived and/or modified sequence
ctccgccagcccgtgccaccgctgctaatgagagcagtcattaagtaaatgagacgtcgcctttagctggcttaggagttcgcacactaaggggagaagatatttaattgaaacccgcacgcaggcttccccacatgtgaccgctgtacgggaggcagctgccttccctctcctcccccagtccaccctgcaccccccatgtaaatttcatgattgctttccgtgatgtcattttgaaagaggacagacaatagctgtggggaaagaaaatgagttccgaggtgagctgttaaatcagaggtggacacacggaggcaaggccagcagctgcaggacctcaagacacctgggcagacactgcaagatgagcttagaaaatgaagacaagcgagctcgcacccgatccaaggccctgcgaggacccccagagaccacagctgcagacctcagctgccccaccccaggatgcacaggctcagggcacgtccggggcaagtactccaggcaccgaagtttacagagctgccccctggccaagaagaggaagctggagggcgctgaggctgagcacctggtgtccaagaggaagtcacaccccctgaagctggctctggacgagggctatggtgtggacagcgacggcagtgaggacactgaggtgaaggacgcctctgtttcggatgaatcggaaggaactctggagggggccgaggctgagacgtcaggacaggacgagattcatcgccccgagacagctgaaggaaggagccccgtcaagtcccattttggatccaaccccatcggcagcgccactgcctcctccaagggcagctacagcagctaccagggaatcatcgcaacttctctcctgaacttgggtcaaattgctgaagagaccctggtggaagaggacttgggccaggcggccaagccaggtcctggcattgtgcacctgcttcaggaggctgcagagggagctgccagcgaggagggtgaaaagggcctcttcatccagccagaggatgccgaggaggtcgtcgaagtcaccaccgagcgctcccaggacctgtgtccccagtccctggaggatgcagccagtgaggagtccagcaagcagaaaggcatcctgagtcacgaagaggaggacgaggaggaggaggaggaggaagaggaggaggaggaggatgaagaagaggaagaggaagaggaggaggaagaggaagaggaggaggaggaagaggaagaggaggaggaagaggaagaggaagaggaggaggaggaggcagctcctgatgtgatctttcaggaagacacctctcacacctctgcccagaaggcccctgagctccggggcccagaatcacccagtcccaagcctgagtactctgttattgtggaggtccgctcggatgatgacaaggacgaggacacccactcccggaagtcaacagtcactgacgagtcggagatgcaggacatgatgacccggggaaacctgggcctcctggagcaggccatcgccctgaaggctgaacaggtgcgcacagtctgcgagccgggctgcccgcctgccgagcagagccagctgggcctgggagagccagggaaggcagcaaagcccctggacactgtgcggaagagttactacagtaaagatccttcaagagctgagaagcgtgagatcaagtgtccaacaccaggctgtgatggcactggccacgttaccgggttgtaccctcaccaccgcagcctttctggctgtccccacaaggataggatccccccagagatcttagccatgcatgagaacgtgctgaagtgccccactcctggctgcacaggccagggtcacgtgaacagcaaccgcaacacgcacagaagtttgtctgggtgtcccattgctgccgccgaaaaattagccaaatcccatgagaagcagcagccgcagacaggagatccttccaagagtagctccaattccgatcggatcctcaggcccatgtgcttcgtgaagcagctcgaggtccctccatatgggagctaccggcccaacgtggcccccgccacacccagggccaacttggccaaggagctggagaagttctccaaggtcacctttgactacgcaagtttcgatgctcaggtttttggcaaacgcatgcttgccccaaagattcagaccagcgaaacctcacctaaagcctttcaatgctttgactactcgcaggacgccgaggctgcacacatggctgccactgccatcctgaacctctccacgcgctgctgggagatgcctgagaacctcagcacgaagccacaggacctccccagcaagtctgtggatatcgaggtagacgaaaatggaaccctggacttgagcatgcacaaacaccgcaaacgagaaaatgctttccccagcagcagcagctgcagcagcagccccggtgtgaagtctcccgacgcctcccagcgccacagcagcaccagcgcccccagcagctccatgacctctccccagtccagccaggcctcccgccaggacgagtgggaccggcccctggactacaccaagcctagccgcctgagagaggaggaacctgaggagtcagagccagcagcccattcttttgcttcttctgaagcagatgaccaggaagtgtcggaagagaattttgaggagcggaagtatccgggggaagtcaccctgaccaactttaagctgaagtttctctccaaggacataaagaaggagctgctcacctgtcccacccctggctgtgacggcagcggccacatcaccgggaactacgcctcccaccgcagcctctctggttgccctcttgctgacaagagcctcagaaacctcatggctgcccactctgctgacctcaagtgccccacgcccggctgtgacggctctggccacatcacagggaactacgcttcacaccggagcttgtccggctgccctcgtgcaaagaaaagtggagtcaaggtggcacccaccaaggacgacaaggaggaccccgagctgatgaagtgcccagttccaggctgtgtggggctcggtcacatcagcgggaaatacgcctctcacaggagcgcatccggctgcccactggccgcccgcaggcagaaggaagggtccctcaatggctcgtcattctcctggaagtccctgaagaatgaaggaccgacctgccccaccccgggctgtgacggctctggccacgccaatgggagtttcctcacccaccggagtttgtcaggctgtcccagagcaacctttgctggaaagaagggaaaactgtcaggggatgaggtcctcagtccaaagttcaagactagcgacgtgttggagaatgatgaggagatcaagcagctgaaccaggagatccgagacctgaacgagtccaactcggagatggaggctgccatggtgcagctgcagtcccagatctcctccatggagaagaacctgaagaacatcgaggaggagaacaagctcattgaggagcagaatgaagccctgtttctggagctgtccggcctgagccaggccctcatccaaagtctcgccaatatccgccttccgcacatggagccaatatgcgaacagaatttcgatgcctatgtgagcaccctcaccgacatgtactccaaccaggacccggagaacaaggacctcctggagagcatcaagcaggctgtgaggggcatccaggtctaggccgtgtggtacccagaagtgtcccagcccaccacaccgtttacctccctcgccctgccccgcaccgtggggatgcccaactcacagtgacttcccgtttggggcccggtgtggccgcgggcgggtttatccaaagggatggctggaaattggccgctcccacgaggctccctccaggcttggggccgtggtggccctatctgtgtgcataggggcactgaagaattacaaagtgatttatttttgttttctgaaagaaatctgaagagcagctcaaagtctccagtggaagctcatggacaaggttctcagggaagttttggagtttgcaaccacagtattcctttgtctgtcgaggctgggagggtagccgtgagcgtggtgggtgggtggtgtgagtggcatcttggcctggaggacacgcctggggcagcgtgtctgtgctcagtgagggccgatgaagaaagtgcgttttctgttttcatttaattcagttttgtgttaagggtggaacaaagctctgttctagagggaaagttaggaataggcctcccagaggatactccagacagttgacaagcatcgcagcccctgtcaggtcaaggaattttaacctgggagactcctgaaaatcagcctaatgtctgggggcagctggcgctgaggctgtgcagatgtgtatggccttgggtcacagctccctactggggctgcagcctttagaccctgggtctgggatccacgtctagggaccactctggcttctgtgcatccacccaggcccccgacccatcactgccacattctccgggtcatggccgagcttgacctctgcatccatggtgacggaggtggcaatgacatcatcaaggtcagagggtaaattcctaacaggagaccacaaaggtttcacttcttttagatccatccaatatgcgaaaaaagggtacattttaatttaatgtgttaaaaacacaatgtccctaccgtgtaaatagaatccaagtcaattgtgactgcaattccaagttagtatttaaaaatagagaaattgcacttcctggaaaaaattaaaaagtagttagtttaattattctgtaaattatttaattttgtcaagatgtaagtatttatattcacagcctcttatgttaacgtttgctatttatttaacatttttatttattaattttatactatttcaactagaccccacaccagggcaccctaagaggggaaaaaagtgaattcaaagcaaaaataactatttgactataatataggccacaaaaaatcttgatataactcctagttataattttgatgcaaccaagttattttttatatattttgttatttattcttttaataatggaatttttttaaaaagtattttgtaactgaggaattttgataatttggggattttgttttcccttggtctaatggagagaaagacattttggttttctttttccattttgggttccttttgtttcaggcacggataacagcaaatggaattctgtatttattattatttaagtgtagcgcagatgtgtgtgcttgggcgtgtttctcgtgtcgcgtttgcgtgtcggctcttgcggtggagtcctgttgctgtgagggagtgctggccgcaggcagcctcgagtcaccgccaggctcacaggctgtgccacccgtccctccgacagctccaatactgtgaccctccttcctcaggaagcgcgttgaacccacagcactccgtggtgtgtttgcagggtgatttcctaataaaagtccactctgactgtg

SEQ ID NO: 147258 - DNA, 2059 bp, Artificial Sequence
  derived and/or modified sequence
cggagtagcaggagtttgcaagctgcttcattaacttggagccagtggaatgtctgggatcgtctgtgatttggaaaccggtggcagaatgttcccgcgtttctggtcctcatcagtcagaaaatgagttccgaggtgagctgttaaatcagaggtggacacacggaggcaaggccagcagctgcaggacctcaagacacctgggcagacactgcaagatgagcttagaaaatgaagacaagcgagctcgcacccgatccaaggccctgcgaggacccccagagaccacagctgcagacctcagctgccccaccccaggatgcacaggctcagggcacgtccggggcaagtactccaggcaccgaagtttacagagctgccccctggccaagaagaggaagctggagggcgctgaggctgagcacctggtgtccaagaggaagtcacaccccctgaagctggctctggacgagggctatggtgtggacagcgacggcagtgaggacactgaggtgaaggacgcctctgtttcggatgaatcggaaggaactctggagggggccgaggctgagacgtcaggacaggacgagattcatcgccccgagacagctgaagatccttcaagagctgagaagcgtgagatcaagtgtccaacaccaggctgtgatggcactggccacgttaccgggttgtaccctcaccaccgcagcctttctggctgtccccacaaggataggatccccccagagatcttagccatgcatgagaacgtgctgaagtgccccactcctggctgcacaggccagggtcacgtgaacagcaaccgcaacacgcacagaagtttgtctgggtgtcccattgctgccgccgaaaaattagccaaatcccatgagaagcagcagccgcagacaggagatccttccaagagtagctccaattccgatcggatcctcaggcccatgtgcttcgtgaagcagctcgaggtccctccatatgggagctaccggcccaacgtggcccccgccacacccagggccaacttggccaaggagctggagaagttctccaaggtcacctttgactacgcaagtttcgatgctcaggtttttggcaaacgcatgcttgccccaaagattcagaccagcgaaacctcacctaaagcctttcaatgctttgactactcgcaggacgccgaggctgcacacatggctgccactgccatcctgaacctctccacgcgctgctgggagatgcctgagaacctcagcacgaagccacaggacctccccagcaagtctgtggatatcgaggtagacgaaaatggaaccctggacttgagcatgcacaaacaccgcaaacgagaaaatgctttccccagcagcagcagctgcagcagcagccccggtgtgaagtctcccgacgcctcccagcgccacagcagcaccagcgcccccagcagctccatgacctctccccagtccagccaggcctcccgccaggacgagtgggaccggcccctggactacaccaagcctagccgcctgagagaggaggaacctgaggagtcagagccagcagcccattcttttgcttcttctgaagcagatgaccaggaagtgtcggaagagaattttgaggagcggaagtatccgggggaagtcaccctgaccaactttaagctgaagtttctctccaaggacataaagaaggagctgctcacctgtcccacccctggctgtgacggcagcggccacatcaccgggaactacgcctcccaccgcaggtgccccacgcccggctgtgacggctctggccacatcacagggaactacgcttcacaccggagcttgtccggctgccctcgtgcaaagaaaagtggagtcaaggtggcacccaccaaggacgacaaggaggaccccgagctgatgaagtacgttgggccatgctggctctttcattgcattgcggaattgagattttcgtgtgttttataatgtaaaaaaactcctactagattcccttttcattaatacaacgggtcacctaactgaccaacgcc

SEQ ID NO: 147259 - DNA, 5614 bp, Artificial Sequence
  derived and/or modified sequence
ctccgccagcccgtgccaccgctgctaatgagagcagtcattaagtaaatgagacgtcgcctttagctggcttaggagttcgcacactaaggggagaagatatttaattgaaacccgcacgcaggcttccccacatgtgaccgctgtacgggaggcagctgccttccctctcctcccccagtccaccctgcaccccccatgtaaatttcatgattgctttccgtgatgtcattttgaaagaggacagacaatagctgtggggaaagaaaatgagttccgaggtgagctgttaaatcagaggtggacacacggaggcaaggccagcagctgcaggacctcaagacacctgggcagacactgcaagatgagcttagaaaatgaagacaagcgagctcgcacccgatccaaggccctgcgaggacccccagagaccacagctgcagacctcagctgccccaccccaggatgcacaggctcagggcacgtccggggcaagtactccaggcaccgaagtttacagagctgccccctggccaagaagaggaagctggagggcgctgaggctgagcacctggtgtccaagaggaagtcacaccccctgaagctggctctggacgagggctatggtgtggacagcgacggcagtgaggacactgaggtgaaggacgcctctgtttcggatgaatcggaaggaactctggagggggccgaggctgagacgtcaggacaggacgagattcatcgccccgagacagctgaaggaaggagccccgtcaagtcccattttggatccaaccccatcggcagcgccactgcctcctccaagggcagctacagcagctaccagggaatcatcgcaacttctctcctgaacttgggtcaaattgctgaagagaccctggtggaagaggacttgggccaggcggccaagccaggtcctggcattgtgcacctgcttcaggaggctgcagagggagctgccagcgaggagggtgaaaagggcctcttcatccagccagaggatgccgaggaggtcgtcgaagtcaccaccgagcgctcccaggacctgtgtccccagtccctggaggatgcagccagtgaggagtccagcaagcagaaaggcatcctgagtcacgaagaggaggacgaggaggaggaggaggaggaagaggaggaggaggaggatgaagaagaggaagaggaagaggaggaggaagaggaagaggaggaggaggaagaggaagaggaggaggaagaggaagaggaagaggaggaggaggaggcagctcctgatgtgatctttcaggaagacacctctcacacctctgcccagaaggcccctgagctccggggcccagaatcacccagtcccaagcctgagtactctgttattgtggaggtccgctcggatgatgacaaggacgaggacacccactcccggaagtcaacagtcactgacgagtcggagatgcaggacatgatgacccggggaaacctgggcctcctggagcaggccatcgccctgaaggctgaacaggtgcgcacagtctgcgagccgggctgcccgcctgccgagcagagccagctgggcctgggagagccagggaaggcagcaaagcccctggacactgtgcggaagagttactacagtaaagatccttcaagagctgagaagcgtgagatcaagtgtccaacaccaggctgtgatggcactggccacgttaccgggttgtaccctcaccaccgcagcctttctggctgtccccacaaggataggatccccccagagatcttagccatgcatgagaacgtgctgaagtgccccactcctggctgcacaggccagggtcacgtgaacagcaaccgcaacacgcacagaagtttgtctgggtgtcccattgctgccgccgaaaaattagccaaatcccatgagaagcagcagccgcagacaggagatccttccaagagtagctccaattccgatcggatcctcaggcccatgtgcttcgtgaagcagctcgaggtccctccatatgggagctaccggcccaacgtggcccccgccacacccagggccaacttggccaaggagctggagaagttctccaaggtcacctttgactacgcaagtttcgatgctcaggtttttggcaaacgcatgcttgccccaaagattcagaccagcgaaacctcacctaaagcctttcaatccaaacctttcccaaaggcctcttcccccaggcacagcccctccagtagttatgtgaggagcacttcatcctcttctgcaggctttgactactcgcaggacgccgaggctgcacacatggctgccactgccatcctgaacctctccacgcgctgctgggagatgcctgagaacctcagcacgaagccacaggacctccccagcaagtctgtggatatcgaggtagacgaaaatggaaccctggacttgagcatgcacaaacaccgcaaacgagaaaatgctttccccagcagcagcagctgcagcagcagccccggtgtgaagtctcccgacgcctcccagcgccacagcagcaccagcgcccccagcagctccatgacctctccccagtccagccaggcctcccgccaggacgagtgggaccggcccctggactacaccaagcctagccgcctgagagaggaggaacctgaggagtcagagccagcagcccattcttttgcttcttctgaagcagatgaccaggaagtgtcggaagagaattttgaggagcggaagtatccgggggaagtcaccctgaccaactttaagctgaagtttctctccaaggacataaagaaggagctgctcacctgtcccacccctggctgtgacggcagcggccacatcaccgggaactacgcctcccaccgcagcctctctggttgccctcttgctgacaagagcctcagaaacctcatggctgcccactctgctgacctcaagtgccccacgcccggctgtgacggctctggccacatcacagggaactacgcttcacaccggagcttgtccggctgccctcgtgcaaagaaaagtggagtcaaggtggcacccaccaaggacgacaaggaggaccccgagctgatgaagtgcccagttccaggctgtgtggggctcggtcacatcagcgggaaatacgcctctcacaggagcgcatccggctgcccactggccgcccgcaggcagaaggaagggtccctcaatggctcgtcattctcctggaagtccctgaagaatgaaggaccgacctgccccaccccgggctgtgacggctctggccacgccaatgggagtttcctcacccaccggagtttgtcaggctgtcccagagcaacctttgctggaaagaagggaaaactgtcaggggatgaggtcctcagtccaaagttcaagactagcgacgtgttggagaatgatgaggagatcaagcagctgaaccaggagatccgagacctgaacgagtccaactcggagatggaggctgccatggtgcagctgcagtcccagatctcctccatggagaagaacctgaagaacatcgaggaggagaacaagctcattgaggagcagaatgaagccctgtttctggagctgtccggcctgagccaggccctcatccaaagtctcgccaatatccgccttccgcacatggagccaatatgcgaacagaatttcgatgcctatgtgagcaccctcaccgacatgtactccaaccaggacccggagaacaaggacctcctggagagcatcaagcaggctgtgaggggcatccaggtctaggccgtgtggtacccagaagtgtcccagcccaccacaccgtttacctccctcgccctgccccgcaccgtggggatgcccaactcacagtgacttcccgtttggggcccggtgtggccgcgggcgggtttatccaaagggatggctggaaattggccgctcccacgaggctccctccaggcttggggccgtggtggccctatctgtgtgcataggggcactgaagaattacaaagtgatttatttttgttttctgaaagaaatctgaagagcagctcaaagtctccagtggaagctcatggacaaggttctcagggaagttttggagtttgcaaccacagtattcctttgtctgtcgaggctgggagggtagccgtgagcgtggtgggtgggtggtgtgagtggcatcttggcctggaggacacgcctggggcagcgtgtctgtgctcagtgagggccgatgaagaaagtgcgttttctgttttcatttaattcagttttgtgttaagggtggaacaaagctctgttctagagggaaagttaggaataggcctcccagaggatactccagacagttgacaagcatcgcagcccctgtcaggtcaaggaattttaacctgggagactcctgaaaatcagcctaatgtctgggggcagctggcgctgaggctgtgcagatgtgtatggccttgggtcacagctccctactggggctgcagcctttagaccctgggtctgggatccacgtctagggaccactctggcttctgtgcatccacccaggcccccgacccatcactgccacattctccgggtcatggccgagcttgacctctgcatccatggtgacggaggtggcaatgacatcatcaaggtcagagggtaaattcctaacaggagaccacaaaggtttcacttcttttagatccatccaatatgcgaaaaaagggtacattttaatttaatgtgttaaaaacacaatgtccctaccgtgtaaatagaatccaagtcaattgtgactgcaattccaagttagtatttaaaaatagagaaattgcacttcctggaaaaaattaaaaagtagttagtttaattattctgtaaattatttaattttgtcaagatgtaagtatttatattcacagcctcttatgttaacgtttgctatttatttaacatttttatttattaattttatactatttcaactagaccccacaccagggcaccctaagaggggaaaaaagtgaattcaaagcaaaaataactatttgactataatataggccacaaaaaatcttgatataactcctagttataattttgatgcaaccaagttattttttatatattttgttatttattcttttaataatggaatttttttaaaaagtattttgtaactgaggaattttgataatttggggattttgttttcccttggtctaatggagagaaagacattttggttttctttttccattttgggttccttttgtttcaggcacggataacagcaaatggaattctgtatttattattatttaagtgtagcgcagatgtgtgtgcttgggcgtgtttctcgtgtcgcgtttgcgtgtcggctcttgcggtggagtcctgttgctgtgagggagtgctggccgcaggcagcctcgagtcaccgccaggctcacaggctgtgccacccgtccctccgacagctccaatactgtgaccctccttcctcaggaagcgcgttgaacccacagcactccgtggtgtgtttgcagggtgatttcctaataaaagtccactctgactgtg

SEQ ID NO: 147260 - DNA, 3366 bp, Artificial Sequence
  derived and/or modified sequence
atgagcctggagaacgaggacaagcgggcccggacccggagcaaggctctgcgcggcccaccggagacaacagctgcggacctttcgtgccccactcctggatgcaccggctccggtcatgtgcgcggcaaatacagcaggcaccggtctttacagtcatgcccactggcaaagaaaaggaaactggagggagccgaggccgagcatctcgtcagtaaacggaagagccatcctctgaagctggctctggatgaagggtatggcgtcgactcagatggtagcgaggacacagaggtgaaagatgccagcgtcagtgacgaatcagaaggcactctagagggcgccgaggctgagacgtctgggcaagacgaaatccacagacctgagacagctgagggacgcagccccgttaaatcccatttcggttccaacccgatagggtcggctacagccagctccaagggttcttattctagttatcagggaattatcgcaacatcactcctgaacctggggcagattgctgaggagacgctggtggaagaggaccttggtcaggccgctaaaccaggacctggcatcgtacacctgctgcaggaagcagctgaaggggctgcctcagaagaaggcgagaaggggctctttatccagccagaggatgccgaggaggtcgttgaggtgactacagaaaggtcccaagacctctgtccccaatcactggaggacgctgcctcagaggaatcatcgaagcagaagggaatactttcacacgaggaggaggacgaagaagaggaggaagaggaggaggaagaagaagaagatgaggaagaggaagaagaggaagaagaggaagaggaagaggaggaggaggaagaagaggaagaggaggaagaggaggaggaggaagaggaagaagaggccgcccccgacgtaatctttcaggaggacacctcacacacatccgctcagaaggcgccagaattacgcggtccagagtcaccgtctcctaagcctgagtacagcgtgatcgttgaggtgagatctgacgacgataaagatgaagacacccacagtcgcaagagtaccgtgacagacgagtccgagatgcaagacatgatgactagggggaacctgggcctcctagagcaggctatcgcattaaaggccgagcaagttagaaccgtctgcgagcccggctgccctcccgccgaacagagccagctgggtctaggtgagccaggcaaggctgctaagcccctggacaccgtgcggaaatcctattattccaaggacccatcacgcgccgagaaaagagagataaagtgccctacacctggttgcgacggcacagggcacgttactggcctttatccacatcatcgctctcttagcggatgtccgcacaaggatcggatcccccctgagattctagcaatgcacgaaaacgtcttgaagtgccctacccctggttgcaccggacaagggcacgtaaactcaaatagaaatactcatcggtccctctccggctgccctatagcagctgcagagaaattagccaagagccacgagaagcagcaaccacaaactggcgatccatcaaaatcctcaagcaattccgacagaatcctacggcctatgtgtttcgtcaaacagttggaggttcccccttatggatcatacaggcctaacgtcgcgccggccactcccagagcaaatcttgccaaggagctcgaaaagttctctaaagtgaccttcgactacgctagttttgatgcgcaggtgttcggtaagcggatgctcgccccgaagattcaaacgtcagaaacttcgcccaaggcatttcagtgcttcgattatagtcaagatgccgaagccgctcacatggctgctactgccattctcaacctatcaacacgatgttgggaaatgcctgaaaacctcagcactaaacctcaggacctcccgtccaaaagtgttgatatcgaagttgacgagaacgggacactggatctcagtatgcacaaacaccgcaagcgagagaatgcttttccgtcgtccagctcctgttcctcatcaccgggcgtgaagtcacctgacgcatcacagcggcacagcagcacctcggcaccctcatcatccatgactagtccccagtcaagccaggcttcacgacaagacgaatgggacagaccactcgactataccaaaccttctaggctgcgcgaggaggagcccgaagaaagtgaacccgccgctcactcttttgccagtagcgaggcagatgaccaagaggtgtccgaggagaatttcgaagagagaaagtaccctggagaggtgacgctgactaatttcaaactcaagttcttgagcaaagacattaaaaaggaactcctcacctgtcccaccccagggtgtgatggttctgggcacatcacgggtaactatgcttcacataggagcctttctggctgtcctctggcggataagtctctgcggaatttaatggcagcgcactcagccgacctgaagtgccctacaccaggctgtgacgggagtgggcacatcactggcaattacgcctcacacaggtcactctccggctgtccgagggccaagaagagcggcgttaaggttgcaccgacgaaagatgacaaagaagaccccgagctgatgaaatgtcctgtaccagggtgtgtgggactgggacacataagtgggaagtatgcctcacataggtctgcctcgggatgtccactggctgcaagaagacagaaggaaggcagcctgaatggctcttccttttcttggaaatccctaaaaaacgagggccccacttgccctactcccggctgcgatggttcagggcacgctaacggatcctttttaacccaccgttccctgtccgggtgtccacgggctaccttcgccgggaagaagggtaaactgtcaggagacgaggttctgtcaccaaagttcaaaacatccgatgtgctggagaacgatgaagagattaagcaattaaatcaggagatccgggatctgaatgagtccaactccgaaatggaagccgccatggtgcaactacagtcccaaatatctagtatggagaagaacctgaagaatatcgaagaggagaacaagctgatcgaagaacaaaacgaagccctgttcctcgagttaagcgggctgagtcaggcactgatccagtccctcgccaacatccggctcccccacatggagcccatctgcgagcagaatttcgatgcctacgtgagtactttaaccgacatgtattccaatcaggaccctgagaataaggacctgctcgagtcaatcaaacaggctgttcggggaatccaagtctag

SEQ ID NO: 147261 - DNA, 1776 bp, Artificial Sequence
  derived and/or modified sequence
atgagcctggagaacgaggacaagcgggcccggacccggagcaaggccctgagagggccccctgaaacaacagccgcggacctctcttgcccaacaccaggatgtactggaagcggtcacgtgaggggaaagtacagtcgccaccggagcttgcagtcatgtcccctggcgaagaaacgtaaactggagggtgccgaagctgagcatctggtttcaaaaaggaagtcccacccactgaaacttgcactcgatgagggttacggtgtggattctgacggtagcgaggatactgaggtgaaggacgcgagcgtgtccgacgagtccgaaggaactttagagggcgcagaagcagaaacaagcggccaggatgagatccaccgccctgaaacagccgaggacccatcacgagctgaaaagagagagattaagtgccctacccctggctgcgatggtaccggacatgtcaccggactgtatccgcatcatcgctcactttccgggtgtccccacaaggacaggatcccgcctgagatcctcgctatgcatgagaacgtgctcaagtgtcctacccctggctgtacgggacagggacatgttaatagcaaccgaaacacccaccgcagcttgagtgggtgtcctatagcagccgcggaaaaactggctaagtctcatgagaaacaacagccccagaccggtgatccctcaaaaagctcctccaactctgatcggatactgaggcccatgtgcttcgtgaagcagctggaagtcccaccctatggcagttaccgccctaatgtggctcccgccacaccacgagctaatcttgccaaagagctggaaaagtttagtaaagtcacttttgactatgcctcttttgatgctcaggtattcggcaagaggatgctggccccaaagattcagactagcgagacaagtcccaaggcattccaatgcttcgactattcacaggatgccgaggctgcgcacatggccgcaaccgcaatcttgaacctgagcactcgctgctgggagatgcctgagaacctgtcaaccaaaccacaggatctgccaagcaagagcgtggacatcgaggttgatgaaaacgggacattggatttgtcaatgcacaagcaccggaaacgggagaacgcctttccgtcgtccagttcctgtagctcaagtcctggagttaaatctccagacgccagccagcgtcactccagcacaagtgcgccttctagcagtatgacgtcaccacaatctagccaggcatcccgacaggatgagtgggatcgccctctagactacaccaagccttctagactgagagaggaggagccggaggaatccgagccagctgcccactctttcgccagcagcgaagcagatgaccaagaggtgtctgaggagaattttgaggagaggaagtaccccggcgaagtgacactgactaattttaagttgaaattcctctcaaaggacattaagaaggaattgctcacatgcccgacaccggggtgtgacggcagcggccacattacagggaactatgcaagtcacagaaggtgtcctactcccggctgtgacggctctggccatatcacagggaactacgcttctcacagatctctgtccggctgccctcgcgccaagaagtcaggggtaaaggtagccccaaccaaggacgataaagaggatccggaactgatgaaatatgtggggccatgctggctttttcactgcatcgccgagctgagatttagctgtgtgctctag

SEQ ID NO: 147262 - DNA, 3447 bp, Artificial Sequence
  derived and/or modified sequence
atgagcctggagaacgaggacaagcgggcccggacccggagcaaggcgttgagaggacctccagaaaccacagcggcagatctatcctgcccgacacctggctgtaccggcagcgggcatgttcggggcaagtactcacgccacaggtcactgcaatcctgcccactggccaagaagcgcaagcttgaaggagcagaggccgaacatttggtgtctaagcggaagtctcatcctttgaaactcgccctcgatgagggatacggcgtggatagtgacgggtccgaagacaccgaggtcaaagacgcttctgtctcagacgaaagtgagggaacactcgaaggagctgaggcagaaacgtccggtcaagacgagatccataggcctgaaactgccgaaggccgctcgcctgtcaaatcacactttgggagtaatccaattggttcagctacggctagctctaagggcagttactcttcataccagggtattattgcgaccagtttgttgaacctgggtcagattgccgaagagacattagtcgaagaggatttaggccaggccgccaaaccaggtcctggcatcgttcacctcctgcaggaagcggctgaaggggctgcatccgaggaaggtgaaaagggactttttattcagccagaagatgccgaggaggtggtcgaagtgaccaccgaaaggtcccaagatctgtgcccgcagtccctcgaagacgcagcaagcgaagagtcgagtaaacagaaaggcatcctttcacacgaagaagaggacgaggaagaggaagaggaagaagaagaggaggaggaggatgaagaggaggaggaggaagaggaggaagaagaggaggaagaagaagaggaggaggaagaagaagaggaggaagaggaggaggaagaggaggaggaagcagcgcctgacgtgatatttcaggaagatacttcccacacctccgctcagaaggccccggaactgagggggccagagagtcctagccccaagccagaatattcagtgatcgtggaagtgaggtccgatgatgataaagacgaggatacgcacagcagaaagagtaccgtgaccgacgaaagcgaaatgcaggatatgatgactagggggaatctgggcctgttggagcaggcaattgcgttgaaagccgagcaagtgcggaccgtgtgcgagccgggatgtcccccggcagaacagagtcagctaggactgggcgaacctgggaaagcggccaagccacttgatactgtgaggaaatcttactactctaaggatccttcacgtgccgaaaaaagagaaataaaatgtccaactcccggttgcgatggcaccggacatgttactggtctctatccacatcatcgttccctgtcaggctgcccccacaaagatcggatccctcctgagatcctggcgatgcatgaaaatgtactgaagtgtcccacaccgggatgtacaggtcaaggccatgtaaattctaataggaacacacaccgatcactctctggttgtcccattgccgcggctgagaagctggcaaagtcacatgagaaacagcaacctcaaacaggagacccatcaaaatcttcatcaaacagtgatcgtattctgagaccaatgtgtttcgtcaagcagctggaagttcctccttacggctcatatagaccgaacgtggctcccgctacaccgcgggctaacctggcaaaggagttagagaagtttagcaaggtgactttcgactacgcaagttttgatgcccaggtctttggcaagagaatgctggctcccaagatccagacgagtgaaaccagtccaaaggcctttcaatccaagcccttcccaaaggcctccagcccccggcatagtcccagttcatcttatgtgaggagtacctcttcgtcgagtgcaggcttcgattactctcaggatgcagaagccgcacacatggctgcgactgccattcttaacctgtcaactcggtgctgggagatgccggagaatttgtcgacgaaaccacaagacctgccctctaagagtgtggatatcgaagtggatgaaaatgggacccttgatctctcgatgcataagcacagaaaacgcgagaacgcgtttccatcaagctccagctgttcctccagccctggggtgaagtccccagacgcctcgcagcgacatagttccacttccgccccctctagctcgatgaccagcccccagtcctcccaagcatccagacaggatgagtgggaccgccccctcgactacaccaagccaagccgccttagggaggaggaaccagaagagtcagaaccagccgcccacagtttcgcgtcctctgaagccgatgaccaggaagtgtccgaagagaatttcgaggaacggaagtaccccggcgaagttacattgacaaactttaagcttaagtttctgtcaaaggacatcaaaaaagagctccttacatgccctacgccaggctgcgacggttccggacacataactggcaattatgcctcacatcgttctctgagcgggtgtcctcttgccgataagtccctcaggaacctcatggcggcccactccgcagatcttaaatgccccacccctggatgcgatggatccggacatatcaccggtaattatgcatcccataggtcactgtcaggatgcccacgggctaagaagagcggcgtgaaagtagctcccacaaaggatgataaagaagatcccgagctgatgaagtgccccgtaccaggttgtgtggggctgggccacatttcagggaagtatgcctcgcaccgaagtgcctctggctgccctttggctgcccgaaggcagaaggagggctcactgaacggcagctcctttagctggaagagcctaaagaacgagggaccaacctgccctactcccggctgtgatggctcagggcatgcaaacggttcattcctgacccatagaagcctgtccggatgtcctagggcaacatttgccggcaagaaagggaagctgtctggggacgaggtactgagcccgaagtttaaaacctctgatgtgctcgagaatgacgaagagatcaagcagctcaaccaggagattcgagatctaaacgagagtaattctgagatggaagcggcaatggtccagctgcagtcccagatatcgtccatggagaaaaatctgaagaatatagaggaggaaaacaagctcattgaagagcagaacgaggccctgtttcttgaactttccggactcagccaggctcttattcagagccttgcaaacatcaggcttccacatatggagcccatctgtgaacagaacttcgatgcctacgtgtccaccctgactgatatgtatagtaaccaagatccggagaacaaggacttgctagaaagcattaagcaggctgttagaggcattcaggtttag

SEQ ID NO: 147263 - DNA, 3366 bp, Artificial Sequence
  derived and/or modified sequence
atgtctctggagaacgaggacaaaagggccagaaccaggtcgaaggccctgcgcggtcctcctgagactaccgcggctgacctgtcgtgccctaccccagggtgcactgggtcaggccacgtccggggaaaatactcgaggcatcgtagccttcagtcttgcccactcgcaaagaaaaggaaactggaaggcgctgaggccgagcacctagtctcgaagcgcaagtcccacccactaaaactggccttggatgagggctacggggtggactcagatggaagcgaagacacagaagtcaaggacgcctcggtctcagatgagagcgaaggcacattggagggcgctgaggctgagacttctggacaggatgagattcataggcccgagacagcagaaggtcggtctcctgtgaaaagccattttggtagcaatcctattggctctgccacagcttcctcaaaaggctcctatagctcataccagggtataatcgccacaagcctgttgaatctgggccagattgccgaggaaacattagtggaggaggatctgggccaagctgcgaaacctggccctgggatcgtgcacctgttgcaggaagccgcagaaggagctgctagcgaagaaggagagaaggggcttttcatacagccggaggacgctgaagaagtcgttgaggtgacgacagaacgatctcaggatttgtgcccccagagtttggaagatgccgcttctgaagaatcttccaagcagaaaggtattctgtctcatgaagaggaagatgaagaggaagaagaggaggaagaagaggaggaagaagacgaagaggaggaagaggaagaggaggaggaggaggaagaagaggaggaggaagaggaagaagaagaagaagaagaggaagaagaggaagaggaggaagcggcacctgacgtgatttttcaggaagacacttcacatacctccgcccagaaagccccagagctacgcggacctgaatctccctcccctaagcccgaatatagcgtaatcgtagaggtgcgttcagacgatgacaaagacgaggatacccacagtagaaagagcaccgtgaccgatgaaagtgagatgcaggacatgatgacccgaggcaaccttggattactggaacaggctattgccctcaaggctgaacaggtcaggacagtctgcgagcctggctgcccccctgctgaacagtcccagttaggcctgggggagccaggtaaggcagctaagcccctggacaccgtcaggaagagctattactcgaaggatccatcacgggcagaaaagagagagattaaatgcccaacccctggttgtgacggtacggggcatgtcacaggtctctacccccaccataggtctctcagcggctgccctcacaaggaccgcatccctccggaaatcttagccatgcacgagaacgtgttgaagtgtcctactcctggatgtacgggacaaggacacgtcaactctaacagaaatactcaccgtagtctgagtgggtgccccattgccgctgctgagaagctggcaaaatcacacgaaaagcaacagcctcaaactggagacccctccaaaagcagttccaatagcgatagaatcttgaggcccatgtgcttcgtgaagcagctcgaagtgcccccatacgggagctaccgccctaacgtagctcccgcaaccccccgagcgaatcttgcaaaagaacttgaaaaattttctaaggtgacattcgactacgcttccttcgacgctcaggtgttcggcaagcgcatgttagccccaaagatccagaccagcgagacgtctccgaaggctttccagtgctttgactattctcaggacgctgaggcggctcatatggctgctacagcgatattaaaccttagtacacgctgttgggagatgccggagaacctgtccactaaaccccaggacctgcctagcaagtccgtggacatcgaggtggacgagaacggcaccttagatctgtcgatgcacaagcacaggaagagggagaatgcctttccctcttcaagcagctgttcatctagccccggtgtcaagtctccagatgcctctcagagacactcctctacatctgctcccagctcaagcatgacgagcccgcagtcctctcaggctagcagacaggacgaatgggatcggcctctggactacacgaagccttctagactccgcgaggaggagcccgaggaaagcgaacccgcagctcactcatttgccagctctgaggccgacgaccaggaagtctccgaggaaaacttcgaggaacggaagtatccaggtgaagtgacattaaccaattttaaacttaagtttctgtctaaagatatcaagaaagaattgctcacatgccctacccctgggtgcgacggatcaggacatatcacagggaactacgcctcccacagatccctctctggttgccccctcgctgataagtcattacgcaatcttatggcggcacattccgccgatttaaagtgtcccaccccaggctgtgacgggagcggacacatcacaggaaactacgcgagtcatcggtccctgtccggttgcccccgtgccaagaaaagcggagtgaaggtggcgccaaccaaagacgacaaggaggacccagaactaatgaagtgccccgttccagggtgcgtgggcctgggccatatttcgggaaaatatgcaagtcatcgctccgcgagcggttgccctttagccgctcgccgacagaaggagggttcacttaatggatcttccttctcctggaagtctctgaagaatgagggtcctacttgccctaccccaggatgcgacgggtccggacacgctaacggttcttttcttacccatagaagtctcagcggatgccctcgagcgacctttgccggtaaaaaggggaagttaagcggggatgaggtgctttcgcccaaatttaaaacaagtgacgtactcgagaatgatgaggagattaagcaattgaaccaggaaatcagggacctgaacgaatctaatagtgagatggaagccgctatggtgcaattgcagagccagatcagctcaatggagaaaaacctaaaaaatatagaggaggaaaataagctcattgaagagcagaacgaggctctgttcctcgagctctcaggcctttcacaggctctaattcagtccctggccaatattcgcctcccccacatggaaccaatttgtgaacagaacttcgatgcttacgtgtctactctcacagacatgtatagcaaccaggatccggagaacaaagacttattggagagtattaagcaggcagtgaggggaatccaggtctag

SEQ ID NO: 147264 - DNA, 1776 bp, Artificial Sequence
  derived and/or modified sequence
atgagtttggaaaatgaagacaagcgggctcggactaggtctaaggccctgcgaggcccacccgagaccacagcggcagatctcagctgtcccaccccgggatgtacgggcagcggtcacgtgcgtggtaagtactcgcgccaccgcagcctacagagctgtcccctggcaaagaagcgtaaattagagggcgcagaagccgaacatctcgtgtccaagagaaaatcacacccactaaagttagctcttgatgaaggttacggagttgactcagatggcagcgaggatacagaggtgaaagacgcatccgtcagcgatgagagtgagggcaccctcgaaggggctgaagccgagacatcagggcaagacgaaattcacagaccggaaacagccgaagacccaagcagagccgagaaaagagaaataaaatgtccaacacctgggtgcgacggcaccggccatgttaccggcctctatccacatcatcgaagtctgagtggctgccctcataaggaccgcatccctccagaaattctggcgatgcatgagaatgtgctgaagtgtcccacccccggttgtactggccaggggcacgtcaactcaaacaggaacacccatcggagtcttagcggatgccccatcgccgcagccgaaaagctcgcgaagtctcacgagaagcagcaacctcagactggggaccctagcaaatcctcttcaaactctgaccgcatattacgaccaatgtgttttgtgaagcaactggaggtacctccctacgggtcctacaggcctaatgtggcacccgcaacaccccgtgccaatctggctaaagagctggagaaatttagcaaggtgacctttgattacgcatccttcgatgctcaggtgttcgggaaacggatgctggcaccgaagattcaaacatctgagacctcacccaaagccttccagtgttttgattacagccaggacgccgaggccgctcacatggcagcgaccgcaattctgaacctttccacccgatgttgggaaatgcccgagaatctgtctacgaagccccaggacctgccttcgaagtccgtcgacattgaggtcgacgaaaatggcactctcgatttaagcatgcacaagcaccgaaagagggaaaacgctttcccctccagttcttcctgctcctctagcccaggagtgaagtctccggatgcttcccagagacacagctccacgtctgctccgtcttctagcatgacttcaccacagtcttcgcaggcatcccgccaggatgagtgggacagacctctcgactataccaaaccgtcacgtctccgcgaggaagagcccgaagagtccgagcccgcagcccactctttcgccagctctgaggctgatgatcaggaagtttccgaggaaaatttcgaagagcggaagtaccctggcgaggtcactttaaccaacttcaagctgaaatttctctccaaggatatcaagaaggaactgctgacgtgcccaacgcccggttgtgatggatcagggcatatcaccggaaactacgcctctcataggagatgtcctaccccaggctgtgacggtagcgggcatataactggaaattacgcctctcatagatctctgtccggatgtccccgagccaaaaaatcgggtgtaaaggtggcaccaacaaaggacgacaaggaagatcctgagttgatgaagtacgtgggtccttgctggctatttcattgcatagcggaattacggttcagctgcgtgctgtag

SEQ ID NO: 147265 - DNA, 3447 bp, Artificial Sequence
  derived and/or modified sequence
atgagcctcgaaaatgaggataaaagagctcggacgagaagcaaagccctgcggggaccaccagaaacaaccgctgctgacctatcttgcccaacacccggttgcactggaagcgggcacgtgcgaggtaaatatagccgacataggagcctgcagtcatgtccgctggctaaaaagagaaagctggagggtgccgaggccgaacatctggtgtcgaaacggaagagccacccactcaaactcgccttggatgagggatatggcgtggatagcgatggctcggaagacaccgaggtgaaagacgcctccgtgagcgacgaatctgagggcactctagaaggtgccgaggccgaaactagcggccaggacgagattcatcggcctgagacggcagaggggagatccccagtcaagtcccattttgggtctaatcccattgggtcagctacagcaagcagtaagggctcctacagctcttatcagggtattattgccactagtctgctcaatctcgggcagattgcggaggaaacacttgtcgaagaggacttagggcaggcagctaaacctgggccagggattgtccatctgttgcaggaggccgctgaaggtgcggcatccgaagaaggggagaagggcctgttcatccagcccgaagacgcggaagaggtggtcgaagtgacgactgaaagatcacaggatctatgcccccagtctttggaagacgccgcatcggaggaaagtagtaagcagaaggggatcctgagtcacgaggaggaagacgaagaggaggaagaggaggaggaggaagaagaagaagatgaggaagaagaagaggaggaagaggaagaggaagaggaagaggaagaagaggaagaggaagaggaggaggaagaagaggaggaagaggaagaagaggctgccccagatgtcatattccaggaagatacaagtcacacttccgcccaaaaagcccctgaactgcggggtccagaaagtccaagccccaagcctgaatattccgtcatcgtcgaggttcggtccgacgatgacaaagatgaagacacccacagccgtaagtcaacagtgaccgacgagtccgaaatgcaggatatgatgacccgcggaaacctcgggctcctcgaacaggctatcgccctgaaagccgagcaggtgcgaaccgtatgcgagcccggatgcccccctgccgagcagtcccagctgggactgggagaaccaggaaaggccgcaaaaccacttgacactgtgcggaaatcctattacagcaaggatccttcccgagcagagaaacgcgagatcaagtgtcccaccccgggttgcgacggcaccggccatgtaaccggactgtatccccatcaccgcagtctgtccggatgtccccataaagacaggattccccctgagatcctggccatgcatgagaacgtgctcaagtgtccaaccccgggatgtacaggacagggacacgtaaactcgaaccggaacacacataggtctctatccgggtgccccatagcagctgcggagaaactggccaagtcccatgaaaaacagcagccccagacaggcgacccatcaaaatcttccagtaactcagacagaattctgaggccaatgtgcttcgtgaagcagttggaggtgccgccatatggctcataccggccaaatgtcgcgcctgctacccctcgagccaatctagccaaggagcttgagaagttctctaaggttaccttcgattacgcgagtttcgacgcacaagttttcggaaaacgcatgttggcccctaagatccagacatcagaaacctctcccaaagcctttcagtctaagcctttccctaaggcctcttcaccacgccactccccttccagctcatacgtgcgatctaccagctccagctctgccggatttgattatagccaggatgccgaagccgcacatatggctgcgactgcgatcttgaacttgtccaccagatgctgggaaatgcccgaaaacctgagcactaaaccgcaagacctgccctccaaaagtgtcgatatcgaagtcgatgaaaatggtactctggacctgtctatgcataagcacaggaaaagggaaaatgccttccctagcagttctagctgtagctcatccccaggcgtcaagtctcccgatgcatctcaacggcattcttctacctctgccccttccagctcaatgactagcccacagtcctcgcaagcatcaagacaggacgagtgggatagaccactggactatacaaagccctctagactacgtgaggaggagcctgaggaaagcgagcccgcagcccactcatttgccagctcggaagcagacgatcaggaagtgtccgaggagaacttcgaggagcgaaaataccctggagaagtgaccctgacaaacttcaagctgaagttcctgtcgaaggacatcaaaaaggagcttcttacatgcccgaccccgggttgcgatggatcgggccatattactggaaattacgcatcgcaccgcagcttatcaggttgccctctcgccgacaaatctcttcggaatctcatggccgctcacagtgccgacctgaaatgcccgacaccagggtgcgatgggtcagggcatatcaccgggaactacgcttcccacagaagtttgagcggatgtcccagagcaaagaaaagtggagtgaaggtcgcgccaaccaaggacgataaggaggatcccgagctgatgaaatgtccagtgcccggatgtgtaggtttagggcacatcagcgggaagtatgcgagtcataggagcgcctctgggtgccctctggcagccagaagacagaaggagggttctctcaatggatcatcctttagctggaagagtctcaaaaatgagggccctacttgccctactcccggatgcgacgggtccggtcacgcaaatggatcctttttgacccatcggagtctgtcaggatgtcctcgagctacattcgctggaaagaaaggaaagttgtctggcgacgaagtcctgagccctaaattcaaaacttctgatgtcctagagaacgatgaggaaatcaagcagttaaaccaggaaatacgtgacctgaacgaatccaactcagagatggaggctgccatggtgcaacttcagagccaaatctcatctatggagaaaaacctgaaaaatattgaagaggagaacaagctgattgaggaacaaaacgaggctctgtttctggaactcagtgggctgtcccaggcactcattcagtcccttgccaacatcaggctccctcatatggaacctatctgcgaacagaattttgacgcgtatgtctcaactctgactgacatgtactcaaatcaggatccggagaataaagatcttctagagtctattaagcaggctgtcaggggcattcaagtctag

SEQ ID NO: 147266 - DNA, 3366 bp, Artificial Sequence
  derived and/or modified sequence
atgagcctggagaacgaggacaagagagccagaaccagaagcaaggccctgagaggcccccccgagaccaccgccgccgacctgagctgccccacccccggctgcaccggcagcggccacgtgagaggcaagtacagcagacacagaagcctgcagagctgccccctggccaagaagagaaagctggagggcgccgaggccgagcacctggtgagcaagagaaagagccaccccctgaagctggccctggacgagggctacggcgtggacagcgacggcagcgaggacaccgaggtgaaggacgccagcgtgagcgacgagagcgagggcaccctggagggcgccgaggccgagaccagcggccaggacgagatccacagacccgagaccgccgagggcagaagccccgtgaagagccacttcggcagcaaccccatcggcagcgccaccgccagcagcaagggcagctacagcagctaccagggcatcatcgccaccagcctgctgaacctgggccagatcgccgaggagaccctggtggaggaggacctgggccaggccgccaagcccggccccggcatcgtgcacctgctgcaggaggccgccgagggcgccgccagcgaggagggcgagaagggcctgttcatccagcccgaggacgccgaggaggtggtggaggtgaccaccgagagaagccaggacctgtgcccccagagcctggaggacgccgccagcgaggagagcagcaagcagaagggcatcctgagccacgaggaggaggacgaggaggaggaggaggaggaggaggaggaggaggaggacgaggaggaggaggaggaggaggaggaggaggaggaggaggaggaggaggaggaggaggaggaggaggaggaggaggaggaggaggaggaggaggaggccgcccccgacgtgatcttccaggaggacaccagccacaccagcgcccagaaggcccccgagctgagaggccccgagagccccagccccaagcccgagtacagcgtgatcgtggaggtgagaagcgacgacgacaaggacgaggacacccacagcagaaagagcaccgtgaccgacgagagcgagatgcaggacatgatgaccagaggcaacctgggcctgctggagcaggccatcgccctgaaggccgagcaggtgagaaccgtgtgcgagcccggctgcccccccgccgagcagagccagctgggcctgggcgagcccggcaaggccgccaagcccctggacaccgtgagaaagagctactacagcaaggaccccagcagagccgagaagagagagatcaagtgccccacccccggctgcgacggcaccggccacgtgaccggcctgtacccccaccacagaagcctgagcggctgcccccacaaggacagaatcccccccgagatcctggccatgcacgagaacgtgctgaagtgccccacccccggctgcaccggccagggccacgtgaacagcaacagaaacacccacagaagcctgagcggctgccccatcgccgccgccgagaagctggccaagagccacgagaagcagcagccccagaccggcgaccccagcaagagcagcagcaacagcgacagaatcctgagacccatgtgcttcgtgaagcagctggaggtgcccccctacggcagctacagacccaacgtggcccccgccacccccagagccaacctggccaaggagctggagaagttcagcaaggtgaccttcgactacgccagcttcgacgcccaggtgttcggcaagagaatgctggcccccaagatccagaccagcgagaccagccccaaggccttccagtgcttcgactacagccaggacgccgaggccgcccacatggccgccaccgccatcctgaacctgagcaccagatgctgggagatgcccgagaacctgagcaccaagccccaggacctgcccagcaagagcgtggacatcgaggtggacgagaacggcaccctggacctgagcatgcacaagcacagaaagagagagaacgccttccccagcagcagcagctgcagcagcagccccggcgtgaagagccccgacgccagccagagacacagcagcaccagcgcccccagcagcagcatgaccagcccccagagcagccaggccagcagacaggacgagtgggacagacccctggactacaccaagcccagcagactgagagaggaggagcccgaggagagcgagcccgccgcccacagcttcgccagcagcgaggccgacgaccaggaggtgagcgaggagaacttcgaggagagaaagtaccccggcgaggtgaccctgaccaacttcaagctgaagttcctgagcaaggacatcaagaaggagctgctgacctgccccacccccggctgcgacggcagcggccacatcaccggcaactacgccagccacagaagcctgagcggctgccccctggccgacaagagcctgagaaacctgatggccgcccacagcgccgacctgaagtgccccacccccggctgcgacggcagcggccacatcaccggcaactacgccagccacagaagcctgagcggctgccccagagccaagaagagcggcgtgaaggtggcccccaccaaggacgacaaggaggaccccgagctgatgaagtgccccgtgcccggctgcgtgggcctgggccacatcagcggcaagtacgccagccacagaagcgccagcggctgccccctggccgccagaagacagaaggagggcagcctgaacggcagcagcttcagctggaagagcctgaagaacgagggccccacctgccccacccccggctgcgacggcagcggccacgccaacggcagcttcctgacccacagaagcctgagcggctgccccagagccaccttcgccggcaagaagggcaagctgagcggcgacgaggtgctgagccccaagttcaagaccagcgacgtgctggagaacgacgaggagatcaagcagctgaaccaggagatcagagacctgaacgagagcaacagcgagatggaggccgccatggtgcagctgcagagccagatcagcagcatggagaagaacctgaagaacatcgaggaggagaacaagctgatcgaggagcagaacgaggccctgttcctggagctgagcggcctgagccaggccctgatccagagcctggccaacatcagactgccccacatggagcccatctgcgagcagaacttcgacgcctacgtgagcaccctgaccgacatgtacagcaaccaggaccccgagaacaaggacctgctggagagcatcaagcaggccgtgagaggcatccaggtgtag

SEQ ID NO: 147267 - DNA, 1776 bp, Artificial Sequence
  derived and/or modified sequence
atgagcctggagaacgaggacaagagagccagaaccagaagcaaggccctgagaggcccccccgagaccaccgccgccgacctgagctgccccacccccggctgcaccggcagcggccacgtgagaggcaagtacagcagacacagaagcctgcagagctgccccctggccaagaagagaaagctggagggcgccgaggccgagcacctggtgagcaagagaaagagccaccccctgaagctggccctggacgagggctacggcgtggacagcgacggcagcgaggacaccgaggtgaaggacgccagcgtgagcgacgagagcgagggcaccctggagggcgccgaggccgagaccagcggccaggacgagatccacagacccgagaccgccgaggaccccagcagagccgagaagagagagatcaagtgccccacccccggctgcgacggcaccggccacgtgaccggcctgtacccccaccacagaagcctgagcggctgcccccacaaggacagaatcccccccgagatcctggccatgcacgagaacgtgctgaagtgccccacccccggctgcaccggccagggccacgtgaacagcaacagaaacacccacagaagcctgagcggctgccccatcgccgccgccgagaagctggccaagagccacgagaagcagcagccccagaccggcgaccccagcaagagcagcagcaacagcgacagaatcctgagacccatgtgcttcgtgaagcagctggaggtgcccccctacggcagctacagacccaacgtggcccccgccacccccagagccaacctggccaaggagctggagaagttcagcaaggtgaccttcgactacgccagcttcgacgcccaggtgttcggcaagagaatgctggcccccaagatccagaccagcgagaccagccccaaggccttccagtgcttcgactacagccaggacgccgaggccgcccacatggccgccaccgccatcctgaacctgagcaccagatgctgggagatgcccgagaacctgagcaccaagccccaggacctgcccagcaagagcgtggacatcgaggtggacgagaacggcaccctggacctgagcatgcacaagcacagaaagagagagaacgccttccccagcagcagcagctgcagcagcagccccggcgtgaagagccccgacgccagccagagacacagcagcaccagcgcccccagcagcagcatgaccagcccccagagcagccaggccagcagacaggacgagtgggacagacccctggactacaccaagcccagcagactgagagaggaggagcccgaggagagcgagcccgccgcccacagcttcgccagcagcgaggccgacgaccaggaggtgagcgaggagaacttcgaggagagaaagtaccccggcgaggtgaccctgaccaacttcaagctgaagttcctgagcaaggacatcaagaaggagctgctgacctgccccacccccggctgcgacggcagcggccacatcaccggcaactacgccagccacagaagatgccccacccccggctgcgacggcagcggccacatcaccggcaactacgccagccacagaagcctgagcggctgccccagagccaagaagagcggcgtgaaggtggcccccaccaaggacgacaaggaggaccccgagctgatgaagtacgtgggcccctgctggctgttccactgcatcgccgagctgagattcagctgcgtgctgtag

SEQ ID NO: 147268 - DNA, 3447 bp, Artificial Sequence
  derived and/or modified sequence
atgagcctggagaacgaggacaagagagccagaaccagaagcaaggccctgagaggcccccccgagaccaccgccgccgacctgagctgccccacccccggctgcaccggcagcggccacgtgagaggcaagtacagcagacacagaagcctgcagagctgccccctggccaagaagagaaagctggagggcgccgaggccgagcacctggtgagcaagagaaagagccaccccctgaagctggccctggacgagggctacggcgtggacagcgacggcagcgaggacaccgaggtgaaggacgccagcgtgagcgacgagagcgagggcaccctggagggcgccgaggccgagaccagcggccaggacgagatccacagacccgagaccgccgagggcagaagccccgtgaagagccacttcggcagcaaccccatcggcagcgccaccgccagcagcaagggcagctacagcagctaccagggcatcatcgccaccagcctgctgaacctgggccagatcgccgaggagaccctggtggaggaggacctgggccaggccgccaagcccggccccggcatcgtgcacctgctgcaggaggccgccgagggcgccgccagcgaggagggcgagaagggcctgttcatccagcccgaggacgccgaggaggtggtggaggtgaccaccgagagaagccaggacctgtgcccccagagcctggaggacgccgccagcgaggagagcagcaagcagaagggcatcctgagccacgaggaggaggacgaggaggaggaggaggaggaggaggaggaggaggaggacgaggaggaggaggaggaggaggaggaggaggaggaggaggaggaggaggaggaggaggaggaggaggaggaggaggaggaggaggaggaggaggaggccgcccccgacgtgatcttccaggaggacaccagccacaccagcgcccagaaggcccccgagctgagaggccccgagagccccagccccaagcccgagtacagcgtgatcgtggaggtgagaagcgacgacgacaaggacgaggacacccacagcagaaagagcaccgtgaccgacgagagcgagatgcaggacatgatgaccagaggcaacctgggcctgctggagcaggccatcgccctgaaggccgagcaggtgagaaccgtgtgcgagcccggctgcccccccgccgagcagagccagctgggcctgggcgagcccggcaaggccgccaagcccctggacaccgtgagaaagagctactacagcaaggaccccagcagagccgagaagagagagatcaagtgccccacccccggctgcgacggcaccggccacgtgaccggcctgtacccccaccacagaagcctgagcggctgcccccacaaggacagaatcccccccgagatcctggccatgcacgagaacgtgctgaagtgccccacccccggctgcaccggccagggccacgtgaacagcaacagaaacacccacagaagcctgagcggctgccccatcgccgccgccgagaagctggccaagagccacgagaagcagcagccccagaccggcgaccccagcaagagcagcagcaacagcgacagaatcctgagacccatgtgcttcgtgaagcagctggaggtgcccccctacggcagctacagacccaacgtggcccccgccacccccagagccaacctggccaaggagctggagaagttcagcaaggtgaccttcgactacgccagcttcgacgcccaggtgttcggcaagagaatgctggcccccaagatccagaccagcgagaccagccccaaggccttccagagcaagcccttccccaaggccagcagccccagacacagccccagcagcagctacgtgagaagcaccagcagcagcagcgccggcttcgactacagccaggacgccgaggccgcccacatggccgccaccgccatcctgaacctgagcaccagatgctgggagatgcccgagaacctgagcaccaagccccaggacctgcccagcaagagcgtggacatcgaggtggacgagaacggcaccctggacctgagcatgcacaagcacagaaagagagagaacgccttccccagcagcagcagctgcagcagcagccccggcgtgaagagccccgacgccagccagagacacagcagcaccagcgcccccagcagcagcatgaccagcccccagagcagccaggccagcagacaggacgagtgggacagacccctggactacaccaagcccagcagactgagagaggaggagcccgaggagagcgagcccgccgcccacagcttcgccagcagcgaggccgacgaccaggaggtgagcgaggagaacttcgaggagagaaagtaccccggcgaggtgaccctgaccaacttcaagctgaagttcctgagcaaggacatcaagaaggagctgctgacctgccccacccccggctgcgacggcagcggccacatcaccggcaactacgccagccacagaagcctgagcggctgccccctggccgacaagagcctgagaaacctgatggccgcccacagcgccgacctgaagtgccccacccccggctgcgacggcagcggccacatcaccggcaactacgccagccacagaagcctgagcggctgccccagagccaagaagagcggcgtgaaggtggcccccaccaaggacgacaaggaggaccccgagctgatgaagtgccccgtgcccggctgcgtgggcctgggccacatcagcggcaagtacgccagccacagaagcgccagcggctgccccctggccgccagaagacagaaggagggcagcctgaacggcagcagcttcagctggaagagcctgaagaacgagggccccacctgccccacccccggctgcgacggcagcggccacgccaacggcagcttcctgacccacagaagcctgagcggctgccccagagccaccttcgccggcaagaagggcaagctgagcggcgacgaggtgctgagccccaagttcaagaccagcgacgtgctggagaacgacgaggagatcaagcagctgaaccaggagatcagagacctgaacgagagcaacagcgagatggaggccgccatggtgcagctgcagagccagatcagcagcatggagaagaacctgaagaacatcgaggaggagaacaagctgatcgaggagcagaacgaggccctgttcctggagctgagcggcctgagccaggccctgatccagagcctggccaacatcagactgccccacatggagcccatctgcgagcagaacttcgacgcctacgtgagcaccctgaccgacatgtacagcaaccaggaccccgagaacaaggacctgctggagagcatcaagcaggccgtgagaggcatccaggtgtag

SEQ ID NO: 147269 - protein, 1403 aa, Artificial Sequence
  derived and/or modified sequence
MATQQKASDERISQFDHNLLPELSALLGLDAVQLAKELEEEEQKERAKMQKGYNSQMRSEAKRLKTFVTYEPYSSWIPQEMAAAGFYFTGVKSGIQCFCCSLILFGAGLTRLPIEDHKRFHPDCGFLLNKDVGNIAKYDIRVKNLKSRLRGGKMRYQEEEARLASFRNWPFYVQGISPCVLSEAGFVFTGKQDTVQCFSCGGCLGNWEEGDDPWKEHAKWFPKCEFLRSKKSSEEITQYIQSYKGFVDITGEHFVNSWVQRELPMASAYCNDSIFAYEELRLDSFKDWPRESAVGVAALAKAGLFYTGIKDIVQCFSCGGCLEKWQEGDDPLDDHTRCFPNCPFLQNMKSSAEVTPDLQSRGELCELLETTSESNLEDSIAVGPIVPEMAQGEAQWFQEAKNLNEQLRAAYTSASFRHMSLLDISSDLATDHLLGCDLSIASKHISKPVQEPLVLPEVFGNLNSVMCVEGEAGSGKTVLLKKIAFLWASGCCPLLNRFQLVFYLSLSSTRPDEGLASIICDQLLEKEGSVTEMCVRNIIQQLKNQVLFLLDDYKEICSIPQVIGKLIQKNHLSRTCLLIAVRTNRARDIRRYLETILEIKAFPFYNTVCILRKLFSHNMTRLRKFMVYFGKNQSLQKIQKTPLFVAAICAHWFQYPFDPSFDDVAVFKSYMERLSLRNKATAEILKATVSSCGELALKGFFSCCFEFNDDDLAEAGVDEDEDLTMCLMSKFTAQRLRPFYRFLSPAFQEFLAGMRLIELLDSDRQEHQDLGLYHLKQINSPMMTVSAYNNFLNYVSSLPSTKAGPKIVSHLLHLVDNKESLENISENDDYLKHQPEISLQMQLLRGLWQICPQAYFSMVSEHLLVLALKTAYQSNTVAACSPFVLQFLQGRTLTLGALNLQYFFDHPESLSLLRSIHFPIRGNKTSPRAHFSVLETCFDKSQVPTIDQDYASAFEPMNEWERNLAEKEDNVKSYMDMQRRASPDLSTGYWKLSPKQYKIPCLEVDVNDIDVVGQDMLEILMTVFSASQRIELHLNHSRGFIESIRPALELSKASVTKCSISKLELSAAEQELLLTLPSLESLEVSGTIQSQDQIFPNLDKFLCLKELSVDLEGNINVFSVIPEEFPNFHHMEKLLIQISAEYDPSKLVKLIQNSPNLHVFHLKCNFFSDFGSLMTMLVSCKKLTEIKFSDSFFQAVPFVASLPNFISLKILNLEGQQFPDEETSEKFAYILGSLSNLEELILPTGDGIYRVAKLIIQQCQQLHCLRVLSFFKTLNDDSVVEIAKVAISGGFQKLENLKLSINHKITEEGYRNFFQALDNMPNLQELDISRHFTECIKAQATTVKSLSQCVLRLPRLIRLNMLSWLLDADDIALLNVMKERHPQSKYLTILQKWILPFSPIIQK

SEQ ID NO: 147270 - DNA, 4212 bp, Artificial Sequence
  derived and/or modified sequence
atggccacccagcagaaggccagcgacgagagaatcagccagttcgaccacaacctgctgcccgagctgagcgccctgctgggcctggacgccgtgcagctggccaaggagctggaggaggaggagcagaaggagagagccaagatgcagaagggctacaacagccagatgagaagcgaggccaagagactgaagaccttcgtgacctacgagccctacagcagctggatcccccaggagatggccgccgccggcttctacttcaccggcgtgaagagcggcatccagtgcttctgctgcagcctgatcctgttcggcgccggcctgaccagactgcccatcgaggaccacaagagattccaccccgactgcggcttcctgctgaacaaggacgtgggcaacatcgccaagtacgacatcagagtgaagaacctgaagagcagactgagaggcggcaagatgagataccaggaggaggaggccagactggccagcttcagaaactggcccttctacgtgcagggcatcagcccctgcgtgctgagcgaggccggcttcgtgttcaccggcaagcaggacaccgtgcagtgcttcagctgcggcggctgcctgggcaactgggaggagggcgacgacccctggaaggagcacgccaagtggttccccaagtgcgagttcctgagaagcaagaagagcagcgaggagatcacccagtacatccagagctacaagggcttcgtggacatcaccggcgagcacttcgtgaacagctgggtgcagagagagctgcccatggccagcgcctactgcaacgacagcatcttcgcctacgaggagctgagactggacagcttcaaggactggcccagagagagcgccgtgggcgtggccgccctggccaaggccggcctgttctacaccggcatcaaggacatcgtgcagtgcttcagctgcggcggctgcctggagaagtggcaggagggcgacgaccccctggacgaccacaccagatgcttccccaactgccccttcctgcagaacatgaagagcagcgccgaggtgacccccgacctgcagagcagaggcgagctgtgcgagctgctggagaccaccagcgagagcaacctggaggacagcatcgccgtgggccccatcgtgcccgagatggcccagggcgaggcccagtggttccaggaggccaagaacctgaacgagcagctgagagccgcctacaccagcgccagcttcagacacatgagcctgctggacatcagcagcgacctggccaccgaccacctgctgggctgcgacctgagcatcgccagcaagcacatcagcaagcccgtgcaggagcccctggtgctgcccgaggtgttcggcaacctgaacagcgtgatgtgcgtggagggcgaggccggcagcggcaagaccgtgctgctgaagaagatcgccttcctgtgggccagcggctgctgccccctgctgaacagattccagctggtgttctacctgagcctgagcagcaccagacccgacgagggcctggccagcatcatctgcgaccagctgctggagaaggagggcagcgtgaccgagatgtgcgtgagaaacatcatccagcagctgaagaaccaggtgctgttcctgctggacgactacaaggagatctgcagcatcccccaggtgatcggcaagctgatccagaagaaccacctgagcagaacctgcctgctgatcgccgtgagaaccaacagagccagagacatcagaagatacctggagaccatcctggagatcaaggccttccccttctacaacaccgtgtgcatcctgagaaagctgttcagccacaacatgaccagactgagaaagttcatggtgtacttcggcaagaaccagagcctgcagaagatccagaagacccccctgttcgtggccgccatctgcgcccactggttccagtaccccttcgaccccagcttcgacgacgtggccgtgttcaagagctacatggagagactgagcctgagaaacaaggccaccgccgagatcctgaaggccaccgtgagcagctgcggcgagctggccctgaagggcttcttcagctgctgcttcgagttcaacgacgacgacctggccgaggccggcgtggacgaggacgaggacctgaccatgtgcctgatgagcaagttcaccgcccagagactgagacccttctacagattcctgagccccgccttccaggagttcctggccggcatgagactgatcgagctgctggacagcgacagacaggagcaccaggacctgggcctgtaccacctgaagcagatcaacagccccatgatgaccgtgagcgcctacaacaacttcctgaactacgtgagcagcctgcccagcaccaaggccggccccaagatcgtgagccacctgctgcacctggtggacaacaaggagagcctggagaacatcagcgagaacgacgactacctgaagcaccagcccgagatcagcctgcagatgcagctgctgagaggcctgtggcagatctgcccccaggcctacttcagcatggtgagcgagcacctgctggtgctggccctgaagaccgcctaccagagcaacaccgtggccgcctgcagccccttcgtgctgcagttcctgcagggcagaaccctgaccctgggcgccctgaacctgcagtacttcttcgaccaccccgagagcctgagcctgctgagaagcatccacttccccatcagaggcaacaagaccagccccagagcccacttcagcgtgctggagacctgcttcgacaagagccaggtgcccaccatcgaccaggactacgccagcgccttcgagcccatgaacgagtgggagagaaacctggccgagaaggaggacaacgtgaagagctacatggacatgcagagaagagccagccccgacctgagcaccggctactggaagctgagccccaagcagtacaagatcccctgcctggaggtggacgtgaacgacatcgacgtggtgggccaggacatgctggagatcctgatgaccgtgttcagcgccagccagagaatcgagctgcacctgaaccacagcagaggcttcatcgagagcatcagacccgccctggagctgagcaaggccagcgtgaccaagtgcagcatcagcaagctggagctgagcgccgccgagcaggagctgctgctgaccctgcccagcctggagagcctggaggtgagcggcaccatccagagccaggaccagatcttccccaacctggacaagttcctgtgcctgaaggagctgagcgtggacctggagggcaacatcaacgtgttcagcgtgatccccgaggagttccccaacttccaccacatggagaagctgctgatccagatcagcgccgagtacgaccccagcaagctggtgaagctgatccagaacagccccaacctgcacgtgttccacctgaagtgcaacttcttcagcgacttcggcagcctgatgaccatgctggtgagctgcaagaagctgaccgagatcaagttcagcgacagcttcttccaggccgtgcccttcgtggccagcctgcccaacttcatcagcctgaagatcctgaacctggagggccagcagttccccgacgaggagaccagcgagaagttcgcctacatcctgggcagcctgagcaacctggaggagctgatcctgcccaccggcgacggcatctacagagtggccaagctgatcatccagcagtgccagcagctgcactgcctgagagtgctgagcttcttcaagaccctgaacgacgacagcgtggtggagatcgccaaggtggccatcagcggcggcttccagaagctggagaacctgaagctgagcatcaaccacaagatcaccgaggagggctacagaaacttcttccaggccctggacaacatgcccaacctgcaggagctggacatcagcagacacttcaccgagtgcatcaaggcccaggccaccaccgtgaagagcctgagccagtgcgtgctgagactgcccagactgatcagactgaacatgctgagctggctgctggacgccgacgacatcgccctgctgaacgtgatgaaggagagacacccccagagcaagtacctgaccatcctgcagaagtggatcctgcccttcagccccatcatccagaagtag

SEQ ID NO: 147271 - DNA, 4212 bp, Artificial Sequence
  derived and/or modified sequence
atggctacacagcagaaagccagcgatgaaagaatttcgcagtttgaccataaccttctgccggagctctccgccctccttggcctggacgcagtgcaactggcaaaggagctcgaggaagaggaacagaaagagagggctaaaatgcagaaagggtataacagtcagatgcggagcgaggctaagaggcttaagacctttgtcacatatgaaccatactcttcctggatcccccaagagatggcagccgcagggttttactttactggcgtgaaatcggggatacagtgtttctgctgttctttgatactctttggggcaggactcaccagacttcccatagaagaccataagaggtttcaccctgattgtggatttttgcttaacaaggatgtaggcaacattgccaagtacgacatccgggtgaaaaacttgaagagtaggttgagaggaggcaaaatgcgttatcaggaagaggaggcccgtttggcatcgttccgcaactggcctttctatgtccaggggatttcaccctgcgtgctcagcgaagctggttttgtgttcacaggaaagcaggatactgtgcagtgcttttcatgtggcggctgcttggggaattgggaagagggagatgatccatggaaagaacacgccaagtggtttccaaagtgtgaattcctgaggtctaagaaatcctcggaggagatcacacaatatatccagtcctacaaaggattcgtggacatcacgggggagcactttgtgaattcttgggtgcaacgtgagctgcctatggctagcgcttattgcaacgactccatctttgcctacgaagaactgaggctggactcattcaaagattggcccagagagtctgccgtcggcgtagccgcattggcgaaggcgggcttattttacaccgggatcaaagacatcgtgcaatgcttctcctgcggaggatgcctggaaaaatggcaggaaggggacgacccactcgatgatcacactaggtgcttcccaaattgcccctttttgcaaaacatgaaaagcagtgcagaagtgaccccggacttgcagtcacgaggcgaactatgcgagttgctggaaaccacaagcgaaagtaatctcgaggactccattgccgtgggccctattgttcctgagatggcccagggcgaggcccagtggttccaggaagctaaaaatctcaatgagcagctacgggccgcatacacctcagcttcctttcggcatatgtccttgcttgacatttcgtccgacctggccactgaccatctattagggtgtgacctaagcatcgccagcaagcacatctcaaagcccgtccaggagcccctggtgctgccggaagtcttcgggaatctaaacagcgtgatgtgtgtggagggtgaagcgggaagcggaaagacagttttactgaagaagattgcctttttgtgggcgtcaggttgctgtccactgcttaatcgattccaactggtgttctacctgtcactgtcctctaccaggccagatgaagggcttgccagcatcatctgcgatcaactgcttgaaaaggaaggctcagtgactgagatgtgcgttaggaacatcatccagcaactgaagaatcaagttctcttcctgcttgacgactataaagagatatgctccattcctcaggttatcgggaaattaattcaaaagaatcacctctcaaggacctgtctgctcatcgccgttcgtactaacagggcgcgagacatccgcagatacctagagacaatactcgaaattaaggccttcccattttacaataccgtttgcattctccgaaagcttttttctcataacatgacaagacttcgcaagtttatggtgtattttggcaaaaaccagtctctgcagaagatccagaagactcccttgtttgtcgccgccatatgcgcacattggttccagtaccccttcgaccccagcttcgacgatgtcgccgtgttcaaaagctatatggagagactgtccttgcgcaataaggccactgccgaaattctgaaggcaacagttagctcttgcggagaattggctcttaagggattcttcagctgttgtttcgagttcaacgatgatgacctcgcagaggccggagtggacgaggatgaggacttaactatgtgtctgatgtcgaagtttacagctcaacgactgcggccattctataggttcctttctcccgcctttcaggaatttctggcaggcatgcgtcttattgagctccttgacagcgatcggcaggagcaccaagacctggggctgtatcatctcaagcagattaacagccctatgatgacggtgtccgcctacaacaactttctgaactacgtaagctcgctgcctagcacgaaagccggccccaaaatagtgtctcacctgctgcacttagttgacaataaagaatcattggaaaacatttccgagaacgacgattatctgaaacaccaacctgagatctctctgcagatgcagctgttacgcggattatggcaaatctgccctcaggcgtatttctctatggtgagcgaacacctgctcgtgcttgctctaaagacggcatatcaatccaacactgtggctgcatgctctccatttgtgcttcaatttctccagggccggaccctgaccttgggcgccctgaacttacagtatttttttgaccatcccgagtccctctctctactgagatcgatccacttccctattcgggggaacaaaacatccccgcgggctcacttttctgtgctggaaacttgcttcgacaagagccaggtgccgacaatagaccaggactacgctagcgctttcgaaccaatgaatgagtgggagcgtaacctggcggagaaggaggacaacgtcaaatcatacatggatatgcagcgcagagctagccccgacctaagcaccgggtattggaaactcagccccaagcagtacaaaattccttgcctggaagtagacgtaaacgacattgacgtcgtggggcaggatatgttggaaattctgatgactgtgttctcagcgagccagcgaattgaattgcatctcaaccacagtaggggattcatcgagtctattcgccccgcgcttgaactctcaaaagcatctgtaacaaaatgcagtatctccaaattggagttatctgctgctgaacaggagctgctgctgacccttccttctctggagagcctggaagtgtccggaaccattcagagccaggaccagatcttccccaatctcgataagttcctgtgtctgaaggaactgagcgtcgatttggaaggcaacatcaacgtgtttagcgtcatccctgaggagtttcccaactttcaccacatggaaaagttgctgatccagatatctgcagaatacgatccttccaaactcgttaaactcattcaaaactcgccgaacctgcatgtgttccacctgaagtgcaacttcttcagtgattttggcagccttatgacaatgctcgtgagctgtaagaagcttactgagattaaattctctgactcattctttcaggctgttccgtttgtcgccagcctgccaaactttataagcctgaagattttaaacctggagggacagcagttccctgatgaggaaacgtcagagaagtttgcgtatatcctcggaagtctgagcaacctggaggagctgatcctgccaacaggggacggcatataccgtgtggccaaattgatcatccagcaatgtcagcagctacactgtctcagggtgctgagcttttttaagaccctgaatgacgatagtgtcgttgagatcgctaaggttgccatctccggaggctttcagaaactggagaacctgaaactcagcatcaaccacaaaattactgaggaagggtatcggaacttctttcaagcactcgacaacatgccgaacttgcaggagctggacatttcccggcattttaccgagtgcatcaaagcccaggccaccacagtgaaatccctgtctcaatgtgtcctcaggttaccacgtctgattaggctgaacatgttatcttggctgctagacgccgacgatattgccctcctgaacgttatgaaagagagacatccccagtccaaatacctgactattcttcagaagtggattcttcccttctccccaattatccagaagtag

SEQ ID NO: 147272 - DNA, 4212 bp, Artificial Sequence
  derived and/or modified sequence
atggccactcaacaaaaggcgtccgatgagcgcattagtcaatttgatcacaacctactgcctgagctgagcgccctgctcgggctagacgctgtccagttggccaaagaactggaagaggaggaacaaaaagagagagctaagatgcagaaggggtacaactcccagatgaggtccgaggccaaaagactcaaaacctttgtcacgtatgaaccctatagcagctggatcccccaggaaatggctgcggcaggattctacttcaccggggtcaagtctggcatccagtgcttttgttgcagcctgatcctattcggagcaggactcacaagactaccgatcgaagatcacaaaagatttcatcccgactgtgggttcctgctgaacaaggatgtcgggaatatcgccaaatacgacattcgcgtgaaaaatctgaaatcaagactgcggggaggaaaaatgcgttaccaagaggaggaagctcgtttagcgtctttcaggaactggccgttttacgtccaggggattagcccatgcgtactttctgaggccggctttgtgtttaccggaaaacaggatacagttcagtgtttcagctgcggcggctgtctcgggaactgggaggaaggggatgatccttggaaagagcacgccaagtggttccctaaatgtgagtttctccgatctaagaaatcaagtgaagaaattacccagtatattcagtcctataaaggcttcgtggacataactggcgagcattttgtcaattcatgggtccagagagagttacctatggcgagcgcgtattgtaatgacagtattttcgcctatgaggagctacgtctagacagttttaaggattggccacgcgagtctgcggtaggagtagccgccctggctaaagcaggcctgttctacaccgggattaaggatattgtgcaatgtttttcttgcggtggctgcctggagaagtggcaggaaggggacgaccctctggatgaccatacccggtgtttcccaaattgcccttttctgcagaacatgaaatcatccgcagaagttacccccgacttgcagagtcgcggagagctgtgtgagttgcttgaaacaacctcagaatccaaccttgaagacagcattgccgtcggtcctattgtccctgagatggctcaaggagaggcccagtggttccaggaggcgaagaatcttaatgagcagctgagagctgcatataccagtgccagcttccgtcacatgtccctgctcgacatctctagcgacttagccacagatcacttactgggttgcgacctttcaattgcatccaagcatatcagtaaaccagtacaggagccccttgtcttgccagaggtattcggcaacctcaactcagtgatgtgtgtggaaggcgaggcaggctcgggtaagactgtcttgttgaagaaaatcgcttttttatgggcctccgggtgttgtcccctgctgaatcgcttccagttagtgttctacctttccctgtcttctaccagacccgatgagggcttagcctctatcatttgcgatcagctcctggagaaagaaggaagtgtgactgaaatgtgtgtgagaaacataattcagcagctgaagaaccaggtgctgttcctactggatgactacaaggagatctgctccattccccaggtcattgggaaactgatccaaaaaaaccacctttcacgcacctgcctcctgatcgcagtgcgaacaaaccgcgctagggacattaggaggtatctcgaaacaattctggagattaaggcgttccccttctacaacacagtgtgtatcttgcgcaaattgttttcgcataatatgacccgtctgcgcaaattcatggtgtacttcggtaagaaccaaagcctgcagaaaatccagaagacacccttgtttgttgcggcaatatgcgcacactggttccagtaccctttcgatccttcgtttgacgatgtggccgtcttcaagagctacatggagcgccttagccttcgcaataaggcgaccgctgaaatactcaaagccaccgtctcttcatgcggcgagctggcgctaaagggcttcttttcttgttgcttcgagttcaatgacgacgatctggccgaggcaggggtggatgaggacgaggacctcaccatgtgccttatgagcaaattcactgcccaaagactgagacctttttaccgcttcttgtctcccgccttccaggagtttctggctggaatgcgactgatcgaactattagatagcgataggcaggaacaccaggatttggggctgtatcacctaaaacagattaattccccaatgatgacagtttccgcatacaataactttctaaactatgtatcaagcctaccttccacaaaggccggcccgaagattgtatcccatttgctccatctcgtggataataaggagtccttggaaaacatcagtgagaacgatgactatttgaaacatcagccagaaatctctctccagatgcagctgctcaggggtctgtggcagatatgtcctcaggcttacttttccatggtctctgagcatctgctggtgctggccttaaagaccgcttatcaaagtaacaccgtggcggcttgttcacccttcgtgctgcagttcttgcagggccgcacgcttactctcggcgcccttaatctccaatacttctttgaccacccagaaagcttgagcctgctccgaagtatccacttccccatccgcggcaacaaaactagtccaagagcacatttctcggtcttagagacatgctttgacaagtcacaggtccccaccatcgaccaggactatgcctctgcctttgagcctatgaacgaatgggaaagaaacctggccgagaaagaggacaacgttaagtcttacatggacatgcagcgaagagctagccctgacctctctacgggctactggaaactgtccccgaaacaatacaagattccgtgcctggaagttgatgttaatgacattgacgtggtagggcaagacatgttggagatccttatgacagtgttcagtgcctctcagaggattgagctgcacctaaaccacagtagaggtttcatcgaatccattcggcccgccctggaactcagcaaagcctcagtgaccaaatgttctatttcaaagctggaactatccgccgcagaacaggaattgttactcaccttgccttctctcgagtcactcgaggtatccggaacaatacagagtcaggatcaaatttttcccaacttggataagttcttgtgcttaaaagaattgtcggtggatttagagggaaacatcaatgtcttctccgtaattcctgaagagttccccaattttcatcacatggagaaactgttgatccagatatctgcagaatatgacccctcaaagctggtcaagctgatccagaatagtcccaacctccacgtctttcacctgaagtgcaattttttcagcgatttcggttcacttatgacgatgctggtgtcttgcaaaaaacttaccgagatcaagttctcggattctttctttcaggccgtgccatttgtagcttctctgcctaactttattagtctcaaaattctcaatcttgagggccagcagtttccggatgaggaaacatcagagaagttcgcatacatcctgggcagcttgtctaacctcgaggagctgatactgcctacaggggatggcatctacagggtagccaagctgatcatccagcagtgtcagcaactgcattgccttcgtgtactgtcattcttcaagacactgaatgatgattctgtcgtagagatcgcaaaagtcgccattagtggcggattccagaaactggagaatctcaaactgagtataaatcataagataaccgaagaaggataccggaatttcttccaggctcttgacaacatgcccaatctccaggaacttgacatttctcgccacttcactgagtgcatcaaggcacaggccacaactgtcaaaagcctgtctcaatgcgtgttacgcctgccacgtctgattcgcctcaacatgttgagctggttgcttgatgccgacgacatcgctctgttgaatgtgatgaaagaacggcacccccaaagcaaatacttgacaattttgcaaaaatggatactcccctttagtcccattatccagaagtag

SEQ ID NO: 147273 - DNA, 4212 bp, Artificial Sequence
  derived and/or modified sequence
atggccacccagcagaaggccagtgatgagcgcatcagccagtttgaccacaacctgctgcctgagctgagcgccctgctgggcctggatgctgtgcagctggccaaggagctggaggaggaggagcagaaggagcgggccaagatgcagaagggctacaacagccagatgaggtctgaggccaagaggctgaagacctttgtgacctatgagccctacagctcctggatcccccaggagatggctgctgctggcttctacttcaccggggtgaagagcggcatccagtgcttctgctgcagcctcatcctgtttggagctggcctgacccggctgcccatcgaggaccacaagcgcttccacccagactgtggcttcctgctgaacaaggatgtgggcaacatcgccaagtatgacatccgggtgaagaacctgaagagccggctgcggggcggcaagatgagataccaggaggaggaggcccggctggccagcttcaggaactggcccttctacgtgcagggcatcagcccctgtgtgctgtctgaggccggctttgtgttcaccgggaagcaggacacagtgcagtgcttcagctgtggcggctgcctgggcaactgggaggagggagatgacccctggaaggagcacgccaagtggttccccaagtgtgagttcctgcggagcaagaagagcagcgaggagatcacccagtacatccagagctacaagggctttgtggacatcaccggggagcactttgtgaacagctgggtgcagcgggagctgcccatggccagcgcctactgcaatgacagcatctttgcctatgaggagctgcggctggacagcttcaaggactggccccgggagagcgctgtgggcgtggccgccctggccaaggccggcctcttctacacaggcatcaaggacatcgtgcagtgcttcagctgtggcggctgcctggagaagtggcaggagggagatgaccccctggatgaccacacccgctgcttccccaactgccccttcctgcagaacatgaagagcagcgctgaggtgaccccagacctgcagagcagaggagagctgtgtgagctgctggagaccaccagcgagagcaacctggaggacagcattgctgtgggccccatcgtgcctgagatggcccagggcgaggcccagtggttccaggaggccaagaacctgaatgagcagctgcgggccgcctacaccagcgccagcttccgccacatgagcctgctggacatcagcagtgacctggccacagaccacctgctgggctgtgacctgagcatcgccagcaagcacatcagcaagcctgtgcaggagcccctggtgctgcctgaggtgtttggaaacctgaacagcgtgatgtgtgtggagggggaggccggcagcggcaagacagtgctgctgaagaagatcgccttcctgtgggccagcggctgctgccccctgctgaaccgcttccagctggtgttctacctgagcctgagcagcaccaggccagatgagggcctggccagcatcatctgtgaccagctgctggagaaggagggctctgtgacagagatgtgtgtgaggaacatcatccagcagctgaagaaccaggtgctcttcctgctggatgactacaaggagatctgcagcatcccccaggtgattggcaagctgatccagaagaaccacctgagcaggacctgcctgctgattgctgtgaggaccaacagagcccgggacatccgccgctacctggagaccatcctggagatcaaggccttccccttctacaacacagtgtgcatcctgaggaagctgttcagccacaacatgacccggctgaggaagttcatggtgtactttgggaagaaccagagcctgcagaagatccagaagacccccctgtttgtggccgccatctgtgcccactggttccagtacccctttgaccccagctttgatgatgtggccgtgttcaagagctacatggagcggctgagcctgaggaacaaggccacagctgagatcctgaaggccaccgtgagcagctgtggggagctggccctgaagggcttcttcagctgctgctttgagttcaatgatgatgacctggccgaggccggcgtggatgaagatgaggacctgaccatgtgcctgatgagcaagttcaccgcccagaggctgcggcccttctaccgcttcctgagccctgccttccaggagttcctggccggcatgaggctgattgagctgctggacagcgaccggcaggagcaccaggacctgggcctgtaccacctgaagcagatcaacagccccatgatgacagtgtctgcctacaacaacttcctgaactacgtgagcagcctgcccagcaccaaggccggccccaagatcgtgagccacctgctgcacctggtggacaacaaggagagcctggagaacatcagtgaaaatgatgactacctgaagcaccagcctgagatcagcctgcagatgcagctgctgcggggcctgtggcagatctgcccccaggcctacttctccatggtgtctgagcacctgctggtgctggccctgaagacagcctaccagagcaacacagtggccgcctgcagcccctttgtgctgcagttcctgcagggccgcaccctgaccctgggcgccctgaacctgcagtacttctttgaccaccctgagagcctgagcctgctgcggagcatccacttccccatccggggcaacaagaccagcccccgggcccacttctctgtgctggagacctgctttgacaagagccaggtgcccaccatcgaccaggactatgccagcgcctttgagcccatgaatgagtgggagaggaacctggccgagaaggaggacaacgtgaagagctacatggacatgcagaggcgggccagcccagacctgagcacaggctactggaagctgagccccaagcagtacaagatcccctgcctggaggtggatgtgaatgacattgatgtggtgggccaggacatgctggagatcctgatgaccgtcttcagcgccagccagagaattgagctgcacctgaaccacagccggggcttcatcgagagcatccggcctgccctggagctgagcaaggcctctgtgaccaagtgcagcatcagcaagctggagctgtctgctgctgagcaggagctgctgctgaccctgcccagcctggagagcctggaggtgtctggcaccatccagagccaggaccagatcttccccaacctggacaagttcctgtgcctgaaggagctgtctgtggacctggagggcaacatcaacgtgttttctgtcatccctgaggagttccccaacttccaccacatggagaagctgctgatccagatctctgcagaatatgaccccagcaagctggtgaagctgatccagaacagccccaacctgcacgtgttccacctgaagtgcaacttcttcagtgactttggcagcctgatgaccatgctggtgtcctgcaagaagctgacagagatcaagttcagtgacagcttcttccaggccgtgccctttgtggccagcctgcccaacttcatcagcctgaagatcctgaacctggagggccagcagttcccagatgaggagaccagcgagaagtttgcctacatcctgggcagcctgagcaacctggaggagctgatcctgcccactggagatggcatctacagagtggccaagctgatcatccagcagtgccagcagctgcactgcctgcgggtgctgtccttcttcaagaccctgaatgatgacagcgtggtggagatcgccaaggtggccatcagcggcggcttccagaagctggagaacctgaagctgagcatcaaccacaagatcacagaggagggctacagaaacttcttccaggccctggacaacatgcccaacctgcaggagctggacatcagccgccacttcacagagtgcatcaaggcccaggccaccaccgtgaagagcctgagccagtgtgtgctgcggctgcccaggctcatccggctgaacatgctgtcctggctgctggatgctgatgacatcgccctgctgaatgtgatgaaggagcggcacccccagagcaagtacctgaccatcctgcagaagtggatcctgcccttcagccccatcatccagaagtag

SEQ ID NO: 147274 - DNA, 4212 bp, Artificial Sequence
  derived and/or modified sequence
atggccacccagcagaaggccagcgacgagcggatcagccagttcgaccataatctgctgccggaactgtccgcccttctcggacttgatgccgtgcagcttgcaaaggaactggaggaggaggagcagaaagaaagggccaagatgcagaagggttacaacagccagatgcggtccgaggccaagcgccttaagacctttgttacttatgaaccttattctagctggattccacaggaaatggctgcagctgggttttactttaccggtgtcaagtccgggattcagtgtttttgctgcagcctaatcctttttggcgcaggacttacgcggctacctatcgaagatcataagcggttccacccagattgtgggttccttctgaacaaggatgtcggtaacattgctaagtacgacattcgggttaaaaatttgaaatctagattacgtggggggaaaatgcgataccaggaggaggaggctagactggcctctttcaggaactggccgttttatgtgcagggaatttccccttgcgtgctgtctgaagccggatttgtgtttacagggaagcaagacaccgtacagtgcttttcctgtggaggatgtctgggtaactgggaggagggtgacgatccatggaaggaacacgccaaatggttccccaagtgcgagtttttgcggagtaaaaaaagtagtgaggaaattacgcagtacatccagtcgtacaaggggtttgtggacattacgggagagcattttgtgaattcatgggtccagcgggagctacctatggcttcagcctactgcaatgatagcatttttgcctatgaggagctcaggctggactcattcaaggattggccccgcgaaagcgctgttggcgtcgcagctctcgccaaggctgggctgttctatacgggaatcaaagatatcgtgcagtgcttttcatgcggcgggtgcctcgaaaaatggcaggaaggtgacgaccccctggatgatcacacacgctgttttcctaattgcccgttcctccagaacatgaaatcctctgccgaagtgacgcctgacctgcagtctaggggagagctctgtgaacttctggaaaccacctcggagagtaacctggaagatagcattgccgtaggaccaattgtgcctgagatggcccagggcgaggcccaatggttccaggaggctaagaatctgaatgaacagttacgcgccgcctacacgtctgcgagttttcggcacatgtcactcctcgacataagctctgatctggcaactgaccatctgttggggtgcgatttgagtattgcatcaaagcacattagcaagcccgtccaagagcctcttgtgcttcctgaggtgttcggtaatctgaactctgtgatgtgcgttgagggggaagccggcagcgggaaaactgtcttgttgaaaaagattgcatttctctgggcctccggatgttgcccccttcttaatcgctttcaacttgtgttctacttgagcctgagttcgactcgccctgacgagggtcttgcatccataatctgcgaccagttgcttgagaaggaggggtctgtgacagagatgtgcgtcaggaatatcatccaacaactgaagaatcaggtgctgtttcttctagatgactataaagaaatatgttcaattccccaggttatcggaaaactgatacagaaaaatcatctatctaggacttgtctgcttattgcagtgagaactaatcgagcgcgcgacatccgcagatatctcgaaaccatcctcgagattaaggcttttccattctacaacaccgtgtgtattctccgtaagttattcagccacaacatgaccaggctgcgcaagttcatggtgtacttcgggaagaaccagtccttgcagaagatccagaagacacctctctttgtcgctgctatatgcgcccactggttccagtacccattcgacccgtctttcgacgacgtggctgtctttaaaagttacatggaaagactttctctccggaacaaagctacagcagaaattctcaaagccaccgtgagtagttgcggcgaacttgcgctgaaggggttcttttcatgttgcttcgagtttaatgatgacgacctggcagaagcaggggtcgacgaagatgaggatttgaccatgtgcctcatgtcaaagttcacggctcagcggctgcgccccttctatcggttcctgtcacccgccttccaggaatttctcgctggcatgcggttaattgagctcctcgacagcgaccgccaggagcaccaagatctaggtttgtaccacctcaagcagatcaactcgccaatgatgactgtcagtgcctacaataattttctgaattacgtgtcatcactaccgagtactaaagccggcccaaagattgttagccatctgctgcatctagtagacaacaaagagagcctggaaaacatctccgagaacgacgattatttgaagcaccagcccgagatctcactccagatgcagctgctccgagggttgtggcagatatgtccccaggcctattttagtatggttagcgagcatcttctcgtcctggcactgaaaacagcttatcagtcaaataccgtggccgcctgtagtccctttgtcttgcagttcctgcaggggaggaccctgaccctgggggccttgaacctgcagtatttttttgatcacccagagagtttgtcgctattgaggtcaatccactttccaatcaggggcaacaagacaagccctagggctcattttagcgtgcttgagacttgctttgacaaaagccaggtccctaccatcgaccaagattacgcctcggcctttgagcctatgaatgagtgggagcggaacctagctgaaaaggaggataacgtgaaaagctatatggatatgcagcgccgagccagcccagacctgagcacaggatactggaaactatccccgaagcagtataaaattccctgtctcgaggtagatgttaacgacatagatgtggtggggcaggacatgctggagattctgatgactgttttctcggcttcccaacggattgaactacacctgaatcactctcggggctttattgaatcaatccggcccgcccttgaactgtccaaagctagcgtgacaaaatgttccatttcgaaacttgaactcagtgctgctgagcaggagctgttactgactctcccctccctcgaatctctcgaggtgtccggaaccattcagtcccaggatcaaatattcccaaacttggataagtttctgtgcctcaaggaattgtcagttgacctagaagggaacataaatgtgttctcagtgatccccgaggagtttccgaattttcatcacatggagaaattactcattcagattagtgctgagtatgacccaagtaagctggtcaaattaatccagaactccccgaatctgcatgtctttcatcttaaatgtaacttcttttccgacttcgggtccctgatgacaatgttggtgagttgtaagaagttaactgaaatcaagtttagcgactccttttttcaagctgtgccatttgtggcctcattacccaattttatctccctgaaaatcctcaatctagaaggccagcagttccctgatgaggaaacgagcgaaaagttcgcttacatactgggatcgttgtcgaacctagaggaacttatccttcccacaggagacggcatctatcgtgtggctaaactcattattcagcagtgtcagcaactgcactgccttagggtgctgtctttcttcaagactctgaacgacgactctgtggtggagattgctaaggtagctatctcaggtggtttccaaaagcttgagaacctcaagctcagtataaaccataagattactgaggaaggttaccgaaattttttccaggctttggacaacatgccaaatctgcaagagttagatattagccgccactttaccgagtgcatcaaggctcaagcaaccacggtaaaatctttgtcccagtgtgtacttcggctaccaagactgattaggttgaacatgctgagttggctgctggacgcggatgacattgctcttctgaacgtaatgaaggagagacatcctcagtctaaatacctgactatcctacaaaagtggatccttccattctctccaatcatccagaagtag

SEQ ID NO: 147275 - DNA, 4212 bp, Artificial Sequence
  derived and/or modified sequence
atggccacccagcagaaggccagcgacgagcggatcagccagttcgaccacaacctgctgcctgaactttctgcccttttgggtttagacgccgtccagctcgccaaagagcttgaggaggaggagcaaaaggagcgagccaaaatgcagaaaggatacaattcccagatgcgaagcgaggccaaacggcttaaaacctttgtaacgtacgagccatactccagttggatcccgcaggagatggctgcggccgggttctactttacaggcgtcaaatcgggcattcaatgcttctgttgctcgttgatcctttttggcgccggcctgaccaggcttcctatcgaggatcataaacgcttccatcctgattgtgggttcctgcttaataaggacgtcggcaacattgcaaaatatgacatccgggtcaaaaacttaaaatctcgtttgaggggcggcaagatgcgttatcaggaggaagaagcaaggctagcatctttcaggaactggccattttacgtacagggcatctccccttgtgtactgagtgaggctggctttgtgtttacagggaaacaggacactgtgcagtgtttcagctgtggtggttgcctgggcaactgggaggaaggggatgacccttggaaagaacatgccaaatggttcccaaaatgtgagttcttaaggtctaagaaatccagtgaagagattactcagtacatccagagctacaaaggctttgtagacattacaggcgagcactttgtaaactcatgggtacagcgagaactgcctatggcaagcgcgtactgtaacgattcgatcttcgcttacgaagagttacggctggacagcttcaaagattggccaagagagtctgccgttggagtggctgccctcgccaaggcaggattattctatactggaattaaggacatcgtacaatgtttctcctgtggaggctgcctggaaaaatggcaagaaggggacgacccactggatgaccatactagatgtttccctaattgtccatttctacaaaacatgaagagcagcgccgaggtgacacccgacttgcaatccaggggagaactgtgtgagttgttggaaaccacatctgagtcgaatctggaagactcaatcgccgtaggaccaattgtccccgagatggcgcagggtgaggcacagtggtttcaggaggctaagaatttaaacgagcagttaagggccgcttacacttcagccagcttccgccacatgagtttactcgatattagctccgatctcgccactgaccatctcttgggttgcgacctcagtattgcttcaaaacacataagtaaaccagtgcaggagcccctggtccttcctgaggtcttcggcaatttgaattccgtgatgtgtgtagaaggggaggctggatccggcaaaactgtgctactaaagaaaattgcttttttatgggcttcgggttgttgtccactgcttaaccgttttcaattggttttttatctgagtctgagcagcacacgcccggacgagggcctggcttccatcatatgcgaccagctgctggaaaaggaaggctctgtgactgaaatgtgcgtgagaaacattattcagcagctgaaaaaccaagtactctttcttttggacgattataaggaaatttgttctatccctcaggttatcggaaagctcattcagaaaaatcatctgagccggacatgcctgctgattgcagtgcgcacaaaccgtgcgcgggacatccggagatatctggaaaccattctcgaaatcaaggctttccccttttacaataccgtatgtattttgcgaaaactattttcccacaatatgacccgactccgaaaatttatggtgtattttgggaaaaaccaatccctccagaagatccagaaaacaccactgttcgtggctgccatctgtgctcattggtttcagtacccctttgatcctagttttgatgatgtggccgtcttcaaaagttacatggaaaggctttcactaaggaataaagccactgccgagattttgaaggccaccgtgtcaagctgtggtgagctagccctgaaagggtttttctcctgttgtttcgaattcaacgatgacgacttggccgaagctggagtagacgaggatgaagacctgacaatgtgcctcatgagcaagtttaccgcccaacgcctccggcctttctatcgcttcctgagccccgcctttcaggagttcctcgccggtatgagactcatcgagctgttggactctgataggcaagaacaccaagatttgggcctgtaccaccttaagcagatcaactcacctatgatgactgtttccgcttataacaattttctgaactacgttagcagcttgccgtctaccaaagcagggcctaagatcgttagccatctgctgcaccttgtcgataataaggagagcctggaaaacatcagcgagaatgatgattacctaaaacatcagcctgagattagtcttcagatgcagctgttaaggggcctgtggcaaatctgtccccaggcttatttcagcatggtttctgagcatttgctcgttcttgctctcaagaccgcttaccagtcaaacactgtggccgcttgctctccatttgtgcttcagtttctgcaaggcagaactctcaccctgggagcgctcaatttacagtacttttttgatcacccggaaagcctttcactactgagatcgattcattttccaattaggggcaataaaactagtccaagagcgcactttagcgtattggaaacctgtttcgacaagagccaagtcccaaccatcgatcaggactatgcgtctgcctttgaacccatgaacgaatgggaaagaaacttggccgagaaagaagataatgtgaaatcttacatggacatgcagcgtcgagcatcccccgacctcagcacaggctactggaaactcagccctaagcagtataaaataccttgtctagaagtggatgtgaatgacatcgacgtggtgggccaagacatgctggaaattctgatgacagtgtttagtgcaagccagcggatcgaactgcacctaaatcactccaggggatttattgagtcgatcaggccagccctcgagttatccaaggcttccgttacaaagtgttcaatctcgaaacttgaattgagcgctgcagaacaggagctgctgctgacgctccctagcctggagtctttggaggtgtctggcacaatccagagtcaggatcagatatttccgaatttggacaagttcttgtgtctgaaagagctttccgtggacctggagggaaacatcaacgttttttctgtgattcctgaagaattccctaacttccaccacatggagaaactgttgatccagatcagcgctgagtacgacccgagtaaactggttaaattaatacagaatagtccaaacctgcatgtgtttcaccttaaatgcaacttcttctccgactttggctcactgatgacgatgctcgtaagttgtaagaagctgaccgaaattaagttcagcgacagctttttccaagccgttccattcgtggctagtttgcccaacttcatctctctcaagattttaaacctggaagggcagcaatttccagacgaggaaacgagtgagaagtttgcctatattcttggctcactttcaaacttggaggaactcatcttgcccaccggggatgggatttatagggtggcaaaactgatcatccaacagtgccaacagcttcattgccttagggtactaagcttcttcaaaacgttgaatgatgacagcgtggttgagattgccaaggtggctatttcaggggggtttcagaaattggagaacctgaagctctctatcaatcacaagattaccgaggagggctatcgcaatttctttcaagccctggataacatgccgaacttgcaggagctggatatctcacgacacttcactgagtgcatcaaggcccaagcaaccaccgtgaaaagcctgagccagtgtgttctcaggctccctcgcttgattaggcttaatatgctgagctggctcctggacgcggacgatatcgctctccttaatgtgatgaaagagcggcacccacaaagcaagtatctcacaatcctgcaaaaatggatcctcccattctcacccatcattcagaaatag

SEQ ID NO: 147276 - DNA, 6088 bp, Artificial Sequence
  derived and/or modified sequence
cttctggtgtgagactctgtaggtttcattactccttttgggtcctgattaaatcctgttgactcaagaccttagagcatttactggtaaagtctctgactgcgcgattttttttttgcattttagttccttaaatattttctcactgcttcctactaaaggacggacagagcatttgttcttcagccacatactttccttccactggccagcattctcctctattagactagaactgtggataaacctcagaaaatggccacccagcagaaagcctctgacgagaggatctcccagtttgatcacaatttgctgccagagctgtctgctcttctgggcctagatgcagttcagttggcaaaggaactagaagaagaggagcagaaggagcgagcaaaaatgcagaaaggctacaactctcaaatgcgcagtgaagcaaaaaggttaaagacttttgtgacttatgagccgtacagctcatggataccacaggagatggcggccgctgggttttacttcactggggtaaaatctgggattcagtgcttctgctgtagcctaatcctctttggtgccggcctcacgagactccccatagaagaccacaagaggtttcatccagattgtgggttccttttgaacaaggatgttggtaacattgccaagtacgacataagggtgaagaatctgaagagcaggctgagaggaggtaaaatgaggtaccaagaagaggaggctagacttgcgtccttcaggaactggccattttatgtccaagggatatccccttgtgtgctctcagaggctggctttgtctttacaggtaaacaggacacggtacagtgtttttcctgtggtggatgtttaggaaattgggaagaaggagatgatccttggaaggaacatgccaaatggttccccaaatgtgaatttcttcggagtaagaaatcctcagaggaaattacccagtatattcaaagctacaagggatttgttgacataacgggagaacattttgtgaattcctgggtccagagagaattacctatggcatcagcttattgcaatgacagcatctttgcttacgaagaactacggctggactcttttaaggactggccccgggaatcagctgtgggagttgcagcactggccaaagcaggtcttttctacacaggtataaaggacatcgtccagtgcttttcctgtggagggtgtttagagaaatggcaggaaggtgatgacccattagacgatcacaccagatgttttcccaattgtccatttctccaaaatatgaagtcctctgcggaagtgactccagaccttcagagccgtggtgaactttgtgaattactggaaaccacaagtgaaagcaatcttgaagattcaatagcagttggtcctatagtgccagaaatggcacagggtgaagcccagtggtttcaagaggcaaagaatctgaatgagcagctgagagcagcttataccagcgccagtttccgccacatgtctttgcttgatatctcttccgatctggccacggaccacttgctgggctgtgatctgtctattgcttcaaaacacatcagcaaacctgtgcaagaacctctggtgctgcctgaggtctttggcaacttgaactctgtcatgtgtgtggagggtgaagctggaagtggaaagacggtcctcctgaagaaaatagcttttctgtgggcatctggatgctgtcccctgttaaacaggttccagctggttttctacctctcccttagttccaccagaccagacgaggggctggccagtatcatctgtgaccagctcctagagaaagaaggatctgttactgaaatgtgcgtgaggaacattatccagcagttaaagaatcaggtcttattccttttagatgactacaaagaaatatgttcaatccctcaagtcataggaaaactgattcaaaaaaaccacttatcccggacctgcctattgattgctgtccgtacaaacagggccagggacatccgccgatacctagagaccattctagagatcaaagcatttcccttttataatactgtctgtatattacggaagctcttttcacataatatgactcgtctgcgaaagtttatggtttactttggaaagaaccaaagtttgcagaagatacagaaaactcctctctttgtggcggcgatctgtgctcattggtttcagtatccttttgacccatcctttgatgatgtggctgttttcaagtcctatatggaacgcctttccttaaggaacaaagcgacagctgaaattctcaaagcaactgtgtcctcctgtggtgagctggccttgaaagggtttttttcatgttgctttgagtttaatgatgatgatctcgcagaagcaggggttgatgaagatgaagatctaaccatgtgcttgatgagcaaatttacagcccagagactaagaccattctaccggtttttaagtcctgccttccaagaatttcttgcggggatgaggctgattgaactcctggattcagataggcaggaacatcaagatttgggactgtatcatttgaaacaaatcaactcacccatgatgactgtaagcgcctacaacaattttttgaactatgtctccagcctcccttcaacaaaagcagggcccaaaattgtgtctcatttgctccatttagtggataacaaagagtcattggagaatatatctgaaaatgatgactacttaaagcaccagccagaaatttcactgcagatgcagttacttaggggattgtggcaaatttgtccacaagcttacttttcaatggtttcagaacatttactggttcttgccctgaaaactgcttatcaaagcaacactgttgctgcgtgttctccatttgttttgcaattccttcaagggagaacactgactttgggtgcgcttaacttacagtactttttcgaccacccagaaagcttgtcattgttgaggagcatccacttcccaatacgaggaaataagacatcacccagagcacatttttcagttctggaaacatgttttgacaaatcacaggtgccaactatagatcaggactatgcttctgcctttgaacctatgaatgaatgggagcgaaatttagctgaaaaagaggataatgtaaagagctatatggatatgcagcgcagggcatcaccagaccttagtactggctattggaaactttctccaaagcagtacaagattccctgtctagaagtcgatgtgaatgatattgatgttgtaggccaggatatgcttgagattctaatgacagttttctcagcttcacagcgcatcgaactccatttaaaccacagcagaggctttatagaaagcatccgcccagctcttgagctgtctaaggcctctgtcaccaagtgctccataagcaagttggaactcagcgcagccgaacaggaactgcttctcaccctgccttccctggaatctcttgaagtctcagggacaatccagtcacaagaccaaatctttcctaatctggataagttcctgtgcctgaaagaactgtctgtggatctggagggcaatataaatgttttttcagtcattcctgaagaatttccaaacttccaccatatggagaaattattgatccaaatttcagctgagtatgatccttccaaactagtaaaattaattcaaaattctccaaaccttcatgttttccatctgaagtgtaacttcttttcggattttgggtctctcatgactatgcttgtttcctgtaagaaactcacagaaattaagttttcggattcattttttcaagccgtcccatttgttgccagtttgccaaattttatttctctgaagatattaaatcttgaaggccagcaatttcctgatgaggaaacatcagaaaaatttgcctacattttaggttctcttagtaacctggaagaattgatccttcctactggggatggaatttatcgagtggccaaactgatcatccagcagtgtcagcagcttcattgtctccgagtcctctcatttttcaagactttgaatgatgacagcgtggtggaaattgccaaagtagcaatcagtggaggtttccagaaacttgagaacctaaagctttcaatcaatcacaagattacagaggaaggatacagaaatttctttcaagcactggacaacatgccaaacttgcaggagttggacatctccaggcatttcacagagtgtatcaaagctcaggccacaacagtcaagtctttgagtcaatgtgtgttacgactaccaaggctcattagactgaacatgttaagttggctcttggatgcagatgatattgcattgcttaatgtcatgaaagaaagacatcctcaatctaagtacttaactattctccagaaatggatactgccgttctctccaatcattcagaaataaaagattcagctaaaaactgctgaatcaataatttgtcttggggcatattgaggatgtaaaaaaagttgttgattaatgctaaaaaccaaattatccaaaattattttattaaatattgcatacaaaagaaaatgtgtaaggcttgctaaaaaacaaaacaaaacaaaacacagtcctgcatactcaccaccaagctcaagaaataaatcatcaccaatacctttgaggtccctgagtaatccaccccagctaaaggcaaacccttcaatcaagtttatacagcaaaccctccattgtccatggtcaacagggaaggggttggggacaggtctgccaatctatctaaaagccacaatatggaagaagtattcaatttatataataaatggctaacttaacggttgaatcactttcatacatggatgaaacgggtttaacacaggatccacatgaatcttctgtgggccaagagatgttccttaatccttgtagaacctgttttctatattgaactagctttggtacagtagagttaacttactttccatttatccactgccaatataaagaggaaacaggggttagggaaaaatgacttcattccagaggcttctcagagttcaacatatgctataatttagaattttcttatgaatccactctacttgggtagaaaatattttatctctagtgattgcatattatttccatatcatagtatttcatagtattatatttgatatgagtgtctatatcaatgtcagtgtccagaatttcgttcctaccagttaagtagttttctgaacggccagaagaccattcgaaattcatgatactactataagttggtaaacaaccatacttttatcctcatttttattctcactaagaaaaaagtcaactcccctccccttgcccaagtatgaaatatagggacagtatgtatggtgtggtctcatttgtttagaaaaccacttatgactgggtgcggtggctcacacctgtaatcccagcactttgggaggctgaggcgggcgaatcatttgaggtgaggaattcgagaccagcctggccagcatggtgaaaccccatctctactaaaaatacaaaaattagccaggtgtggtggcacatgcctgtagtcccagccactagggcggctgagacgcaagacttgcttgaacccgggaggcagaggttgcagtgagccaagatggcgccactgcattccagcctgggcaacagagcaagaccctgtctgtctcaaaacaaaaaacaaaaccacttatattgctagctacattaagaatttctgaatatgttactgagcttgcttgtggtaaccatttataatatcagaaagtatatgtacaccaaaacatgttgaacatccatgttgtacaactgaaatataaataattttgtcaattatacctaaataaaactggaaaaaaatttctggaagtttatatctaaaaatgttaatagtgcgtacctctaggaagtgggcctggaagccattcttacttttcagtctctcccattctgtactgttttttgttttactttcgtgcctgcattatttttctatttaaaacaaaaataaatctagtttagcact

SEQ ID NO: 147277 - DNA, 6124 bp, Artificial Sequence
  derived and/or modified sequence
acaaaaggtcctgtgctcacctgggacccttctggacgttgccctgtgtacctcttcgactgcctgttcatctacgacgaaccccgggtattgaccccagacaacaatgccacttcatattggggacttcgtctgggattccaaggtgcattcattgcaaagttccttaaatattttctcactgcttcctactaaaggacggacagagcatttgttcttcagccacatactttccttccactggccagcattctcctctattagactagaactgtggataaacctcagaaaatggccacccagcagaaagcctctgacgagaggatctcccagtttgatcacaatttgctgccagagctgtctgctcttctgggcctagatgcagttcagttggcaaaggaactagaagaagaggagcagaaggagcgagcaaaaatgcagaaaggctacaactctcaaatgcgcagtgaagcaaaaaggttaaagacttttgtgacttatgagccgtacagctcatggataccacaggagatggcggccgctgggttttacttcactggggtaaaatctgggattcagtgcttctgctgtagcctaatcctctttggtgccggcctcacgagactccccatagaagaccacaagaggtttcatccagattgtgggttccttttgaacaaggatgttggtaacattgccaagtacgacataagggtgaagaatctgaagagcaggctgagaggaggtaaaatgaggtaccaagaagaggaggctagacttgcgtccttcaggaactggccattttatgtccaagggatatccccttgtgtgctctcagaggctggctttgtctttacaggtaaacaggacacggtacagtgtttttcctgtggtggatgtttaggaaattgggaagaaggagatgatccttggaaggaacatgccaaatggttccccaaatgtgaatttcttcggagtaagaaatcctcagaggaaattacccagtatattcaaagctacaagggatttgttgacataacgggagaacattttgtgaattcctgggtccagagagaattacctatggcatcagcttattgcaatgacagcatctttgcttacgaagaactacggctggactcttttaaggactggccccgggaatcagctgtgggagttgcagcactggccaaagcaggtcttttctacacaggtataaaggacatcgtccagtgcttttcctgtggagggtgtttagagaaatggcaggaaggtgatgacccattagacgatcacaccagatgttttcccaattgtccatttctccaaaatatgaagtcctctgcggaagtgactccagaccttcagagccgtggtgaactttgtgaattactggaaaccacaagtgaaagcaatcttgaagattcaatagcagttggtcctatagtgccagaaatggcacagggtgaagcccagtggtttcaagaggcaaagaatctgaatgagcagctgagagcagcttataccagcgccagtttccgccacatgtctttgcttgatatctcttccgatctggccacggaccacttgctgggctgtgatctgtctattgcttcaaaacacatcagcaaacctgtgcaagaacctctggtgctgcctgaggtctttggcaacttgaactctgtcatgtgtgtggagggtgaagctggaagtggaaagacggtcctcctgaagaaaatagcttttctgtgggcatctggatgctgtcccctgttaaacaggttccagctggttttctacctctcccttagttccaccagaccagacgaggggctggccagtatcatctgtgaccagctcctagagaaagaaggatctgttactgaaatgtgcgtgaggaacattatccagcagttaaagaatcaggtcttattccttttagatgactacaaagaaatatgttcaatccctcaagtcataggaaaactgattcaaaaaaaccacttatcccggacctgcctattgattgctgtccgtacaaacagggccagggacatccgccgatacctagagaccattctagagatcaaagcatttcccttttataatactgtctgtatattacggaagctcttttcacataatatgactcgtctgcgaaagtttatggtttactttggaaagaaccaaagtttgcagaagatacagaaaactcctctctttgtggcggcgatctgtgctcattggtttcagtatccttttgacccatcctttgatgatgtggctgttttcaagtcctatatggaacgcctttccttaaggaacaaagcgacagctgaaattctcaaagcaactgtgtcctcctgtggtgagctggccttgaaagggtttttttcatgttgctttgagtttaatgatgatgatctcgcagaagcaggggttgatgaagatgaagatctaaccatgtgcttgatgagcaaatttacagcccagagactaagaccattctaccggtttttaagtcctgccttccaagaatttcttgcggggatgaggctgattgaactcctggattcagataggcaggaacatcaagatttgggactgtatcatttgaaacaaatcaactcacccatgatgactgtaagcgcctacaacaattttttgaactatgtctccagcctcccttcaacaaaagcagggcccaaaattgtgtctcatttgctccatttagtggataacaaagagtcattggagaatatatctgaaaatgatgactacttaaagcaccagccagaaatttcactgcagatgcagttacttaggggattgtggcaaatttgtccacaagcttacttttcaatggtttcagaacatttactggttcttgccctgaaaactgcttatcaaagcaacactgttgctgcgtgttctccatttgttttgcaattccttcaagggagaacactgactttgggtgcgcttaacttacagtactttttcgaccacccagaaagcttgtcattgttgaggagcatccacttcccaatacgaggaaataagacatcacccagagcacatttttcagttctggaaacatgttttgacaaatcacaggtgccaactatagatcaggactatgcttctgcctttgaacctatgaatgaatgggagcgaaatttagctgaaaaagaggataatgtaaagagctatatggatatgcagcgcagggcatcaccagaccttagtactggctattggaaactttctccaaagcagtacaagattccctgtctagaagtcgatgtgaatgatattgatgttgtaggccaggatatgcttgagattctaatgacagttttctcagcttcacagcgcatcgaactccatttaaaccacagcagaggctttatagaaagcatccgcccagctcttgagctgtctaaggcctctgtcaccaagtgctccataagcaagttggaactcagcgcagccgaacaggaactgcttctcaccctgccttccctggaatctcttgaagtctcagggacaatccagtcacaagaccaaatctttcctaatctggataagttcctgtgcctgaaagaactgtctgtggatctggagggcaatataaatgttttttcagtcattcctgaagaatttccaaacttccaccatatggagaaattattgatccaaatttcagctgagtatgatccttccaaactagtaaaattaattcaaaattctccaaaccttcatgttttccatctgaagtgtaacttcttttcggattttgggtctctcatgactatgcttgtttcctgtaagaaactcacagaaattaagttttcggattcattttttcaagccgtcccatttgttgccagtttgccaaattttatttctctgaagatattaaatcttgaaggccagcaatttcctgatgaggaaacatcagaaaaatttgcctacattttaggttctcttagtaacctggaagaattgatccttcctactggggatggaatttatcgagtggccaaactgatcatccagcagtgtcagcagcttcattgtctccgagtcctctcatttttcaagactttgaatgatgacagcgtggtggaaattgccaaagtagcaatcagtggaggtttccagaaacttgagaacctaaagctttcaatcaatcacaagattacagaggaaggatacagaaatttctttcaagcactggacaacatgccaaacttgcaggagttggacatctccaggcatttcacagagtgtatcaaagctcaggccacaacagtcaagtctttgagtcaatgtgtgttacgactaccaaggctcattagactgaacatgttaagttggctcttggatgcagatgatattgcattgcttaatgtcatgaaagaaagacatcctcaatctaagtacttaactattctccagaaatggatactgccgttctctccaatcattcagaaataaaagattcagctaaaaactgctgaatcaataatttgtcttggggcatattgaggatgtaaaaaaagttgttgattaatgctaaaaaccaaattatccaaaattattttattaaatattgcatacaaaagaaaatgtgtaaggcttgctaaaaaacaaaacaaaacaaaacacagtcctgcatactcaccaccaagctcaagaaataaatcatcaccaatacctttgaggtccctgagtaatccaccccagctaaaggcaaacccttcaatcaagtttatacagcaaaccctccattgtccatggtcaacagggaaggggttggggacaggtctgccaatctatctaaaagccacaatatggaagaagtattcaatttatataataaatggctaacttaacggttgaatcactttcatacatggatgaaacgggtttaacacaggatccacatgaatcttctgtgggccaagagatgttccttaatccttgtagaacctgttttctatattgaactagctttggtacagtagagttaacttactttccatttatccactgccaatataaagaggaaacaggggttagggaaaaatgacttcattccagaggcttctcagagttcaacatatgctataatttagaattttcttatgaatccactctacttgggtagaaaatattttatctctagtgattgcatattatttccatatcatagtatttcatagtattatatttgatatgagtgtctatatcaatgtcagtgtccagaatttcgttcctaccagttaagtagttttctgaacggccagaagaccattcgaaattcatgatactactataagttggtaaacaaccatacttttatcctcatttttattctcactaagaaaaaagtcaactcccctccccttgcccaagtatgaaatatagggacagtatgtatggtgtggtctcatttgtttagaaaaccacttatgactgggtgcggtggctcacacctgtaatcccagcactttgggaggctgaggcgggcgaatcatttgaggtgaggaattcgagaccagcctggccagcatggtgaaaccccatctctactaaaaatacaaaaattagccaggtgtggtggcacatgcctgtagtcccagccactagggcggctgagacgcaagacttgcttgaacccgggaggcagaggttgcagtgagccaagatggcgccactgcattccagcctgggcaacagagcaagaccctgtctgtctcaaaacaaaaaacaaaaccacttatattgctagctacattaagaatttctgaatatgttactgagcttgcttgtggtaaccatttataatatcagaaagtatatgtacaccaaaacatgttgaacatccatgttgtacaactgaaatataaataattttgtcaattatacctaaataaaactggaaaaaaatttctggaagtttatatctaaaaatgttaatagtgcgtacctctaggaagtgggcctggaagccattcttacttttcagtctctcccattctgtactgttttttgttttactttcgtgcctgcattatttttctatttaaaacaaaaataaatctagtttagcact

SEQ ID NO: 147278 - DNA, 4212 bp, Artificial Sequence
  derived and/or modified sequence
atggcaacccagcagaaagccagtgatgagagaatctcccagtttgatcataatttactacctgagctgtctgcactgttgggactggatgccgtgcagctggccaaggaattggaagaggaggagcagaaggaaagggcaaaaatgcaaaaaggatacaacagccaaatgcgttccgaagcaaagaggttgaagacttttgtgacctacgaaccttactcgagctggattcctcaggagatggctgctgcaggattttattttaccggtgtcaaatctggaattcagtgcttctgctgctctttaattctcttcggggcaggactgactcgcttgccaattgaggatcacaaaaggttccaccccgactgcggatttctcttgaacaaggacgttggtaatattgctaaatatgatatccgcgtgaaaaatctgaagtccaggctgagagggggtaagatgagataccaggaagaagaggctcgtctggccagctttcgcaattggcccttctacgtgcagggaatctccccctgtgtgctgtctgaggccggtttcgtgttcacaggcaagcaggacactgtgcagtgctttagctgcggaggctgccttgggaactgggaggagggtgacgacccctggaaggaacacgcgaaatggttcccaaaatgcgagttcctacgtagtaagaaatcgagtgaggaaataacccagtacatccagtcctataaggggtttgttgacattaccggagaacattttgttaatagctgggtccaaagggagctgcccatggcttctgcttactgcaacgatagtatcttcgcatatgaggagttacggctcgactcttttaaagattggcctcgcgagtctgcagtgggtgtggccgctctggctaaggcaggtctgttttacactggaatcaaagacatcgttcagtgttttagctgtgggggttgccttgaaaagtggcaagagggggatgaccctctggacgaccacacacggtgctttcctaactgcccatttctacagaacatgaaaagctctgctgaggtcacgcccgaccttcagtcacggggagaactgtgtgagcttttagagactacaagtgagagtaatctggaagactcaatcgccgtgggcccaatcgttcctgagatggctcagggagaggcacagtggtttcaggaagcaaagaacctgaatgagcagcttcgggctgcttacacgtccgcttctttccgacacatgagtctcttggacatatcttcagacctagcaactgaccacttgcttgggtgtgacctgagcatcgcgtctaaacacatctctaagccggttcaagaacccctcgttctgcccgaagtgtttggaaatctgaactcggtaatgtgcgtggaaggcgaagcagggtcagggaagacagttctgttgaaaaaaatcgcgttcctgtgggcctccggatgttgccctctgctgaaccgattccagctggttttctacctcagtctaagttcaaccagacccgacgagggcctagcctccatcatctgcgatcagctcctggaaaaggaggggagtgtgacagagatgtgtgttcggaatatcatacagcaactgaagaatcaggtgctgtttcttctagacgactataaagagatttgctccattcctcaagtcataggcaagttgattcagaagaaccacctctcacgaacatgtctccttatcgccgtgagaactaaccgcgcaagagacattagaagatatctggaaacgattttagagatcaaggctttcccgttctacaacacagtgtgcattttgcgcaagctgttctcccacaacatgacgcgactgcggaagtttatggtttattttggtaaaaaccaaagtttgcagaaaatacagaagactccgctgtttgtagccgcaatatgtgcacactggttccagtatcccttcgatccatcattcgacgatgtcgccgtgttcaagtcttatatggaacgtctctcactcaggaacaaagcaacagccgaaatcctaaaagccaccgtttcctcttgcggtgagttggcccttaaagggtttttttcctgttgctttgagtttaatgacgacgatttagcagaggcaggagtggatgaggatgaagaccttacgatgtgtctgatgagcaagtttacagctcagaggctgagacccttttaccgttttctgtccccggcatttcaggagttcctcgccggaatgaggctcattgagctgttagacagtgatcgtcaggagcaccaggaccttggcctctaccatctgaaacaaatcaattctccgatgatgacggtgagcgcgtataacaattttctgaactacgtgtccagcttgccttccacaaaggcgggtcctaaaattgtctcccacttgttgcatttagtcgataacaaagagtcacttgagaacatcagcgagaatgatgattacctgaaacaccagccagagatctcactgcagatgcagctactaagaggcctgtggcagatatgcccccaggcctatttctccatggtcagcgaacacctgctcgtactggccttgaagactgcctaccagtctaataccgtggccgcttgttcaccgttcgtgttgcaattcctccaggggaggacacttaccctgggcgctctgaatttacagtatttcttcgaccatccagaaagcctgtctctcctcaggagcattcattttccgatcagggggaacaaaactagtcctcgagcccacttttcggttctcgaaacgtgctttgacaagagccaggtgccaaccatcgaccaggactatgcatctgctttcgagcccatgaacgagtgggagagaaatttagctgagaaggaggataatgtcaaatcatacatggatatgcaaagaagggcctcgcccgatctgtcaacaggttactggaagctctctccaaagcaatacaaaattccctgtctggaagttgacgtaaatgacatcgacgtggtgggccaggacatgctggagattctaatgaccgtgttctccgcttctcagagaatagaactacacctgaaccactcacggggattcatagaatctattcggcctgccttggagctcagcaaagcctctgtgacaaagtgttcaatctccaaactcgagctgtcagccgcagagcaggaacttctgctaaccctgccatctttggagagtcttgaagtgagcggcacgattcaatcccaggatcagatatttcccaacctggacaagttcctgtgtctaaaggaattgagcgtcgacctggagggaaacattaacgtcttctccgtcattccggaggagtttcccaactttcatcacatggaaaagctcctcatccagattagcgcagaatacgatccctcaaaattggttaagttgatccaaaactcccctaacctgcacgtctttcacttgaaatgcaatttcttctccgatttcggatctttgatgaccatgttggtgtcttgtaagaagctaactgaaataaagttttccgacagttttttccaggcagtccccttcgtggccagccttcctaacttcatcagcttaaaaatcctgaatctggaaggtcagcaattccccgacgaagagacaagcgaaaagtttgcatatatacttggaagcttaagcaatttggaagaactgattctgcctaccggcgatggaatatatcgtgtggccaaactgatcatacagcagtgccaacagcttcactgcctgcgcgtgctgtcattttttaagacgctgaacgatgactcagttgtggagatcgcaaaggtagccatctcaggaggttttcagaagctcgaaaatctgaaactatcaataaaccataaaatcaccgaagaaggttatcggaactttttccaagctctagacaacatgcccaatctgcaggagctcgatattagccgacattttacagaatgtattaaagcccaggctacaaccgttaaatcactttctcagtgcgtgttaagactgccccgtctcatcaggctcaatatgttgagctggctgttagacgcagacgatatcgccctattgaatgtgatgaaggagaggcacccccagtcgaaatatctgacgattctgcagaagtggatcctgcctttctctccaatcatccagaagtag
